United States Patent Application Publication US 2026/0191916 A1 - sequence listing, part 72

SEQ ID NO: 489 - DNA, 1438630 bp, Enterocloster clostridioformis
  source 1..1438630: mol_type = genomic DNA
caggcgtccgccggtctttttcccggccgggcgcctgttcatacgttaccattttaccagtttctgcacttcttccataccctccttattgcacaccctccagaccgcagcacaccttaccggcattttcccatggaatatcacacgtcatacacaaaacgcggaaccggccggccgtccacaggggaccgtgtttccccgtcctgcaccgcgcccattttcctgtaaaatcccacggcctgggggctggtgacaaattggatacggcctattccctgttttccgcaccagccgatcatatgctcccacatctgttttcccagtcccctccccagcctttcctctgccacgtaaaaatactctaattcccacgcatctctatcctgcctgattccccagaaggcggccggacagccgcggtcccccgccgcatacacaggattgcagcggataaaatcttccgtaacattaaaccctgcgtcaaagttttccataaacgcctcatcatatccccagtgcgcctccgacgccctggcaagccggcgcagcgctttcgtatcctcgggctcagccctggcaaactccaaagcctgccttttataccggccgggataaagggtctttgcatccccggtaaaccttgccaccataactgttttctgctccgtatacccatcccggtcatattcatattccttccagagcctcagtttcagcgcctcatattccctggctgcttccggatgctccctcatataatcccgaaaatacagctcgtcgttatcccccgcctctctcagatgcagatggaataccttctccgcaagtccagacggcgtgtaccctctgttgaacgaaatcctccccgccttttccatcatgcagatgtagccgccgcggatgatatgctccttcatggcctgcatatcagcgccttcccttatttccaccaggatatccactatgggcttggcccagatggatgggatggacgtgcttcccacatggctgatttcacagatatcctccatggacaggatgtccagcagccgcttcccttcctcctgataccactgcgcccagaccggcctgtgctctgtgaggaacacagggaacatctgccacagctcctccagactcatgccggaaaacgggtcctgtttatccttcatcatcatgtctctccaattttctctcccactcctccttcacccctttcatcctgcggaaataggaactcatctcatccgccatgcctgacagacggtttaaaagagtggaaaaatcctttaacatctcatcgttctggaaataggggtatacgatatcatggtctatctcactccagccctcctcgaacagggtccttccctggatttccacatagtatcccttatatttgatgatatagtggagagagcggtatattccgttggacttaatctcaatcaaattctcatcataaatcctggtgtctccgttcctgcggtagacctttggccgttccgcgatgtaataatgcctgggatcctcatcaaaatcctttatccggtccaccacatagagagcgggattattctcaaatacgctggttatatatttgtggaaatgaatccaatcctcccggtaaagaaaaaacacccggataccaatcaggtccgtgatatacttatgataattgctcctgcttatatcctcaaaccgttcaaaatgttcgttgcgcttgcgtatgattttctctatcagatggccgggatccttagtacggtaccgataggaatgtatgcccgccctctcaatatcatagagataatcgtatacaaaatccttaccaatgctgcgcagtcttccctcaacggacagataatcatcatatatggcagccagctcctcccaggccagaccgactgccttaagttcctcaggttcaatgttgtagcttgtcaaaaatttttccttgtcaatcatccggtatcattcctcctgtgtgtctaaaatgtctgcgtatcctcacagccgccctgcactatccatcaatgaggtttcatcacaaatgccctctcatccactgcccgcagggttgccagtattccgtccaggtgatcgtactcatgctgaatcagctccgacatatccccctccagttccatggaacagtcgttccagtccaggtctttataatatatgatgcaccgtttatgccgctttaccctgaccagaaggtcaggaaatgacatacaatcgtccagcacatctatcatatcctgttcaggaaaggaaagacagggattgataaacagcacaggcgtgtccaggtgccggtaaataacacgtttcttcactccaatctgaggcgccgcaatggctcttcccactccatatcgggccctgaatgccaacagggtatcctttaaatcctcctgcacctgtttcatctgctgaagctcttctattttcacttcctcgctgacctcatataattcaggatctcccaataaaagaatcgtccgctccatgtcaaaacctccctctgcgctgttttcgctcccacgcaacgcgttttcttaagtataccatgattccatcctatttccaaatcccaattaaaggggacagccaaaaaatccggaccgcctcgtacatggggcagtccgggcctgtatgcctttttgtatattacgcctgtgtgaactcaatcagattcagtccgatggattcgttcattcttctgcctgcggttccgtcaatcaccgtaatgaaaatctcggcagtggcgctgataaccgccctgttcaaatggcctccatggcactctcccaccagtgggttgccgattaccatgtgaagatggagatagggattttctccctgctgcgttatgctgcctgtgagggaggcaatctcatagatgcccttgaaggacttcccataatatttcttttccgttgtatcaaataccccaagttccgcctcagaagcagcccccagcccggagacctctcccaaagccaccttttcagttctgcacacttcccgaatacactctgccacttcctcgcccggattcaggcggagaaggattttttgtccaaatctcttatattccatggtattgactcctttcaaacacagtttacaatacatacatctccctctccaaaagtcatatcccgtgacatatcccgagtcatatcccgtccacccttcccattgtcaaatttccttcgcagatatataattataccaatatctattttataccatacaaccttagagataccaggaggcgatacaatatggataatggaatgaaaataccggactgtcccgtggaaatgaccctgtggctcatcggagacaaatggaaggttctcatcatccgggatttgctcacagggacaaaacggttcaacgagctcatgcggtccgtcagcggcataacccagaaagtccttaccagccatctcagggccatggaacaggcaggacttgttacacgcaaaatatacccgcaggttcccccgaaggtggaatataccctgacggaaacaggatacagcctgaaacccataccggactccatggcagcctggggaacggcttacaaaaagaatacagggcaaatgcaaacgcaaaaagagccgtgaacccgtttttctcacttccagggtccatggctcttatatgatattacccgcacacagccggctccactcctaaaaaacccgctgtatcccgaagcgccttcatcccgtcaaggcgccctaattcatacatctgttgtatcttctccggtctgttttctgtcctgctgattttaataagatggctgggccgtatgacaaaaatttcccccgcagcctccatgcgtctgacctcctccagttcccggttatacatcaggtgacggcactccatggtttttataaattcaggatatctgcggtataccctgcggatagcggggagcatatggtttggctttttgcggtagccatccggccgggtaagtatgaccaggcttcttccaaagcccattttgcggaatgcagccgcgggaatggagtcggatactcctccgtccagcagtttatgtccgtcgatttccacaatcctggaaaccaggggcatggatgcggatgcccggatccattgtatgttctctcccctcaggctgtcgcatctgtggtacaccggcctgccggtctccacatccgtgcaggtggcataaaactccatgggcgaagcctcaaaggcgtcattgtcaaatgggtccagccgttccggcagttcgtgatagcagaactcatttcccaccaggtcgccggtcgttaccagagatcggaagctcatataccgcggatcgcggcagtacttcagattatatcgtatggagcgcccggcctgtcccgccacaaagctgcacccatggatggcgccggccgaaacgcccaccagaccgtccgccttaatcccatgttccaataatacatccaatacaccggcggcgtaaatgccccgcattccgccgccttccacaacaattccagttttcatttccatctacctctttacagacgcattttaggaattagcccttacctcgtcccactggccatggcctgtcagccagttaagagccttgtgccattcccttaccgccccggtcttcatgcccgcaggctccggcagctcatggcgcctggcattgatgcaggaccattccagacaggaaataaggtcgcaggcatctaacagctctctggggctcttaggcctggactttgccatgattttactgatactggtgccatttctcagggacttcaccaaatcagcgggattgcacggatgatccgggaaccccagctcctccaccagtcccagcgcccactctaccacgtaaagggattcatactgccttaagaaagacaggacttccttcctgtcgggagccgtatcgtgaagatacctccactccctgggagaaaaataatcctgggtattgttattatcaatataatccatcaggaaattctgggccttttccactccctgcttttcatccagcaggcattccgaataaatggcaacgcccatgatggccagggctctcttggctgtctcctccagggagggacatgttatctgcgaagcaggctcaaccgccggcagccatccgggtacatagatggcattcccgataagcgtctgcatggtgcgcatccttcggtccacctgttcctgggtgatatcctttccggcctttaagtccggctcctgatagggaagatagcgggtaaaggcgcttccgcccttgtcggacagaatcagaagcttttccccattttccccgcagcagaacatgctgtcctctttctcttcctggttctggatcaggatgatcccctccaggtcgtttaagacggacacaaacatgtcctcaatcatggtcttcttgccctcaatatcctcctcgtcttccacgtcaaaggcatattccaccagcacaaaacttctggcccgtccaatctggtacagcaggttggtcttaacatccaccactcctgtttccacctgatagaaatggccgcaggttccctccacctgtttctttatgaactcctccgcctgctcgccggcagactcgctggccaccgccagacggatttctatatctccgttgtgcagaaccagggtgtctcccattccctccgggtccaggccaaaggttgcacacagaacttgaatgattttttcctgtgacgggatatctgagaaaatgaatgccttgccttcataccgctttgctggggctgatgtctctgttgtattcttttcttcaaacaattccatataaatctccttcttgattacaccgtataaaacagtttgattatactatgtttggtgggaaaacacaaattattccttatattttctactatttcccttcaaaataatccgaagccgccatcccatagatacactcatcgcatatcccctgattattccacccatactgccggagggtcccttcctttttaagcccgcaggccatcatgacctttccgctgttcacattgcgcgtatcatgcagggcctccacgcggttggcaccctccacctcgaaaaagaaccgaatcagctccgcaaacgcctccttcatgattccattcccccaccacttcctgcccaggcagtaacccaccgtcacccgtccggccttctggttaagctccgggacagaaatgtttccaatgacatttccctggtcttccttccactctatggcccagttataataatccccggacgcataagactgaatccagccctccaggattctccttgtctcctccgcatccttatgaggttcccaggagagaaacttcgtgacctgaggatcgtttgcccagtttctgaacatggcgccggcatcctctatcacaaaagggcgcagcaccagccgctttgtctccattctcacggttcctgaattcttcataaggttcctctcctttcctgcacatacaaaggatgtgcgcagcatgattgactggcagcagaatattattctctaatatagcacacatcccgcattttaggaacccttaatatcctaaattattccatatagctatgcttcctccgcttgcttcttctttaactccatagcccctgcctctgcccgctcctgaaggatgggattgtcaaaacacaaaaatgctcaaaggcatcgggatatggaaatacctttaattaagcttacctctttaagcaaaaaaagctctccggccgcatcatataccggagagctttttccataaagctttcttcaagtcccatctctattccatccctgcaaatatttattccactcccgcttttttgcagatatcattgagacagcatgactcgcagtggggttttgtcctggccgtgcagacgtcccggccatggaataccagcctgtggcagaaatcgctgccctcctcaggcggtacaagcttccacagagccatctccaccttcttgggctccttgattccatccaccaaacccatgcggttcaccaggcggatgcagtgtgtgtccgtcacaatggcaggttttccaaacacatcccccataatcaggttggcgctctttcttcccactccgggaagctttaacagggcgtcaaagtcatccggcaccttgcctccatactgttccttcagtatcttcatgcaggcgcttatgtccctggccttgctgtgtcccaggccgcagggcttcacaatccgttcaatgtcttccacatccgcctctgccagggcatccacatccggatatttggcgtaaaggtcctcaaccaccacgttcacccttgcatctgtacactgtgccgccagacgtacactgaccagcagcttccacgcatggtcatagtccagggtacagcctgcatcgggatattcttttttcaggcggcctatgatttccaatgctagtttttccttagtcatgttatatctcctttgtatgctgcagcgcacttctttttaacttctttttaacttcctttttacttctttgtatcatcctgcgcttctcttttcacatacatcttattatacatgacacaggtttatttctcaagggaaataccctggggcagactgtaaggacaacggccccagggcagattattcctgttgatatcacatatgattatttaacaataaacgacttcctcttactcaccacatcaaagataacggctgccagcagaacgccgcccttgaccaccttctgcaggttctggtccacgcccatgatgctcatgcccagattcagcacgcccatgagggttgcgcccacgataaccccaggcaccgtgccggtgccgccgtatgcggaagcgccgccgataaagcacgcgccgatggcgtccatctcatagctgtttccggccgttgggttggcggagttcagtctggccactgtaaccatgcccgcgatggctgccagaagtcccatgttcagataagccaggaaatatacccggttggtattaatgccggaaagctttgttgccttttcatttccgcccacagcgtagaaataacggcctgtggtggtcttggaggcgatatagctgtagattccgatgatgaccgcaacccagataagagcgtttggaattcccttgtactgggccagacggaacatgaaggagagcaggacaatgcagatgactgccattttgaccacaactcccgtaaggggctccacataatacccctttgccagtttctgtctccttccgttgaacacgataacggcatagacaacacaggcaatgacgcccaccaggaaacaggtcaggttaaatccctccactgcgaagaaatccggcacataggtgttgaacagcaccaggaactggtccggtatgggggccagcgtcattccctgcagcaccacattggaaagccccctgaacatcagcatgcctgccagggtaacgataaaaggaggaatcctgacataggcaatccagaatccctgccatgctcccaccagcattcccatgatgaccatggcgataagtgtaaggcagggactgatgcccatttccaccatcatcttgcctccgatggcgcccacgaagcataccacggaaccaacggacaggtcgatgttgcctcctgtcaggatacagaacagcataccggtggccaggataaatacataggcattctgggcaatcaggttgtttacgttctgcggaagaagcatcttgcctcccgtgttcacggtaaacagtatgataatgaccgcaagagcgataatcattgtatattttttcagaatctctgatattttcagcttttgatccatggtctactctcctttatcagctttaagaatacaggacataatatattcctgggtagcttccgaagcgtccacttccccggccagcctgccctcattcatgatataaatgcggtcggacatgcccagcacctcgggaagctccgacgatatcatgatgacggactttccctcctccaccagacggtttatgatgcagtatatctcgtatttcgcgcccacatcgattccccttgtgggctcatccagaatcagcacatcgggctctgtgaacatccattttgccagaagcaccttctgctggttgccgccgcttaaattacctgcgttctgttccaccccaggacattttgtcttcagcttatccttgtactccacagccaccatgtattctttgtccttgtctatgactccatggctgctgaccgcccccatgttggcaagggtggtgtttacacggatgggattggacaagataaggccgttccccttcctgtcctcggtcacatatgcgattttatggcgtatggcatcctgcaccgtattcagatggacttcttttccctcaatataaagctgtcccgatatattggtgccgtagctctttccgaaaatgctcatggccagctccgtacgtcccgcgcccataaggccgcagattcccaccacttctcctttgtttacatgaagggaaacatggtccaccaccttcctgtctgagtacagaggatggtataccacccagtccctgaccttaagggcagtgccgccgatgctgatgctctccctcctggggaaccggtctgtcagctcacgtcccaccatgccctttatgatccggtcctctgagatgtcgtctgtctgtttgtccagcgtctctatggtggagccgtcacggatgaccgttatcttgtcagccacatatgcgatctcattgagcttatgggaaataatgatggatgtcatgccctcctccttgaatttaagaagcagctccagcagggctttggaatcatcctcattgagggaagcagttggttcgtccagaatcagcagccgggcctttttggcaagggccttggctatctccaccagctgctgctttcccactccgatatccttgatcaatgtatgggaggactcgttaagacccactgtctttaaatagcggtcggcctcgtcgtatgtctggtcccagttaattgccatcttccttcctttttcatttccaaggtacatgttctcgccaatggacatatatggaatcaacgccagctcctggtggatgatgacgattcccttttcctcgctgtcactgattttatcgaacttgcacacctgaccgtcgtaaatgatgtcgccctcatatgtgccgtagggatatatgccgctgagcacattcatgagagtggatttaccggctccgttttcccccaccagcgcgtggatttctcccttttccaccttcaggtttacattgtcaagggcttttactccggggaaggtcttggtgatatttctcatttccaaaagtatctctgccattctatccctcctacaaccatacaggcgggtatttctccccgcctgtgtgattctcaccttttccggtctgtttcaccggtccatctgattactttaactggtcttccgtgtaataaccggagtcaatcagcatttctttgtaattatcaattgtgacaaccaccggctcgcagagatatgtggggattacgcctgtgccgttgtcataagactgggtatcgtttacttctgcctctccgccctgcataacggcgtccaccatcttaaccacctgtgaggccagggtacgtgtatccttgaatacggacattgcctgcttgcctgcaatcaggttcttcacattgacgatatcacagtcctggccggtgataatgggatattcgccggtataggaggatgcaagggcattctcaacacccagtgcggtggagtcgttggagcagagtactgcgtttaaaacggttccgtcggagtaatttcctgcgatgatggtatccattctgttctgtgccttctccgaatcccagttagcggttgccacctgctcaaatgtggtctggccggactttacaaccagctttccgctgtcaatgtatggctgaagcacgtccatggctccgccgaagaagaagttacagttattgtcagccgggtctccggtgaacatctcaatgttgaacggtccgtcgttcccctctaatccaagagcctttaccagatattcgccctgcttctgtcctaccatatagttgtcaaaggttgcgtagtatgtaacagcgtcggagttcatcagaagtctgtcataggaaataacaggtatgcctgcttcctttgcctgtcccagcggctcgcccagagagcttccgtcgatggatgcgattaccagcatctcacagccgttggaaatcatgttctccacctgggatacctgggtctgtacatcgttgctggcgtactgaaggtctacctcatatccggctgcctccagctctgccttcatattgcttccgtcctggttccatctctgcaggtccttggttggcattgccacgccgatcaggtgcttttcgccggatgcagccccgtcctttgctgcttctgtctcagccttggtatcctctgctttggcatcctctgcctttgcgtcggcctgggtctctgtctttgcctctgaagcaggagcagctccctccttgcctgcgcatgccataaggctgcctgccatggctaatgtaagcatggtcactaacaatttctttttcatattgcaaatcctcctccaaatgtttttgatggtttcactataccacaaaggcctctggacttgcttggcacccatctgcacacttttgagaggtttaaaaaaatgccctgtgctctacaggacatttttgctcagtttatattgtttttagttaaaaatgtgctagcgtggtctttgcagtcattcctggtcatgaaaagcaaaagaatactgccgggaatacacattagataagataccatatctacccctgctccattgtaaacttttattttatttctgaacaggcctttaatgcttcataagccacatacttaatcaactcaatttccaaaccaatttcgctgtcacttaccgttggaaccgcaatatattcgtcaacatcccctttcgcgtgtgctatggaacacctcattgaatatatccgttcacagagccttcctactatcttttcatcacttttcgttaaatcaattggggggttctgtgaattacaggatttatttactctgtttttatcttgtaatatccaggctttaaactttgatatatccaaactccttgtcagcactcatttcagcgactctctctcacttagtatattcttgtacttgtgcaatacttttctaagttcattgtgatttacagcaggcattgacagcgcaccatattcgtttaaaaaaagtagttttatgctctaacaaaaaaatgctccaatacttgatagtaactcaaatatgccaatctggcctccttggcatgcagagcattgattaggtatagggctggtatatactcgaattctaacgaatgaaactgaattccatataacttggcttccccttctaatttatagattgcatccatttctgcaacggaaaagtctaagtcatgttccattgagactttcagcaatatctcattaatcatacggcatatcgcatcattgcttaagcattctatatcaaataattgaatcgataaatatcttttaccaattcaaccagcttagaaaacaaagcaatctgtatacccaggattttcttggattcttctgttaattcaaacaactcccctccaatatccactgaattaatattatccagcgaaatagtcttaacccatctttttagtgcttcatgtttaaccaaccgattcccatacattgacatataacggactcccctttgtcttgctggtatttctccattaggctgcaccttactgacatgaaagtcagtttacattcaaatacacatcctccttagcatggaacccgcccttaatgatgacctcgtccatattttccccggtgaccgcaatgggctgcaattccaggtagggaacttgataggtgccgtcataggcagtgctccgcgcctcctctatttcctctcccagtcccaggagcaccgcgcatttggcagccatgctggcctcctgttccacggatttgaaggccgtcatttcctgggttccctccacgatgcgctggcaggctgccaagtcgccgtcctggccggtcacgtacacctttccggccagcctttcctcggacaaggcccggaatgcctggctggccagatcatcatttccgcagatgattcccttaacatagcggtcctgttttaatccttccttggtgtaggtataggcgttctctgcaatccagcccgcacagttggactcgtagaccacgctgaggttgctgcctgccagcgtctcgtcaatgccttcgcggacaagcgttacattgtgatctgttaacggaccctgaattaagaagatatctcccccatccggtatgttttctaacaggcttctggccatcagcctgcccacctcggtgttgtcaaaggatatgtaaaggtcacatccggcattctgtatgagacggtcataggaaactgtcttgattcccgcttccctggctttaatcatcacatctgtcagcgcctcgcagtcccctgccaccaccacgatgacatccacctgttttctgatgaaatactcaatctgggaaatctgatcccgcacgtccccgttggcattctggacattgacctctgcccccagctcctttgcagcggatacgaacacatcccgttcccgcatccaccgctctataacaaaagaatcaaagctaagaccaatctgtaccttggtctcctcctgctccacgctgcctgccgccgcatcctccgtcctgacacagcccgaagccgccaggaccgtgaacaggaccgcagacagcgtgcagacaatgcggcctgcggttccttttttacgtatactcatgtctattccctatcctctccctgtcccattctccagccgttccctgtactcgctgggattgacgccctcgtatttcttaaaaatacggctgaaataattgggatcgctgtatcctaccatggcacatatctgcttgatactgtaatccgggttctgaagacagacgcaggcctgtctcatcctggttctggtcaggtattctatgaaattttcccctgtaccctgtttgaacagcttgctgaaataatagggacttatgtttaccatcctggatatctcatccagggaaatatccttctggtaattttcgtcaatgtatttcctcaccgtatccaccaggtattccatctccttctttttctcagttcccgcgcatttgcatatttcccgcgtcttttccaggaaccagtggcacaatttgtcgctgtcagatgcatcccttatctcgcgtatatagctgcccctgggcttcatgccgaattcagttccgtcctttgcacaaatccggtactccaactgcatgataagctccaatatcttggcctccatgtcctcccggcacccatacattccctcaatgcaggaaaaaagctccgccccgcaggcagccgctccctcgctgtccgccttcagcccccgctcgtaataactgttttccagctcctttggatattccccggtcacatccccctgcctgctgggaatatccgtgatgtggaccacatggctgacgctctcccgcagggccctcagcgcctccccgtatgactccttcgcgtttcccagggtttttgtactcccgatgccgctgcggaaatcgcttccgatgtgtttctccagcttctggagcatggtcctggtcctggtgatgacctccacccgttcttcatatttaagcgtcggctcagaggaaggcacaaacagcaccacccggttgcccatgacaggcccggtgatacaggaaaaataatccttcacgatttccctcatatcctgataatacttgttggcctttacgctggagccgattgcattggtcagcctgccgctctcatccctgtctccgaattccagcaccaggcagaaaccgtaattgtccctgattcccaacagttcctcgtagccggaactgtccgctgcgccgtcgtcctgaagcatgctgtagataaacccgctctcaatcatgggcaccacaatttccagcctctccctgattttaaggttgtcgctccgcttctgcctggcttcctccacccgctgcatggctttcatgcacacgtccaaaatcacctttttattggaaataggctttgtcagatactccatgacacccaggttcaccgcctcctttgcataggcgaatttatcgtaggccgtaatgataataataatcatctcattattgaccttcctgatctcctggatagcctggattccgctgagccccggcatatggatgtccacaaatgctatatccgggtgaaaactttcagccatctccaccacagccctgcctgttttgacgcatcgtatatcgcattcacttccaaagctggtggtaatgatatgcttaagggactccagcataattccctcatcatctgccagtaatatccgaaacatttccaatctcctccttcaccggaatatggataatgacctcggtccccattccggggccttcgcttacaatctggaccaggcccttttgctgataatacaattccaggcggctgaccacattgtccaggccgattcccgtggaatcgccgtcctccggcgtttcctgcctcctgccttccattacctcaagaatcctctcacggctcatgccctttccgttatcccgcacactgatgcggatggaatccctgcacccgtgaaccgtaagaagaattgtaccgttttcttccatgccgcggatcccatgtctgaccgcattctccacaatgggctgcaatatcatgctgggcatcttcacatccaaaacccgctggtcaatggactctttaaactgtatatcccctgcaaaccgcacattcagtatgtagatataattttcagccgcagccgtctcatcccccaccgtggcgtcctccagccccttcttcacattgtagcggaaaaattccgccatcttgtccagaaaaatacaggttttttccgcgtcctccatcatagccagctgggctccggcattgagggaattaaacagaaaatggggattaatctgggactgcaggtatttaagacgggcttccttcaggtggttttccatcaaaagctcccgctccaaaagttcctgctccttctccgccccttcctttaccttagccacatactcctccaggctgcctaccatctggttgaaggttctggtgacaatgccaatctcgtcgttggaatccgtgtccggcatctttacgttgaagttcccctgccccaccagattcgctgtcctcgccagactggtaaggggcgtcaccatatcctttaccagcatcctgagcaccataatcccagccagcatgacaatcatcagaattaccatattgaacacctccatatagcgaagggcttccctcatggtctggtaactggcagagttatttttaaactgaagctcgttgagctccgatatacgcatgttgatgtactggtacagggtaagggccctctcataagcctccctgtaccgttccacattccgtccccgtttggcctggaccgcatcctgagtcacggccagataggattccgacatcatacggatgtttttttccaggatttttcccggcttgtcaactgttttgtcattcaggcgttctaaaaattcctggtattcctgctggcttttataatagctctcaaggctgtccgagctctttacggacacatagtcccccatgtccttctgcacatgttccaatgcctctgacagctcgctcagattgacattgctggcataaaccgtatccatctttccggctattttatttacctggagatagataaatatattgcttacaaataacgtcagtatcataagggttacggccagcagtatcttcttctccaggctcaggcggccccatatgttctttcccggtctttccatatacattgcccacttttccttactcaacgcccatgtttcattagctggctcacattttcctttgtgacaaactgcaaatccacactgtaataggaatttgcatgtccctcctgcagatactcctccaatgcctgtacacagtaccgccccatctgctccgtatcgatgacaagcgttaccggaatattccccttcctgacagcctccagaatctggtctgacttgtaataccccaaaagctggagctcacccaccttattgtagtcaatcatggcctgataggctgcctctgtatctacggcctcggtacacaccaggacgtccggtattccctccttgcggaagaatatgttccttatggtctcgtccgcatccaccttcccggtggaacgcatggtctcctgtatcagtctgacccttcccgatgtgtccggcgaggtcaccagcaggttgttgatctgttccgctatctgctcctggctgctgttatccctgtcgtggagcagaagcatcacctccacatcgtccttatccggcggcaccagcttaaaaatctgttccccgtactgccgtcccagctggtaatcgttgacccccacaaagcttatgcggctggtatccggagcgtccttgaggaccgtgaccacggggattcccgccttatcggcctcattaatccgctcatctatcttatgaccgcctgtgtattccagaatgattccgtccaccctggaggcaatggccatgtccataaggctctccatctctatggtggaggaaagactcttgcccatcagctccaccagggcattgtgctccctggccgcctctctgatgctctcgtacacatccttccagaaaggcatgtcggaatcctccacaatcatgacgcagtggtagcggtattcatttccatcctccccgccgtcctcccccacctgctttaaaacattctggtaataggagctggtgaccagtgtgaggaacagcactaccagtattccagcaattacaattatccgttccaagcgtacccggtttttcattggttttctgtgcccgccctctctatcagcctctctatcccatcctccggatagagcttcaccccatacttcctgcacagcttttctgcgtccgccaggtaggaatcacgttcctccctggtatcacagggatggctcatggccagggtcttaaggcccgcagacaccatctcgcagaagcagtccatgactcccaggccgtaggaataggcgtcaatcacatgtccggtatcctccccgttcacaaactcgtattcttccttgtccagagacaggggaattcccgacttactggtcacatttaccccgccataccaggtgctgtccaccaaaaacatatcccctatccggtattccatggaacattcatcattctttttaataatccgtattctctgtccgtccattgctatttcccccagccacacattataataaaatataggtatccctctattttatagccacccccggttcctgtcaatccaccttgcaaaccggcctgcatcccgccctgttttcagcctgcatcccaccctgtttttcacactatcaaatctccccccggcgtgatataatctaattatcacgttcagactgcggtcttagccacgaaaggcccggcacacggcaatgtaatgatatacgggggggatggttatggtattaagatgtttttcggctccggatgaaaaggtaaatctctgcttttatccctgcggttccggcactggaccaggagaccgcgatacatactgtcaggaaccactgcgcatttataagacagattatacaatgctcctgctgccctacctggaatcggaattcccggaatttgacgtctgccggggtcgggataaccgcatacctgccgggacctggaatgtcataatacagaaaatagaagccgacatgagccacatccatttcgacgatactgtctttgacttttacagccgcttcaccggctgggtcgcagacgcattggatcaggaggatatgattatagcggagggaaaccagtagccggaccggactgaaatcatcctgcttctgctcacttttctgaagtaccttcacgtcccggataatggccacagccccctttttcctgccggaatctcggtcgccacgccgccgatttccaggacagcgccgtcctttattgcctgtttcacaccttcatgggcgctttggcttccggtaaaaacggcagcagtggaatgtgatgttcagcatcccgcacatggcttttacatcctctgacagatcataggtaattgttaaaagcaaaactccttaaatgtggataacccatccgttatgtaaggataaatgattatgttatttggtattatctcagtcgttgtaacacttattttagttgctactcaaaagtatttatccagaaagagaaagatgagtggcgtagttttgcttttaattggtacaggcggcctggcaagcatcatatacaactctgcaattaaggatttggtagttgcagctgtagaatatctggggctgccaggctttatacttgcaccattgtcaggagttttgctcggagcagcgacagcttcccctatgattatttatgcgaagattcattaagaacggccttagcatacgggaacctacggaaacgcatgttttcgctggtatgggcagtgcgtcctttcctggccgtgctgcatggatttttacagagccaatgccactgacccttgctgtattgcattttagggcatccccatttaatacggtcaaagcggccggcttcctttgtgacacccagatgtttcatgactagtataactcgatttaaataagcttacaatttaagcattggtagtaatctgatttcttggcttacgtgtccgtgctttgggcgcacgtttcccttggttttcaggacttgctgctttcgcatttacaacttcatagacgattgtgcccacatcctcttccgaaagatcaatcgtgtccaagcggtatttccatttgtaggggacgggaacctcattgatttcttcaaagtatttcaaaatccgttcctttagttcctctttcgagcctacacgaatcccggacaacatctggcgggtcattttgctgaaaaagccttccaccatattcagccaggagccatgtgtgggtgtgaacacaaattcaaaccttccaggaactgtattcagatattcctgtgtctccctggatgtatgggcggagtggttatccagtataagccgtattttgtccccttttgggtatttctcatccaatattttaaggaatgttacaaaatcgctgcttttatgagtattgcttaccagtgggatagcttccccggtcaacaggtcaatcgctgccaatagggagagcgtccccagacgtttatactcataatcacgctgtacggtggacattttttccgtactggcagccgggggcctgtccccggttgtggtggcaatcgcttggatcccgggcttttcatcataggataatgtatgtaccggctcttcatcaccggcaaacggaatcaaacttccattttcatcaaagcggagttcaacctgtttgtaaatgaccagcacatcatgcatcttcttttcaaagtcaggatcccgtttttcacaataataggtgaccttatggggattaagcattgctttcctaagtatcttccggatagaaaactcagatgctgtcgccatacggggatatccttcctgttcagcaacggaattgatgtagcgggtaaggctcaatggataccataactctgccgggaggccgaatgcggaaggcttttggcaggcaatattgattacccatgcctttgcatcatcggtaatttcaatcctgcggccacggcctttactgtcttccatggcagcttttacgcctgattccatatattttttcaggcagagctttaccgtcggtctcgaaatatcgagtttgtcagcaatggcttcatctgccatgccatctgattttaataagaggattttggctctcctgtggactctggcttcaacagtccccttctgtagaatggactttaaatatgacttatcatcattggaaagaaaaataggcgtagcactctttggcatcattttacctcctgaaatggtctataagtattataccatttcaggataataatgtaaacttattaaaatagagtcatactagggagttgtcatttgggcatgtgggatatccgtattcgttatacccgacttccttaagggcgctttcatttcttgtattgtaaggaatcagagcttttgaaaaatgaaattcatcttttaagaatccatagatgtcataactgtcaaaagcggagtctcccaggaaggtaagtggatgaaagtcgggatggcggacaaaaaaatcaaagaggatcggcttaagcgatgaggaatcactaatcgatttatcctcatctggagagtccgacttcttttctacaataagttcagggtgctgctgcttaaaatcatcatctaatgctcatgtgcggtaaagtaacacacaagaatttgatagacagcaactcactattctgtacaaaattttcaaaactaataactaagatatttaatttttccaaaatcgtctgccaaatatagtaaaaaatatttatttttaaaattgaagaaaaatttatgattttataataataatatttgcggagaaatattattttttcgtcaaaagtgccgataataatgataaaggttatgaaaatattataatgaaaaagaggaggtgaaaccttattgctgtgtttattctagttcttgattaaaaaatggactagaatatatttataattaacaagttgacgttttttagaaaggagaagtattatgaaaccaagaagaaagttaagtgtattattcagttttatcttgatggtggttttggtatttgcaactacaacgacagcattcgcagctactggcaataaaaaagtaacctcgtctggtaaaatgagtattgtactcaatactggtcaaacaggaaattccagtgcagtatcatttaaggtttcaggtttacccacaaacgctgttattactaaattagaagtaaatactggttctctcagcagttattctggtgcgatgttaaccaattatttaacattgacgagtagcaataaaaccacagcagaaaaaatcacttggggtgggcaggcaaatacaacgttgaaatcaaatggatttcttgccacgaaagcaaatggaacatataccattacttttaactgtacttgtttaggtggagctattgtaggtggcatacctactgatgttggaagtaagacgtattctagcccatacattacagtatattgggacgattcattttgattttgggaataggtaaagaacatcatcaaatctagtaggaaggagaatgtgaaaaatgcgaatagaaaattataacacattcgcacaaagtcgtctgttttcgggcactggaaaaattgggaatgtacaacttcccgattataatgattttcatttcaacacgaaacagtctcctgctatgagcgaggataaatatgaagaggctattattgaacaagcaaaaaaagaccaatcagaagggaaattccaatcggattcagcaggatttagaaatttagtgaaaagttatgtttctgttgcctcaccaaacagaaaaggaattattacagatggtttaacagccatattcaaaaataatattcctcgtcccaaaacgctcgacatcatatcacttatgtttggtgaagtgaaatatcaaaaagaaactaagaatttatcttatgctgagttttacgatggcaatggtgaaatggtagcttcgtattcaaacggtggttggactttttatggaacaaaagaagaaaatgcacgtgaatctaagcttttgggaatatataatgcagcatggagaagtgctgcaaaagcgagtcagggaaacagtaatgatgtcactataacagattccataaatataaccgtataaatacaaaaaactaaacacctcaatcaagtgaaattttagtaatcaataaaaaggcacctattgactaattgataggtgtcttttttcgattcagaaaagaagcttagtcaccattaacctgaccttaaagcccaacccgcatctataactgtcttaccgtaatatgtcagctggtacgttttacagaggaaagcttacggacggaagcgacctaccgagcagtaaagtctgaaaaagatttgctgcttttttttgcgcccatttttggaaaattgggagagtgtcggtattggtaagtgagcaggggaaatttccagttttctatcaaacagcgggcagaacgcagcttctaagagcaagattctaccgcagtaccaaatttcgcttatcgctcattttgtccttgcggaaatcttgttggggagtgccttcctcaagccctgctttatatatcccaagatgctgacggccgacatcatcctgcagtatgtgagggccatgcagaactccatgggcagcaacatagagacactgtataaaatcgtggccgacaaggccgaggcgctggaattcagagtgaggggggattcgcgaaaacgacacccgcagacaggacatagagatttattacagctttgtcggcaagattgacttgcccgaagcctgaaagcccgccctatccggcgtaatcgcgaaacgccggataggaacggcaaaattttttacacttctattacttctttatcacacattagcaaagaaagcgggtgtatcatccaaagtttgtccggacagtctgaaaagagttcatgtaaagaaatctgatggtatttagcagacataaattgagtgacaacactcagtaaaatcaatgggtttcggcgtttatccaacgcctgctgacagatcatcataggagaaaaacgcaataaggcacgatatctgccgtgcctttttcattgcatccatataatctgacagcatgccgggaattcccaccgccgctgcgttaagcttttcttctatgagaattttcgtacccttgcggccaagcgcatctgacggggcgatcaggcatatttccgaacaaggcatctgtatttctttttccggcaatggccgcacctcccggctcatgatcttacagcttgattcgcatacttacccttcagtacggcttcgtccaggatatgcccttccatcccatgatacatctgattcagatggaatccatcctttaaatccagcatggtatccagggcacacacctttatctcataaacatgcgtgccgtgcccctccggcggcgccatcccgccgtaccggccgcacatttccccggaatggcctcctccctgaatgcaaatccagctgttgactccctgtacaaaatcagggccattcctgccggcgtcctctaaaagctcattggacgtgatattggccgccatccagtgaatcaaggcaaaacctccgccaggtttctttttatgagattagtatagaaagattttgacaatatggcaattacccgcttttcccacagtatatacttactttttgatgtgtattggcaagacagttcagataatattcctgtcccgcagcaattgttcctatccggcctcaatcatgtaatcaatgcctattttctggtagatttccaatgcctttaataccgctttccccttctccgtcagaaaatactctgttttcaggggaaatgtatcatacaccgtcttatccacattctaaacactatcagttccttcaaatgctgccgcattttttctgttatccccttgatatcccgccttaaaccggacggcagggcaggccccagccggagacgccagataatgctgcacttcctcttacccttcatcatatcctagaccagctccagggagcaggtatattcttccctgattatcatatggcccatctcccactctgatttcctcaacagccggcagtatataatccctgaccagcagccacctgttctttgcgtccggcgcaaaaccggacgtcatggctaccaccagattcctgtcgggaacccagcaaatcatgtttcctccatctcccatggcagcgtggacagccacaccctttttctcaaactgccaccacatatagccataatggctgggggttctcttcacagactggcggacccatgattccggaatgatacgcaccccattccacatacccatgttcagatacagcagtccaaaacgcgccatatccctgggcgtcatggtcagaccccatccgcctgcggtgacgccctcaggatcgtgcacccatcccctgaccccttccccgaacaggctgtcatatgtataggtttccatgggataatccggaatcaccgtcataccaacaggcgcaaacagatagcggtttgcaaattcccgggtgctcatcccaaccgcccgctgtaaaaccgcggacaaaagatgggctcccgccgtacaatattggaaatgcctgccgggcttatccgtttccccggcatccctcatcatatccagggtgaatcccacccagtcaagagatgtacacagctgttccaaaggttccttccattcctcaaatgcatagggcaccgtcatggtcagcagattttcaatggtcacattcccgcagttcctgtcatgtgtttccgaagtatagtccgggaaatactccattatcttccgcctgacagacggtatataccccttgtccgccgcaatgcccgtcaatgcggacagcacgctctttgttaccgatgccacatggaccggaacatctggtccgaagccatgaaagtactcctcacagacaatacagccatttctgaccaccacgatgccattggtatttgcgtagtccgatgtgatgacagaatgcagtctttgaggtaattcccggttcattccctgctctccgggctctgccgtccgccacccggagacaggccaattttcattttgcatcatataagctccttcacgtttataggtacaccggtgtatgtaaaaagcatataatgattaaaaatgaaaagcaagaacatttttaaaaatcatgataaggtacattcactgtaaggcataacctgtcacaggacatgataatggggaatgatgtcctcatagctcccgtccttcatgaggaagcctcccggtatcacgcccagctgtgtaaatccaagcttctcatacaggcggagcgctgagacattactccttaccacggcgttgaactgaagtatcctgaatcccagcttttttccctgctccatacaatgcttcaccaacgcctcaccgatatggcgtccccgcagctcggatttaaccgcgtagctggcattgcagatatggccgcagcgccccacattattgggatggagaatatacagtcccacgatgtctccaccggcgccgtcatacgcaatccctgtaaaagactgctctgaaaaaaactgtttcccagtctctgccgtgagaagctctatctgcggaaatgccactccctcctccacaatatggttccatatcctgactgccgcctctgtgtccgcctctgaatactgccgtattttgatatccatatctgcaaaatccccttccctttatgtgaaatcattttatattcctaaatattctctaccacgttactataatcaattacaggtggaaaatcaagcgtgctccgccctattttgcggcatcttttttgcggcattgacgatattccggcagaaatggtgttttctaaatgacgctgtatcaatccgcactgggcaaattaacaaagtacggccacatcttatacagacccgcggttttacctcatgtcagcggggatattcatttatctccccccgccgctgccgttaagtttgttaaatgcctccattccgggataaaccgcgctgtctcccagttcttcctcaatcctcagcagttggttgtatttggccacacgctcgctcctgcttggagcgcctgtcttaatctggcatgtattaagcgccactgccaaatccgcaatggtagtgtcctccgtctccccggaccggtgcgacgcaatagccgtataccctgccctgtgggccatcttgatggcctccagcgtctctgatacagatccaatctggttcagcttaatcaaaacggagtttgcgcaacccatggaaattcccttctttagccttgcggtgttggtaacgaacaaatcgtcccccaccagctgaaccttgccgcccagttcccttgtcatgagctgccagccttcccagtcttcctcgtccaatccgtcctctatggaacaaataggatatttttcgcacaattccttccagtgtgcaaccagttccccggaggaaaaatgcttcttgcttttaggaagtatgtattggccctttgtaccgctcttccattcactggaagccgcgtccatggccagcacaaaatcctttcccggttcatagccagcccttctgactgcctccaaaatgaactggatggcctcctcgtcgcttgccaaatcaggggcaaatccgccctcgtcacctacagaggaaaaaattaccctgccgcctatctgaaaatagacagtcggcagggttcgccggagttcgataatatgtctcaaattgagacgcatttcgacaatgcttaatcattacaatcgcgctgcggtgcgccgtaaaacggcagccaacacgatgcactgttttgactagtacagcattgccaaaataataatgaatagacgttgcttttttattgtagtcggtgcataataattctatcactaaagaatggatgggttattatgcgaaggaaaacaattgatactatcccggttttatctgatgccatgaaaaacatattatctgctttttcaaaaagccgctcccttccgtcaggactggtcaaaagagccagcattgtcctgcttgcgtcacagggggaactcaaccagaatattgcaccacaggccgggcttcattataataatgctgccacctggcgcagtcggttcctcgcggcgctcccagccttgcggaggattgaaatggacgacccggaaaggcttgaagatgagatacgggcagtcctgtccgataaaaaacgccccggtgccccgtctgtttttacgccggaccagatcatgcggatcatcgaccttgcctgcagcagcccaaatgattttgggtacgaagtaagccagtggagcctcccgctgttagtggcagaaattaaaaagcaggggatcgctgaacagatttctgagaaatctgtcagccgttttttaaaaatgaggtagatttacatccccacagaatccgttactggcttcattcttcggaaaagacggaagccccggaatcttttgcgcggaaagtaaacgaaatctgcggcctgtaccagagtgcccaggaacaaagccgggaaggtgcacacattgtttccacggatgaaatgaccggggtacaggcgctggaacataaatatcctgacaagctcccattacccggccagtgcgccaaaatggagtttgagtatatccgccatggcacggccagtctcatcgggttctttgatgttgcaacgggccgtatggaaatgccgtatttaaactccacacacacagaagatgattttgtggaagccgtgaaagcattggcagggacagacccgcaaaccccatggacatttatatgcgatggcctaaacacccataagtcggaagcccttgtccgctttgtggcagaagcctgtgcccttggcgtggaactgggcaaaaaagggaaaacagggatccttaaaagtatggaaagccgggcggatttcctgcatgacccttcccaccggatccgctttgtctatactccgaaacacagttcctggatgaaccagattgagatatggtttggcatcattaaccggaagctgctgaagcggaaaagctgcctatcaatagaagaactggaagcaagcatcctgcgctttattgaacaatacaatcttacagcacacccatttaagtggacatatgccgggataccattagtaatttaatcactgatatttaagcaatgctgtactagattggtttctttggttccggcccaatgtactgtttcatacagtttcctccttaattgaaaagctcgctactgacgcaatcaggcaaaggacggtattcacgacccaagggagcgtatagttcccataggttgtgaagcagcacccgcccagccacgaactgaaaaaggctccaaactgctttgtaatcagccccgctgtgggcggaaccgttgagtcacctgtaatgcctaaaaatcccgttatgatgatggcaaaggcaaaccccttggggaaaaggagcataaacagcgaaatcaaaacgcggatgccgtaaacactccccaggacatttttcatcttgaactttacgatcaaaaatcctgttgccatcgcgccaatcatggtgagtatcccgtagacggtcacgtcctcacggattgcgaaggggcaaactgcccccggctggtgtccgatcaactcccctacctgttcataaggaaccatgctgggtttttggtgaaagtaggctttgaattttgagctgtttacccttgtgtcccccgccatgacaagcataacaggcttgccgtccacaagaaaggtcagcgacttggcgatttcggcagggctgcatccgacggcttccgctgcgtgttccaccgtgtcgcctgtctggctgtggacggtaatatggtcggcaaggcccacgccctcaaagtaagttttgacttactgaaatgacattgaagtgaaaggtacctgagccgccatgggatactccattcattcagccgtaaagggaatccctatgataatgcctgcatagaatccttccattccgtaatgaaaaaggaagatatctatctccacacatatcaggatttcagagaagcccggagggcaatccttgagtacatagagggctggtataaccgtaagagaatccatagtgccatcggctatatgataccacagcagaaggaggaggaagaattaaaaaggcagaataaactttcaactttttgtgtccaaagtattgacataagtccatccttcagattccacctcacgatggacacccttgttgttcagctatacacttccccgatacctgggtacgtttgggactttcacccgttagagcgcgtccatggtgcgcaaaccaaaacaagtgccgggtacaatgcccggcaccgcctcactcttatcagccgcctgataaccgcgtctcttatcttttgactcttatcttttggttcttatcctctatctcttatccctcagcataacatcatgcgccccgccttccactatactggtggatgataccagggtgatttttgccttctcctggagctccggaatggtaagggctccgcagttgcacatggtggagcgcaccttgctcagagtgagatttacattgtctttaaggcttccggcgtatggaacaaaggagtccacgccctcctcgaaggacagcttcttatccccgcccatatcataccgctgccagttcctggctctggcgctgccttcgccccagtattccttcatgtagcttccattgacattcactctcttggtagggctttcgtcaaacctggcaaagtaccgtcccagcatgatgaaatcagcgcccatggccagtgccagcgtgatatgataatcgtgtacaatgccgccgtctgaacagatgggcacgtatacgcctgtctccttataatactcgtccctggcctttgccacctcaatcagggctgtggcctgtcctcttccgattcccttctgttcgcgggtaatacagatggcgccgccgccaattcccaccttgacaaaatcagctcccgcctctgccaggaaccggaatccgtctccgtccaccacgttgccggctcctaccttcaccgaatccccgtaattcttcctgatatagtcaatggtaatcttctgccactcggaaaagccttcagagctgtcaatgcacagcacgtccgctcccgcctccagcagggcaggcacacgctccgcataatcccttgtattaataccggctcccaccatataccgcttggagctgtcaatgagttcgttttcattcttcttatgggtgtcatagtccttgcggaaaaccaggtacaccagctcctggttcctgttcaccagtggaagacagttaatcttgtgctcccagatgatgtcattggcttccttcagggtggtagactcgtcggcataaactaaattctccagcgttgtcataaagtcctttaccttggtatcgggtcccatcctgctgacacggtaatccttattggtgacaatgcctaacagctttccgttgggctttccgtccgcagtcaccgcaatggtggaatggcccgtctcctccgtgatggccagcacatccgccagcgtcatatccggcgatacattggaatcgcttaccacaaaaccggcccgataccgcttcaccttgtgaatcatctcagcctgcttctcaatggcctgggacccgtatataaaggaaattccgccttcctgtgcaagggcaatggccatcctgtcatccgatacagactgcatgatggcagaaaccatagggatattaatggttatgtccggttccgttcctttcttatattttaccagaggcgtcttcaggctcacctgggaagggatgcactgggtggatgaatagcctggaatcagaagatactcgctgaacgtgcgggaaggttcctcaaaatagaatgccatgtcatttctccttttcaacttgttttttattttattctccgccgaaccttataactggtactatcatatcatgcccccatatcttccgtcaatcaatgaccggaccttcgctgccatgtattgtcctgtccgcaaccgttgggcaaaaccatcagtccatatatacccgcgacccggtggctcccctctgcccctgatattttccattgtatggtttcatggctatatcatccatttccgcaaacaccagctggccaaccctgcgtcctgccttcagctcaatggcacagcggttagcattgaatagttcaagagtaatctccccctgaaagcccggatccacccagcccgcattctgtataaacaggcccagacgtcccagggaacttctcccctccacaaaggcggtcaggttgtccggcagggaaacatactccatggttgtggcgagcacaaactggcccggaagaaggatgtaggtgtctgtgtttatggtcttatacctgacctcatcctttaaggtaatgattcctgtggataaatcctccacaatgctgaaagtatcccccaggcgtatatccacgctggccggctgtacctgctctttgtctaacggtgtgattgataaagtaccttcctccagcattttaaatagtgtcctgtccgataaaatcatagtgtcaccctccaatattcagcgttactatattttatcccataaatacggcggaggcaatatgaatttatcacgctggatgccctgattgcacttcggattacgatgtgatttttagttgcatgctatcctctattggccgtagaggatagctattttttgtacggactacactatcctttaaggctaatttatcaatacgaaaatatagtttaccccacaagttaagtcagttgacaaggaactacacgcagatcgtgaagctggctgctgacaaagaatctggcgcaactgtttcttgtagctttccggctcacatgatatactttctttagggagcaatcgtgctgcagggtggcattggcctttattctacataggattgaggtgatgtctataaaacatttcgattttaatgacctaatggcatttggaatgtttatattggcggcattgctgacattcatctatttgatatgccgctggcttaacatagaaaaaccaccccaaaacttaaccggtttgagggtggattttctaaacttataatcaggtcaacccaccttgtgggcggctgttcctctttctatctatactatagcttttctcctctttacgtgcaagaattatttttcatcagtttgtttttactgtgacacaataaacagggccgtttttcctcaacaggaaaaccggtccaattagagctgaataagtttcctgagtccttttcctttttattcagcgaaaatttaaacgacacttccctgtacgagatactgaaaaagcataatatcattttagaccattcccaaaaaactctggacatggtgttcgccacctcaaaagaggccaaagccctgggaatttcaagcgggtacccccttttgaggattgaaagtgtcatccacgatgtgaagaacacgattacgaacccctgccgccggctctgcatcggtgacaagttcaaattcattatttaaaacgcataacgttcaaaaaaagctcccttagctgctgactgtcggctgttgtgggagcttttttatagggttttctgtttttataaggttttctgtttacgtaaaattttctgtcagcatctgtggctgttagtattggtacttgttggtgttggcgcttgttaataccatacggatattagctcttgttaatgcggccacatatcagttcttcctgatgttcttattcacaaaatcatttgcaaaccggtaataaatctttttaggcatatactccgccatggccttcacaagtttcccggccttatcaggtatgcatataacctttcctttttcaaactccttcatagcctcatccaccacatcttcaggctgccggaatccaaacatgccctttctcgtcttatccacatgcatcccgttattttcatggaaatccgtatccacaaatcccggacacacggcctgaaccctgatttccgtgcccataagctccatgtggagcccttcggtcaatgtgacgatgaaacgttttgaggcggcataggtaacattgcctggcaccaccgcaaatgccccgtcggatgaaatattgatgataatgcctttattccgttctttcattcccttcaagacatgatgggttatctctgccacagccgttgtctgaagatagattaggcgcttcagtccatctatatccgtatcactaaatgaggttctgaagccaaagcctgcattgttcaccagcacatgaacctcccggccctccagcgatgcaagcagctttcttatcccgccttcactagcaagatccaccagaatcacaataaccttacacgcatatttatccctgatttcctgagctctcctttcaatcacttcttttctcctgccggtcatgattaaattttccccttttcctgcaaaccactttgcataggccagtcccagaccgctggttgcccctgtaatcagtgcataatgctccatattcctacctccttgattgtttgctgcctggcttatgttctattagccatctctatctgttaactgtatcgtgctgcggtctcgatgacaccgctctcagtggcgctgctcttcatgacaccgctctcagtggcactgctctccatgatgccgtccaaatgaacgctgttcactcattcttttaaaaaagaagttcccgaaacagcggcaacgggaattcttctcttatctgccggccaatttgtcatttttagctcagttacagacctaaaatacatttcattatcatgcggatacccgatgccttctcagctgttgacaattcatcgttctccaggacaggaaccgcgccaaagagcatgtaggatgctgtaatcggtatattcttaacccttgtgattcccttttcattcattatccgcagcttctcctccatataaggttcaatggtctcacacagcttaaccgacataagcatctgaagatcatgattttcctttttatgaaagaaatgatgatacttttcttttccgtctgtctgcataaacagctgttccattttgtccagaaaaccatccagcgaacgctccgtttctttcagaagttcaatcatagggtacgtaatatcctttacgtactgctcgattacagtatcatacagtacctgcttggactcaaaataccgataacacaatcccggcaccacatgcatggctgccgcaatatctctcatggtagctgcctcatatcccttttccataaaaacccacatggccgtgtccaatatctcctgccggcggacctccggctccttggatattctggccgtcttgcgttccatctgtcaatccacctctttttctgaatataattcttttctcttatactctgttttcatttatcaacaggtttccattgtcagcagatatccatattcattttcccagcaagtctgatttctgttataaacctagaatagcacttcattgaacataagtcaataaactatgttcattcaataaataaaatgacataattttattactttttttgttctatttttattccatctttaagattctatttccatttcatgaatatggccatttgggtctgatttctctatttgctttaggtctggccatgattatgaagccggaatatctctgggaagttgaacatattttcacagtggacggcgcggggccaaccggtctttatttaacatttttgcaggccagcgggacattttttatgatatgttccgttgctgcggcactctatattttgcttccatagagtgggttgatatatggtttgtgtaattaattcttcttattatcttctctttgccccattaactaacaggatgataatgcccccagaagcagcggcagtatttcatccccatttttctatgcatagtacaaacgaacttggaaaggctccgaagccttttttcggacctgtacccttccaacttttattctctaacctttcaccataccacgacaaaaagcccaatccccataagacccaatcgctgccggacgggacacaatcctgttcgcccatccctcgtacactaatgcaaaaaactatatccttgcccaacataaatttttcacacaaagttcaaaattcctcccccaggctccatgctataataggcttattccaattaaccacaggaggttttccatgcgcatattagtgattgaagacgagaaacggcttgcatttactctggctgacatgataggcggggccggatattatacagatatttcccatgacggggcagagggactggatctggcaaaaaccggtatttatgacgccactgtcctggatgtgatgcttcccggaatggatggatacaaagtcctggaaaaattgagaagcgcccgcaacatggcgccggtgctcatgctgactgccaggtcggaacttgctgaccgggtcaggggattagacgccggagcagactactatctgacaaagccgtttgccacagaagaattcctggcctgtctgcgcactgtgctgaggcggcacggagatattgcgcccgacaccctgtcctttggggatcttatcctcacgccttccacgccagtatttatctgcggcgaaaacagcgtgtccttaagcgccagggaactggaactcatgagtctcctgatacaaaacagcagccagtatctcccaaaggaaaccatacttcttaaggtctggggatatgacgccaatgtaaattccaacagtgtagaggcttacatatcatttctgcgcaagaagctctctctgctggggtcctgtgtttccatatgcgtcatgagaaacattggatataagctggaggtgtcactatgatacgtaaactcagatggaaattttcagccatcatgatgatcattgtcggtcttctcctggccgtcatcttcataacgctgtactgcacaacaaaagcaaattacgttcggcggagcatggacaccctgcattccgccatgatggaagactacccggccagtatgcgggaacagacaggttatgccgaaggacaatcagcttcattcaatgaacagtcagaatcaaacaggcaggacactccaaacgggcaggccgcactaaatagacaggaccctccagccaggcagcagccctctgccggacagcgttctccagcccgtccccgcagacaggagctccctctaatggtggtagatataaggcaaggcaattattccgtagtaaagaaccagcttctgaatacagaaagccgggaggccgaaacactggtatccctggcagaaagcatgggcggtgaatccggcaccttaaaggaccggcacctgcgttatctccgcggaaaaaccatgccagaccaaacagtgcggtacgtattcgccgatatatacgaggaacagaattcgctttactggcagttgatacactcttccattatcggcgcatgttcttttgctgtccttttcctgttctccatccttctctccagatgggctgtaaaacccgtggaagatgcctggcagcagcagcgccagttcgtcgcggacgcttcccacgaattaaaaactcctctcaccgtcatcctctctaatgccgatatgcttgaaaaagaccgtgatataccggaggggaaaaaccggcagcggataagccatataaaggctgagtccctgcggatgaaacagcttatggctaattagatgtaatcaagatgaagaaaggaaaagcacaatccagacggaaccggcgaagcagtcaagaaatatttgtggaattacaagataggtgctataatggaggaagcaagccccggcatggggagaaaggcaggacgatatatgcacataagctacaaaccgctatggcatacgctgatagagcgcaatatgcggaaagaggacttgcggcttgccgccggtcttaccacaaatatgattgccaatatggggaagggaaagcatatcagcatggaaacgctgacgaagatttgtgaaaccctgaattgtggcattttagatgtgatagaattggaacaggatgaagccgattcgtaaatgaggtgttaatcaatgaatgaacgagaaaaaataattcgattatggttcgatatgtggctaaaacaagaggatttaggaatagatgatatttttacagaagatgtaatttacattgatagttggagtcctaaatacgataaccgggctactgtaaagcattggttcaatgaatggaatacccgtggaaaagttcttgtatgggacataaagcagtatttccacaaagaaaattcaacgattgtcgagtggtatttcaaaaatcagatggataatggaaatgttgaagattttgacggaatatcgctgattgaatggacagaagataatagaatcaagttcttaaaagagtttggttgcaaccgatacaattataatccgtaccagaacagtgatttaccgcaattcagaaacgaaacagcaaaatggttttaatagcaaaattttatatatgatttaagccagccgttgcaggaaccgcaattcccacaacggctgcttttattttctcctgcgccggaaattcagcggattgttcttgataacgggcgattttgcaagaacctttttcaacactttctgttcatcagcggtcagcttgtcaaagtcaatatcaagcaggttgaagatgattttccagatttttgtaaggtggtccccgggagctgcgagggcttttttgatttccagggccatcttctttgcaagagagaaatccggcgtactgtcaatgtcatgttcatgggctttccgtatgtcgtggagaatggcgtcccatgttttatgcgtaacatggcagaaaaaatcttcttcctctaattgggcggcaagaagcgtttccgagtataaatcgccgtcagcgtgggtgtggtttttgataagggcaagccgctgttcttccagcgattcgtttatatcccggaaacgtgcggtggcgtgaccgtctatgtaaatttccgtgtccgtcattagccgcttgaatttttcatgggtggcaatctcacagagaagccggttgttgatctgctcacttttcagcagctccaccatttcatcactaatatgcagttctgacaaaggcgtgtttatctgctccctgttttctgtccggcaaagtatgtaatcaacagacacgccataaaaatctgccagtatcacaaggttattgtggttgatttctttgtaatcgtccgtttcatagctgccgagggcagactttgaaatgccggtaagctgcgctagttgttccagatataagtttttctctttgcgtaaatctttcagccgttcctgtatggtaatgcgtgatttcataggcataccgttcctttccagcggctcacatgaccgctggatttattatagcatatccttccgcaaacgtggaatattttgatttctgcccccaattcctacttttcggacatacggcacaaggctcaaaaatgttctatgatgtaggtagttcatcgatggattattccaatcgaatgaccgtcctgtatgggatatgtcccccggcgaagtaccgcagcgacttccggcaaggagatggaggaaccttaaccgcaacgagcgtaccaacggggacgaaacgccgccgaaagaaccgggggcaggaacgacatcagggagaaccggcaaaatggacaccgaaacgataccgaaacacaacaatttatcagggtatagtctgccctgtccgtaatactgcgggggattttcaggcggctctacgaccgcattttccttgaaaatcgccccgaaacgctacacaaaaacctgctattcgtccatcccggttgttacggctgaaatgggcggattttttatgaaggaggcactatgccgagaatgtcaaaaaagttgaagaaagagcttgctttcttcctcaatgaccgggggcgcaggagctacaatgagctttgccggaaatgccagcatgagtgtaagcagagtttccgggctgttgtcattgactgcccccgctatttatccaaacgagcgaaaaggaggacacctaacgaatgaattatgaatttatgatgattgacacacccctgccgccctgtatgcccctgccgagggcaacgctgcggctgccggtcagcaataccgcaaaggtcatgtacgcccgcctgttagatgaaatcctcacggacggcgtggaggacagcaacgggattctgtttatccgcttccccatcgtggagcttgcggcggcactttcccgaagccccatgaccgtgaagcgttccctgaatgaactggaacaggctggaatgattatgcgtgtccggcagggcgttggggaagccaaccacatttatattttacttccgaaggaggacgccgcccatgaacgataagctggaaaaactcaatcaggagattgaaaaaggggaaaagaagctgcgccggttgaagcatgaggaaaaaatcttgcagaaccgggcgaagcaattaacccggaatgaacggacgcaccggctctgtaccagaggggcggcactggaaagctatctgccccacccggagcttgtgacggatgaacaggtcagcacgattttgaagctgctgttccatcggagcgaaaaccgaaaaatcatggaacaggtacttgcagagaagccggaaaatgagtaaaggcaggacgccggaaaggttggagattgcttccagagcggcaagccggggctttcccctctgaaagagggcgcattatccgagattttcaattatccgaggaaattcataaaaagtcccattcgtaaaggcttttaagaagatttcctcggataatgttttacccgcatggtacattaaagtcatcaaacaaaaaggaggctttaaccataaccatgaatcaacagacaaatgaaaacacacctacactgtgcaggtatcaggaactgaatccggagatggatgctttcctgagaacgtatcttgaagatgggtggcgcagggggcttcgggaaagctctatccatctgcatgataagattgggcactacttcttatccgccatggctgaaacaggctgtatgaaaccgcaggaaatgaatgcccggaatatagggactgcctgcctgaccatcagtagcaagtggtatctttcacacatccggacattcctccggtatgcttaccagtccggctataccgacagggattacagcggtatcgtccctcggtttaaaaggccgcagccatacccctcggtttacaccacagaggaaatcctgaaaattgagagcagcataaaccaggattctccacatgggaagcgtgattatgcagccctgctccttgcgacacggctggggatccggagcggtgatatttcatccatgacacttgaatgtctgtactttgacaggaacctgattcggattacacagcataaaaccggaatcgccatggaatttcccatggttcccgatgtaaaaaccgcattggagcggtatctgcgggaagaacgtgccggtcatggcagtccatatgtgttcctccgcattgtccctccatacagccatatctccgtgcaggcaatcactaagattgtaaggactgccatagcggcagccgggattgacccggacgggcgcaaacagggagcacatgcttttcgttcatcccttgcaagctccatggtcaatgacaacatcccttatgaagcagtaagaaaaacccttgggcatacagaccagaacgccatccgctcctatgccagacttgatctggaacagctccgtgggtatgcactcccggtcatggaggcgacgggcatctttgccgcattcctggaggggaggtggggcctgtcatgaaagaatttcaatccattttcaaaaatgagcttgcagaatatattgaaatcagccaagggacaatcagcaaggataccttgcggaatacgcacagagtattgctttcattcgattcactgctggcaggagaaaatgccaaagagatatcggaaacgtttatcaaccaatggatcagggcgctccatcaggcaaacgccccaaaaacggtcagcgacaaggtgagttatctccgcaaattcctgcggtatctccggtatgagggatactgtgttttcatgcctgactgccccaaaacatcagacagctatgtcccgtacatcttttcagacgatgagatacagacgcttctggaaggtgctgacaaatgggctgacaggcatccagacccgaaaacccgccagacggacatggagttctgtatgctgctgcggatgctccttgggtgcgggttccggttgggcgagccgcttgccgccaaagtaaaggatgtgaatttccatgccgggaccatcctgatccgccatgcaaaaaatgacaagcagcgtgccgtcccgatggaccagaccctgacgcagattctggaaaggtactgcattgcaatgggcatcaggacagacccggaaagctacctgttcccggcatccagaaacgagggggctgccgtcagcaaagggacttttgatttacggttcaggaaccttttgcgggaaaccggcctgtatgtacctgggaaaccccattccagaggccagtgcctccactgcttccgccattatttcgccattcattcctttgcgcgggctgagaagaatgggcgtccggcagacgattccgtgccatttttatctgtctatcttgggcaccatgacatggacgagacggagaaatacctgaaattcagcggggacatgttccctgaatattcggggctgtttgaggagtatgccgtcggcgtattcacggaggtggcctgtgaggaaaaataaactccctgaattcatgcttctcctggagcagttttttacggaatacatgccgctctcatcagggctttcccagaacaccgtcaggtcatacaaacattctttccggcttctgttccagtatgtttaccagacgaaaaagaaagaggctggtgagatccggttccgggatctggattttgagacagttgatgggttcctgaaatggattgagacagaacggggctgctccgtgtctacaaggaacctccggctgtcggcactttcctcttttgccgcttatgcacagaacagaaattttgaagctgcgacggtgtttgccaacgcagtcaggagaattcctgtaaaaaagcaatccgtacagccaaggattgccttttcccttgatgaggtgtcagccctgctccggctccctgatcccgaaaaacgtctgggactgcgtgaccaggttcttttaaacctgatgtatgccagcggtgcgagggcgcaggaaatctgcgacctgaaagtcagggacttttttgtggagaaaaacctttataagctgacggtcacaggaaaagggaacaaggcacgccggattgtgcttgccaaacccagtggaattctcctgaaacggtatctggaggaaacaggccatgccggacagttggaagcctatatcttttccagccagacacatccacagatgactatttcctgcattgaggagatttacaaaaaatatatcgccatcgcaagggcagagcatccgggaatgtttttggagaaaagctataccccgcataccatgaggcacacaaccgccacacatatgttagaggccggtgttccgattgtggcaatcaaaaatttcctcggacattcctcgatttccacaacggaacggtacgctgaactttcacagggagcagtgaacaggcatatccgggattggaacgagaaatggttttcccatcaaaaggaaactcatgctaatcagaaaaaggagaatccgttgcccgacttcctgaaatagcgcttacattatccgaggaaatcttcttgaaagcctttacgaatgggactttttatgaatttcctcggataattgaaaatctcggataatgcgccctatccgagttctgggatagggcgcaactatacaccacttttgaagtggtgcgttgcgtcctgccggaagccccttgccgggagcagatgatttccacagattttcaatctgttccaatcatcacaggggaagctacacttcccctgcgctggctgccgccagctaccccttagtggacttgccgcccggaaacaccttgcgttgcaagctgttcccagtcagcaagtttttacaaaatcccgctatacttctttgagtgaatgaagtataatgaagccagcgacaaagggaggaggtaggagcgaaaagtaactatggaagtaattattaaaaataaaattgaagaattattgtcaaaggaattttattgtagttcggacgaattaaatggaaaatcaacagtatattctgttaatttcaatgcaaaacaaccatatataaaaatactagcctatagaaattgcgttgtggtctgcacctcagaggatttgcatgataaaatacaggaacttgtacaaagcaagaatagagatgaaatttttgaacttcctttggtttatgggcagacaatacattatgtgcctaatgatagatatacaaaggatgtatcagcatcattgaattttgcgtgtgaatatttttttgacagagatattttatctcttgctggtttgactggttttgaaaattctttagcatttgatgaaaacggttctacatcgacaaaagctgtttatattgcaaaggacaagaatagaattattggagtggcaggtgcggcagaatcacctgtaaatggcatatgggaaataggcgtagatgttgtggaaaaatacagaaatgcccgggtgggaacgtatttggtgagaggtttaactaaggaattgctggcacgaaatattatcccattctattctgcttctataacaaatattggttcgcagatggtagcaagtagatgtgactatataccgttttgggttgatacatttggaacgattcttgatggaagttcggtatataatgatattcttaggggtgtatcatcgaaatttatcaaatgacaaagcggactttgccatcgtgcaggaaaagctgaaatcccgccagcgtcccggacagtcgggggagccgagtatgttcgccggtctgctcaaatgcggcgagtgcgggaagtcgctgaccgtccgctataccaacgccaagcacccgcagcagatttattcctgcaagacctacaacgcctacgggaagcagcattgcagccagcaccgaattgaatttaacacgctttacacccttgtgctgaacaaaatccgggaatgtgccgccgctgccctgatggacggcgaagcggtagccgaccggctgactgacacctgccagaacgagcagaaagaccagcgggaagcactggaacgctccttaacaaaggacgaggaacggattgaagtgctggaaaaaatggtgctgcggctctatgaggatatggttgccgggcgcattacggacgcaaacttcaatctcctgctttccaaaacgcagaaggaacaggcggagctaagggcgaaagtcgaggacggcaggaaacgccttgccgatgaaatccggcttgccgtggacgcccgccagtgggtggaatccattcaggaataccgggacatcacggagctggacgcagccaccttaaaccgcctgattaaagaaatcgttgtccatgaaaccatagacagcgacaaaacaagacacatttctatcgaaattcatttcaatctcaaacccatcccggaggtggagcaggtcacggcatgacctgccgccccgccggggaggttcttaaacaaaaccacatatattttttgactgccgccgcccgccagaacgctgatgttactcctaattggggataaagcagctgacagaaagccttctcaccctggcccggagcgactcaggacaggagacagcggtctgcgcccccgttgacttaagcttcattgtgaacagcagtctcatgacctttgagcctctggttttcgacatggacaagcatatcatctatgacatcgaggcttcgctccacgtcaatggggatgagaaaaaactccggcagttgtcagacattctccttgacaacgcctgcaaatacagtttggataaaagttccatccgtgtaaccctgaaaaagtctggcacaaaagaggcgctcctcactgtctcaaatgaaggaacacctctcaccaaagaagaaatcaggcatctgtttcttcgcttttaccgtgcggacactgcccgcagtaatatccccggctacggcctcggactttccattgcccaaagcattgtatctgagcatggagggagaattgatgtcagcacggatggttccagagtgaactcctttatggttctgctgcccttacaggaataagcagatattcccggccggcctgctccaaggctgcggcttactccatcttactccacgttgccgcggctttccagaatatggataccttccggcagggtctctgccagcagggtctcctgtatttcaacaacagaggctttgccggaaatatttccgactcccggctttttttcaaaatctccggctccgccccctggcattcttccaaaaccgctgcctgaaggcccgccatattggttcaatatgctgttcaccgctacctggatatcctgatctccagcctctatgtaatagatctcccctgtttttaattctggcgaactgaaaagcagggcctcaaaggtcttcgaaacctttgtttccgtcaattgattcccttgaccgtccttcactgatatagttgatccggcagcctggatttcatcaaagtataccaccagcatggattgggatgattcctcggaaaatgtccggaacattcccgcgcttcccacagccaatatggttccccctgatatggatccctctccatcgtaatccaaagcaccatctcctcctcccgccgggccttctacaaggacggttccaccctccagatacaagtccccgttagagtcaatgccatcaccggaagcattgattttcacgtctcctcccgaaatacggatgtaagccccttctgtcacaccgaatgaaccaccgtcctgtccccgcctgttgccaaaggaatttttaaatgcaagagtatccgctgccgggttttcgtcttttttcccggctgcattgataccatcatcctctgagttaatccgaatggttcctccggtaatttccacgcagagtccctccaccccctcgctgctttgttccactgttatggttccgcccgagacctccaccagattgtcaccgtgaactgcatcgtcgcctgtggacagcgtcagctggcctgttgttatccttacatccttgccgctgtgtatactgtcatcctgggcatctatgtcaatgacgccgcctgtaacctcgaccagcgtttcagccagtattcctttctttcctgctgtgatggtcatggttcctccggtgattctcacatatcccttgtcttcttccgtgtcattatttgactgtattccgtcgctgcctgatgtgatggtaatctctcccccgttcacctctacggcgtcctttcctttcataccatcttccgccgcctcaatgacataggttccggaattaatggtaagactgtccttcccacgtataccgttcatataattaccgctgactgtcagcatgccatttccttcaaacaccatattatctttgctgaaaatggctgcatcgggctcgtcctccccggtctgggggtaagtatatgagtttccgtcagataccttgttttctgtcccatcctccaggacaatggtcagaagtccgctttgcccggcacagattgcggaataatccgggctcgtaatggaaacaccgtccagtaccagacgtacctcgtcctcctttcccgcctccaccatcacgcctccccctgtaatatttcctgtcaggcggtatgttccggaagatgaaatgatgacattggacccgtcagccgcggctcccaccccttcaatgaccacggttgtcccataccccgtgattaacgtttcctttccattaccataggaactgcctgcggctgtctttgtacagccggcaagaagcaggacaccggccagtccggccgctattccaaatattctaagcttactgtatctcaccctatctctgcccatataaccatcctcctataattcttccctgccatccgacagccgtccgcagacaatggtaagatttccatttctgcaccgtatatcatccagcatgttcttttcaattgattccgactttaaatccacatggtaacacagctcatagagactgcccatattcacggtcctgacccgcacaagctccggatttttagtgtatttctcaaatatatcgtcaaagattcccgaataatccagattttccggtatcgtaattttcaattcctttctctctgccctgcctgacggaagcgataccagaaggatggtaattccgccagccaccatcattaaaatcagagcggttcccaaataccccattccagcggccagccccagagccatggccaggaatatgcttccaatttcccttgcattgccgggcatggacctgaaccgcaccagactgaacgcccccatgaccgccactcctgttcccaggtttccgtttaccagcatgatcacggtttggaccatgacaggcagcagtaccagggtaagaatgaagcttctggaataccggttcctgtatgtatggaccacagccagcactgcccccagcaggactgatgtaacggtacagagcaaaaattgtcccattgtaataccggcatttacagtttctgtcaatacactatcaagcacagattcttcctccctccacaaacacgccgtgatacaggtactctttataataggctccgtattttgagtaggacacaggaaaaagccccataccggaaaacagcctgctcatccataaaggcatggctccgggaattttaacctccatcagaatctggttcttatccagaagcattgttccatacaccccgttcttcagctccagcccgctgcacctgcagcagatattccggtcaaaggtaatccttaattcctcattgtcctttccgtaatatgccacccgctcgtaggccacataggccgcgggttttaattcataccgattcagcacataatcgatttccttcaatatctggctctcctcagcccaccggattccataatacagatactttcttgcctggcaaagtgtcatgggaatccggcgcttgtataccaccccgtcaaactttttctttaattccgcatataccacgctgttgtccgtcaccttcccatatgccctcaaacgcagcttttccttatattccggcttctcaatggattgcctgaccagctcgtaatcccgtgtgtcaaagtaaatattggataaggtatgttccccgtaatgatctgcattcatctgtcgttccagaacaggtatcagcgcatcgtgctttttttgggtgagcatatattttttctcatagcgtttaaatatttcctgagtcatacgcatagcctccttcatcttttatggcctttatcctatcagcccaagctgaaacagaccttaaaaaagtacggaaaaccatgagctttctgtgaacggtccggggattttttgtgaactgacgggagattttctatgaactgacagggaattttctgcaaactgccaagatatttctataaacatccaggatatttctaaactgccaaaatgtcccaataagccgttcaatgcttttcataaaaccatgcccggttacggaccatacaaatatatgcgaaaaatggggccggcactttctcaccatggtgcctgatgagaatgaccgcctggaacatatgtatgtgcccgaattccacccccgttcaaacgttatcagaaagtcagacactgctggcaaaagcaaaaaacgccgccggtatcatcaccaatcccggcggctttcctctcccctatctttctacagactccagctcagactttttccctgaagctctgccatgtgacggtatattcctttcttctccatcaaatcccccggtgtaccctgctccgccacataaccatcctttaacaccacaatccggtctgctcccgccacagtccgcatccggtgcgcaataatcagcacagtcttatccttaaccagattggatatggcctcctgtaccagagtctcattttccacatccagcgacgccgtggcttcatccatgaggatcacgggggcattctttaaaagggccctggcaatggacagccgctgccgttccccgccggacagggcggaaccattttccccaatccgcgtctcatatccgtttgggagacgatggatgaattcctcacactgggctgccctggccgcttccatcacctcccggtctgatgcgcctttgcgccccaggcggatgttctccatgatggtattgttaaacaggaccacatcctggaacacaatggaaaagcttctcagcagtgtctccggctctatcccgctgatatccgtgcctcccagtgtaatttttcctctgtcaatatcccaaaacctgacggccagctttgcgctggtggattttccgcctcccgacggccctaccagggctgtcacctgtccctgcctcgctgtaaatgacacatcctttaaaacctgttccccgtctttataggaaaatcccacatggtcaaatacaatatcatatccatcgtacacagcttccctgcttccctgcaaaacaggctgctcctcaatcagtttcatccgttccaccaccagtaaggcagagtacacagccgacaggttctgcagacagccggtaagaggtccgtacagcctggtggacgccaccataaacatgaggaacagcataaagccgatggaatgggatgacagaagatcagctcctaccagtactgtggtagccatgccgactttcaggaacatctgggacgctgtgaccatggtgccgttgaacagttccagacgtatggtgatggattccacgttcagaatcttctgatccagccccctcagatactcctcctgcagattgttggccttgatgtcctggatattctcaatgcactcctggattccgtccgaagcagcgattttttttcccttctgcctgcgctctacccggtccaccatgggtcttgtacctgctgccagaagaaaggatacgggaaccacccacagcacagccagccccatccgccagtcagccgccagaagacacactcctatgagcgccgtggatatgaaggcccctatgagttcaggaataaaatgggaaaatgccttttcgataaacgcactgtccgccataatggtggtggtcaaatccgccatatccctttttccaaaaaaagacatgggcagggttctgagcctctccgccagacgaatgcgcatattggcgctttccgtataggatgccacaaaggtggcgtcatactggattctccagaaaatgaatattataaccagcagcacaatgcagactgccacatacccggccattcccagtgaaggagcctgaagccccactaacgggcccagaagccgttccatgaagaggaacaggatgcccatggggaatatcagccccatattggtgatagcacaggaaaatatggcctttgtcagatcccttcctccctgttcgctcaatgcgaattttttctgcagatacttgctcatgcctttccacctaccttccactctactgatgtctggtaatccttccacattcttgcatacagcccccgggccttcagaagttcatcatggcttccctgttcagccacccggccttcctccatcacgaagattcggtgggcccggcacaccgtagacagcctgtgggcaatcattatcacagtcttgccttccaccagcttctcaaatgcctgctgaatcagatattcattgtcagggtccgcaaacgccgtggcctcatccagaagcacaatgggagcgtcctttaagattgccctggccagtgcgattctctgcatttcaccgcctgacaggtacacgcctttggttccaaccaccgtatccagaccctggggcatcttctcaatgatgtcctcacatctggctgccttcaaggccctcatgacttcctccttatctgcctctggttttgccgcccgtatgttgttcaacagactgtccttaaagagatggctgtcctggaatacaaagctgacctgcttcatcagctcctttgtccctatgtccctcacatccaccccgccgatacatatgcttccctggtccacatcaaaaaaccttggaatcaggctgaccagagtggtcttaccgcttccggaggcccctaccatagctgtggcggctccctgcggtacagtaagggacacatgctccagggcatttacaccgtccttgttataggaaaatgagacgtccttaatctcaatcgtgtgattttcaggcttcctgggaacagcgggctcgggaaggggcttctccctgataacattcagtatccgctccatggcgtcattggcagccatggtattttcactggtccacatgattttgtccatcatggtcacgcagacaggggcaaacaggatgtaaaaaaccagatccagggccgtggtcacaaagtcctgaccgcccgccgcatcccctgcaagaagaagccccgcgggtatgagaacggcaaatatgccgttgatgctgaccgaatagcagcacatgggaattctgagggacagagtataattcacagcccagttcttatagcgcatgatggaatcatgaaagctcttaaaggaaaaaatgctctgctggaatgtctttaccacaggtattccacgcacatactccacggcctcgttgttcatgtcctccagggcattctggtactgcctcatgcactctgccattcccgtccccatcatcctgctgaggaaaaatgtacccaccgccatgggaatgaggctgatcagaccaaatctccagtcaaacaccaaaagaagtaccagcactgccgcaggcgtcaccaatgctcctgccaaatccggcagctgatgggccagatatgtttctgtctgtcctgccccgtcgtcaatgatacggcgcagctttccgcttccggtccctttgaaatagccaatgggcagttctgccaggtggtgaagggcagccgtcttcatatttctggctgtccggaaggccgaaagatgggtacacataagggccccaaaataaataagcatactcaggagcgaggaagccaccgccatccacccccagtaaaccagcgttccgccggccagtcctcccggccagttcaggacagccagctttatcaccttccacatgcacagatacggcaccagcgctataaccgcgctgatacccgacagaatgcaccctgtccccgtaaggtatttatacttccccgcaaaggtcatcaaagtcaccttatctgtatcgggaagccgtgtcataatatgtttcctgctgccatccactttttcatcctcctttttttgttagttataactaacttattgttttaaaagtaaggctgtcaggcttctgccttccggctttctgccctcaagccccatcccttactcatccaactccatgatgcgcacccaccccgcatgctgaaaacggcttaatgtgacagcacaggtaaccgcctgttcccttggcaggccgtgagacacaaattcatggagctgctgaaaaaaggacctgcacagaatatgaatcagcgtgccgctcatcccttcagccgaataccccaaagattccatggtctttataaaatcccggcaggactgctcctccactgcggccagcctgtcaaaatagcggtccctggcttccggcgcgccgcagcacagaagcagcttaaaaacctcaaaatggtcatagatataattcaccatccagggtatgtactgctctgtaatctcattcagccgggccggctgctgttcaggaggcagcgcggcaaagtccctgtgcaccttatcgtacagagccagcagttcctccgccgtgtccgaggtcagtgcgtcaaacaatgcttcctttcccggaaaatagccgtatatggctccggttgtcaccgatgcctcctttgcgatcctcctgagcgacgccttctcatatccgtatgtgagaaattctttcctgcctccaatatggcagtaaccgtactgttgtcccggacccccatgccgatcattgcaccccctctatgcatccctataacactgttatataacatcgttattatgttacaaaaaaaggcatccgtcaatacatataacagataccttttatcattaaaccgtattttgagtattttgaaaaaacttctctaataaaccgtcaaaacccctttgggaatcaggttactccagcgccatgtccggagccgtcagcctcttcctccgggcaggccgaggctgtgagatatcctacgccttccccaataactccgtcacttcctccaggctctttcttccaaagtaaacctgggtatcatttatcaccatgcagggaacgctcatgattttatacttccttttcagctccggataatgcatcaaatctacgtcctctctttccagcctgaaggccggcaatagctgtccggcagcctgccttctctccctttcatccgggcccaaatgttcacgaatacaggaaatcctgtctgtcagtccttccaattctcctaaaaatccgctcatctctcctgacagcggactgtcatccagcgccgcccgtatgatgacccttttctcaaatccgggaaacaggccggacagctgccgccgtatttcatccgataaaaacgcattgccttcgctgtcccggaggaggctgtcttttacgcggtcctggcacaggaaaaatcgtcctcccggactatcagtgtcaccttcttcgcatactttgtcaggaaaatgccttcctccaccgcggcaaagcctcctccgatgacgaatacctccagaccggcaaaaaattccccgtcgcaagtggcgcagtatgccacgcccctgccctggaactccttctcacctttaaagcccagcttcctgggattggctcccgtggccagcaccacgcccagcgcccggtacttcccggcagtggtatggagcaccttcacatcctgttccagttccatgtccagcacctctgccatgagaagctcagcgccgaatacctccgcctgctccttcatggaccgggtcagttccctaccgctggtcctttccacgcccggataattgacaatctccgaggtaatggtgatctggccgcaatgagtttatatcagtcccaccaggtccagacttggctttaaggtatctgccccgggctgccattttgccgggcacacctggtcgccgtgttctgccacaaaccgggatgcctgtacacgtctgaacagttcgtccgcattccttcccacatttcccgcgataacctcataagccactatctttccttctggattcacgataaagctccctctttcagccattccgtcagcctctatcatcacatcgaaatccctggccagcccgcctgtgggatccgccagcatgggatacttgattttccggatagtcttggatgcgtcatgccatgccttgtggacaaagtggctgtcgcaggatacgctgtatatctcgcagccggctgacttgaagtcctcatacttgtcagccagatcctccagctccgtggggcacacaaatgtaaaatctgcgggataaaagaaaaataccgcccatttccctaatacatcagatttcttcacttccctgaactctccgcccgcataggcctgtactgtaaaatcgctgatttcttttcctattaatgacatattgtttcctccttgtatttgtgatggttaactgccgccttgtctcctgtcccgcttttccagaagcaggaagcctcttttgttgttagttttgactaactaaatcacattttaccagtcacgaccttatttgtcaagaaatgatattaataataattatcaatatcatttctttttaggaatcgagtaggaggcggtgattaaccgccgtcctctcacagcaccgtacgtacggttctcgtatacggcgctttcaatagttggtgtgcagagactgataggctgcggctaagtcataaaagccccagtttatcagtctttctttacttaatgcccagttgaccgccttgtttccggcattgaaccagtatcccttgcggtcgtaggctattgttgccgcataatggctgtctactcccagtcctatgagtttcctcattctggttttgggcagtttccactgtttccagatacacatccgtatccggcggtacaaccatccattcaggctttcgatgtttttcttcatgtccgctatcccatagtagttcagccatcctctcatgtagacttttatcttttccttggttcggatgatactcccgcacctgctccgggaagtaagcctgcgcagtttctccttggctttcttccatgacgttccatggacacggatataggtccctgttccgttcttcccaaaacaaaaaccaaggaacttaaaattttggattgcgaacacactgaccgttcggctcttttcccgattcactctcagtttcagccttgcctccagatatttcgtgctggattccagcagtcgttctgccgcccgttcgctctttgccagcagtacgatgtcgtctgcatagcggatacacggtacgccccgtctgtggaactcccagtcgaactcattcagatacgcgtttgctaagagtggggatagatttcctccctgcggggagccttccttcgtttctgtcacaacaccgttttccatcactccacttttcaggtaccgcttcaccatctgcaccactctttcgtcttttacttgtttcctcaacaggttcagcagtatcgtatggttcagcgtatcaaagtatttcgataagtcgagaactactgccctcgtgtatccctgttcgatatactcctttatcctgagaatggcgtcttttgctcctcgtcccggacgatagccgaagctgtctttcgagaacaatggttcgtagattggcatgagctgttgaagcattgcctgctggatgatacggtctattacggtggggataccaagctttcgtatccctccctccggcttcggaatctccacacgcctgactggagatggggtatacttccccttcctgattctctctaccagttcatagttattctccctcagccatggtaacgccgcttcaatggtcattccatccactcccggcgctcccttgtttgccttcactcttttgtaagccctgttcagattttccttgttcagtatcttacttaagatgtctggctctgcactgtctctttccttccatatccggttgaatgagcggtgcgctctcacataccctttgcgttccgcgctatctctttgcgagcagctttctctgttttctgtacccatctgcccattcctcctttccctgtcgtactaaagactcctattgattcggtccttcactgaaaacagctactatgacctctgctgacttctgtacgctcagcattacctctcggcaatggttactcctttcagagcattccgtacagacctccctgggtaccacacgtttctttccctccatctatctgccgcatttactgtacacgattccgtgtagctatcgggcttcatcttgtgttgcagacttaccctcatgtacagccttctatacggtttctgtccgtcagaccagaggtttgcccatgggttcgttccccacatccggcttccttcagatttgcagtcacctgcaacacccttgccttcggctatatccttcccgctaccaggtggattcaggactttcacccgttagaaacgtgcgccgccaggcgcacaaccaaacaaaaacagccagacaagctttctcatctggctgttcccacgctatgtttctactcttcaaacgaattaatgactgataattccggcttcatatcatactttttcttaaagacaatggctcccacgattccagccaaggtaccgctgatggcagccagcagcagcgccataagtacctttaatggcggattgaaggcaaagggcgccagcagtccgggtatgggagaagcggttcccggggcgttgttgattatgcccaggaatgcggcggccactcccgaaaagcctcctccgaaaaagttggaacaataaatcggtatggggtgctttgttatgatatgggcctgtgtcagcggctccatcataacagctgccacgttgctgttatccccgaagtggagcattttaaagatggcgccgttggtaaaggagcctccgaagcatgcaatggccgcaatgcccatgggcagtcccgtaagccccagcatggcggtaagggccatggagctgaggggcgacgtacaaatcatcttgatgacccctcccagcagaagtcccataagaataggcgactgctctgtagctgccgtaatcatgccgccgatgtgtgccagagccgcattcacagccggatccaccaggaatgcgatgaatctggcaatcggcgcaatcaggagagcccccagcacggaatccaggcccggcggaagatgcttctcaataaacggtgcgatgaaaccaattgcatatcccgcgataaatcccggaaggatgccgtatcctcccagggcaacgcctgcaactaccgcgaacacaggattcactcccatgcctatcggtaccatgattgccgctgccacgccgcccatgttgcccgatatggtgcctgtttccccaaggaatgccaagtgaagcaaatctccggatatgtacctgtgaacagcctccacaaggaaagttgcaactgccgcattggccattcccgacatggccgctgatcctttgggcgccttcatactgaaaagtgaaaaggctgccagcgtcaataatagtaatcctaaccccgtaataattgtcataaatctacgttcctcctgttttttgctctccgtagttatgccctggccgctttccaccacagaccgccgttaccgccgtgatagctcttaagctaaggtatatccttggtagagttttcgcaatgcaggtaacgaagaagtccccaaaattgcaaaaaacagagacagacataaacgtagcgtagatgtctgcctctgtccttttacctgaaagtttccctgacgcggctgctgctatgccgccggttgcttcatcggtattcacattttagtgaccttctccagagtcccgtccgaattcgattcttttgcctgagagtttgcgcatccccttcggcgttacccaacggtaatctctcccgaattcatcaaccggtctgtcattaactttgtttatattttaacatcaaacatagaaaaaagcaatagaactatgttcagtttatttacttttcacaaaaaatatattcaatttttatgcataaattacaattctcttcataaaaaatgacagaaaataaacatatgtccatctattctctgccattctcatgataattgtaaaatacaggagggggtgtattttaaattttccctttccgcgcctccagaaatcaatccagaagattggtcatactctttaagctgatagccagagtagaggtattgtggagcatagctgatgtggccggggttatgacgcctcccactcccaggagtataagacccaggttgaatccgatgacaaaccggtagttccggtcaatccggtccatgagtccccggctgatggccctcagtgtcaccagctggaacagattgtcctcagagatggtgatatccgctatctccctggcaatctcagccccttcgctgatggcaattcccgcgtcagcggccgacagtgccggcgaatcattgattccgtcgccaatcataatgaccctgcggcccttcttcttttcttcgtccacaaaccgggccttgtcttcgggaaggacctctgaataatactcatccactcccacacgtccggcaatggcggctgccgtgcgctcactgtcccccgtcatcatgacaatcttggtgattccctgtctgtgaagggcggtgacaaccccatccgcctcatccctcaacgggtcctcaatgcagatcacggctgccaggcttccgccgatagccagatagaggtgggaatattccacaggaagcctgtcaaacacctccttcttatcctccggtatcctgcatccctcatcttcaaatacaaagtgatagcttccaatcaccaccctctcatggtctacataggttgctatgccgtgggccacgatgtagtccaccctggaatgcatctccttgtggaccagcccgcgtttcactgcctcgtgtaccaccgcgttggccatggagtgggggaaatgttcctccaggcaggccgcaatccgcagcagctcatcctttttcataccattgaacaccaccacatccgccacctgcggcctggcctttgtcagggttcctgtcttgtcaaagacaatggtgcgggcagcagccactgcctccatgtacttgccgccctttaccgtaatatggtagctgccagcctcccgcatggcagagagcacggacaggggcatggacagcttcaatgcgcaggagaaatccaccatcagaatggacagggcttttgtcacattgcgggtcagcagccacgtgaggacggtgccgcccagactccagggaaccaacgcgtccgccagagtggctgccctgtcttctgccgtggacttaagctgctccgactcctcaatcatggtcacaatccgttcaaaccgggtgtcgcctgccgccttcctgacccgaagggtaatctctccctcttcaacggctgttcccgcgtacacgtaggagccttcccccttcctgaccggcgctgactctcccgtcatggaagcctggttcaccatggcgtccccggaagtgaccacgccgtccagaggaatcacatttcccatatggaccgttaccaggtctccctcccggatctttgaaacagggaccaggacctctgttccgtccaccttctgccataccctggaaatatttaaggacatgcttctggcaaggtcgctcactgactttttgtgggtccattcttccagaagctcccctattcccaggaggaacataacagaaccagccgtgtcaaaatcccttctcagaacagacacggcaatggccgtggcgtccagcgcctccacctccagcttccccctgagcagacagcggattcccttcagcagataccggatggagcggactgccgtatagacggcccggacaggcggcggcaggaaggacttggtaaacgcccgcgccatcaccttctgaaccagcctctccttgtattcacggttcagggctctgccgctgttcttcggcaccagctcccgaatccgctcattatcataagaaaacccctgtattccctccaggatttccccgcggctgccctcatacaccaccgcggcatccgctgtcctctcgtataccctgacatcctttaccccgggaagggtacagagataataatgcagcaaatcagcctgccgtatgctcatttccttctgataaaaatgaaccctgacccttccccttatctcatgtctaattacaaacttcattgtttcaggctccttttcccaactgactcagacacattttaacagtaaatgaaaaaattaccgcccggagatatccttccccaggcggattgtacattacgctgtaaccgtatcagcagaagctgtctcatcttccttcaaatcttccgaggtctgctccggggcttcctccccgctttcatcctcaaatacgtcctcccggcagcgctgcgcgttgatttccctggcctctgccaggatgtcctcagcgttctcctgaatattggtggcggtggtcatcacacagtccttagcccttaatccggctgccagacaattgatataaaacctcttggcatcatcacttcccagaatcttcacgcctgctgttccgaacagaacgccgcctaagaaaagacctattttcttacatttaaaacaatcaatcattctctttatcctcctacttatgcttatagcctgtgtaaaccgtcatcgccagacagaataccatggcccaagcccagaatctgtgatttttcatcttacgttacatcctttacgtaaacatttgcttaattagtctcccgggaccggatatcttcttccttatcagacacaaaagaatattgataagaatgagtcaggacaccgatctcctccagcgtgcttacagtcctgtacacggtggccatccccagcttcgtgtcccgtttccgcgcttcatagaaaatctccttgcagtttgtccagtttccctccagaataatatccaggagcatcctgcgctgctgcgtaatccgcattcccctcttctgaaactcgtctatcacctgttccttctgccacatgtcggttccctcctcacctgcaatcggccaaatcggaatgtgtccggaagatacctgcacaagcatttccggacacatctgtcccccaggcctgccgcagccggactgtccagggaccatttccgcctgcatcagggctgttatgatgctgtctttgtctttacattcacattaagggaattgctctctttgtacggtcttaccagcaaatagatgaatccggccacggctgcaattgccacgacggttccgattccaaaggttcctgttgtaaaccagctgccaaactggtatatgcacagcgccaccacatatgcgagtacagtctgataaccgattgcaaaccaggtccacctcgcattgttcatctcacgcttaatagcgcccatggccgcaaagcagggtgcgcacagcaggttgaacaccaggaaggaatacgcgctgacagctgtaaagctttgggccagtgttccccagatttcagctccgtcctcagccacttccgcaaagccgtagagaataccgaaggtaccgactacattttcctttgcaaccagacctgtgatggccgccacagcagcctgccagttcccccatccaagaggagcgaatatccaggcaatggcctggccgattaacgccagaattccatccgacaaatcctccaccattccaaagtgtccgtccacaaagccaaagccggatgtaaaccaaacaaaaatggtggacagcagaattacggttcccgcctttttaataaaggaccagcctctctcccacatgctgcgcagaacattcgacacggttggaaggtggtaagcaggaagctccattacgaacggcgccgggtcacctgcaaacatttttgtcttctttaagatgatgccggagcagatgatggccgcgattcctacgaaataggcactgggcgctacccaggaagcgcctccgaacaatgctcccgcaaacagcgcaataatgggcagctttgctccgcagggaatgaaggtggtggtcatgacggtcattttgcggtccctgtcattctcaatggtacgggaagccatgatgcccggaacgccgcagccggttccaatcagcatggggataaaggactttcctgacaatccgaacttgcggaaaattctgtccatgataaatgccaccctggccatgtaaccgcaggactcaaggaatgcaaggaaaataaacagcaccagcatctggggcacgaagccaagcacagcgcccacacctgccacaataccgtctaatatcaggctggaaagccagtcggcacagccgacagccgtgaggaatccctccacaataacaggtacgcccggcacttccagtcccaacaggctccatccctccccaaacacgccgtcgttcgcccagtcagtggcccaggtacccacggtggtaactgaaacatagtagacaacccacattactgccgcaaaaatcgggagcgccaggaaacggttggtgacgatatggtcaatcttgtcggagacgctcatcttctccctgctcttctttgtataacacctgccaataatggatgtgatatatgtgtagcgctcattggtgatgatgctctcagcgtcatcgtccgcggcatcttccatgcgcgctatgatgctttccacttccggaaccatggtcatctgcgccgctatcttgtcatcccgttcaaacagcttgatggcatagaagcgcttctgcgcctcaggcacattgccgccgatgcaccgctcgatttcctccagggctgcctccacatcggcggagaacttgtgtacagccgcagtcgccctgctgtcccttgcaagctccaccgccttgttggcggcctccatgataccggtaccctttaatgcggaaatctccaccacaggacagcccagctccctgctcagggcctgaatgttaatctggtccccgctctttttaaccacgtccatcatgttgacagccatcagcacgggaattcccagctccatcagctgggtggtcaggtacaggttccgctccaggttggttccgtccacaatgtttaggatggcatccgggcgctcggtaatcaggtagttcctggcaaccacctcttccagcgtgtaaggcgacagtgaataaataccgggaaggtccatgataatgacatccttattccccttaagcttgccctccttcttttccaccgtgacaccgggccagtttcctacaaactgattggacccggtaagaccgttgaacagcgtggtctttccgcagttgggattaccggccaaagcaattttgattgacattttcatatcctcctcattctcttattgagaaattttatcaataaattagttacgactaactcaatcttttaaaaaaaagcagttcctactgcacttcaatcatctcggcatccgctttccttaaggacagctcatagccccttacattcacttccacaggatcccccagaggcgccaccttgcggacatatacttccgtcccttttgtaatacccatatccatgatacggcgttttacagccccttctccgtgaagtttaacaaccgttaccgtgcttttgcattttacttccttcaatgtgcgcatcttattaatgctcctttccttctcatacccgcggccattttacaccataatcttattggccatctctttgcttatggcaacccttgattcctttacattgacaatcacattgccattgttagcagaaacaacagtcacactcgctcccggtacgaatcccatgttctccagatgacgccttacctcttccttgccgcccacccggactatggatgcctcagtaccttcttttaccaatgtcaacggcatacccatcactcctctttctgaacctgatgtgattctgttccctatatccatattgcagctggaaagttatggcatcctaactgcaaatttaggttagcaccagttaaccgaaatgtcaataatttttttcaatttaattgcggttttttttgcgatttcagccccgctgccaatttgcgtttcctctcaggatatgataaaatagaaaacagctgccgcagacttagaactaactaatgtttatcagtgggaggatttgattaaattgaaaatacaggaatcagctgaaaattatctggaaacaatcttgattttaagccaccgaaacccctatgtccgctccatcgacatcgccaacgagctgtcattttccaagcccagcgtcagcgtggccatgaagaatctgcgcgaaaacggttatatcctcatggatgaccagggccatatcaccctcagcagcattggaaaagaaatcgccgagaccatgtatgaacgccacaccatgctttcccagtggctcatgtaccttggcgtggacgagcagacagccgtggaggatgcgtgccgcattgaacatgtggtcagcgccgaaagcttccgggccatcaaggaccatatcaccaatgggcatgagcttccgggagacaacgcataagacacgccgtcaggaacattcacaaaaacacagcgcttaccgaccatatcgtgcggaggcgccgtgtcttttttatgctttctcactgtctctaccgctgttctttctgatattctctccggggtccctgattttcttccgggtttcccggcccgtccgtccttatatacacactctccggccgtcccttggtggtggtcctggtcttatacgcaatctttagatacccctcctgctccagtaccgccagaaaacggttggcgctccgtttggtgattcccagtctgagcgccagggttctggctgtaatttcctgcttttcggaggcgctgatggcagtgaatattttctttactgtcaggggcgaaagcctggactgtacgtccagcacctcgctgttgtccacattcatgagcagctggccgcagtcccccatgggaccgatgatctgctccctctcattgatcaggtatgccagagactgcttaagttcagcctcgtggcaggcgtcaagagcatttaacctggcctgggaaaggctgtttccaagaccgcagccgatactgaaacgggcggacagctttttctccctcagaaacggactcagacggtcctccttaaaatctccggtccagcccgacacatgtttcttggtggacacgatttccagcccgtaatggcgccggtggaccgaacagtcaatcatggatgcccctataaattcaatcaccagattttcaagcctcatataatcataatccagcccctggaacatctcgccgccggaaccgttttccgacagcttcacaatgatgactcccggtatctgctcctcaagcttcctgcgctcaatctcgtcgagaagcttgtcacacatctcccccacatactgcttgctggggaaagggaagtagaccttaacgccggccttctgcagtgccggcacaatgctggaaaaccgcgtgacggataaatcaatctttccttcctcccacagcttcacatgtttcctgtactcctcctgctcaatcccaagcatccgatccatgtcaaactcatcctctgaaagctcccggatatcaggcatggggctgcgcccctccacaaaatccttaaggcccacaccgaagatctccacaatatcagcgtaaactctagtaaaatccaggttcctgttctcatttaacagctgcaggaataaacggtacagggcagcctcatccgtgttaaaaaaacagatagggcgtttctcttctttataataaagatgtatcatatgcgcaggaaaactgccggaggttagaatgccgtcaaactcctccgtaacatttttatggatatgctgtatatccgaaaatgtcttatacgtaaatatgcaataatcaaagtcccggtccgcaagcatagactggagaaactcctttatatattctgttgcgatgactgcaatcttcctcttcaatttcattcctccccaaaccgctctgtctcctatcttaacatagcagcgggaaatccgcatcctccaaatgaaaaaatctcttgctttttgtcaattatacataaaaatctttttcccatcttgacattcattgtcttttttgtcataataaagacaagtctttatatagtctttttacactcaaggagggcactacgatgaaccaattcttacgacgagcaacggaacttgaacctcagatgcaaaaggaccggcgctacctgcatcagcacgccgaagcgggagagcacctgcccggcacaaccaagtatgtcatggaacggcttgcttccattgggctatccccgcatgaaatctgcgactcgggcgtcactgccctgattgagggcagccgccccggcaagaccattctcctcagggctgacatggacgcgctccccatgaaagaatccaacagccttccctttcagacggtcacggacgcggcccacaactgcggccatgacatacataccgccatgcttcttgcggctgcccagattctgtacgagcgcagggatgagctctgcggcagcgtcaagctgatgttccagccggcggaagaggtctttacgggttccgaaaacatgattaaggccgggcttctttccaatcccacagtggatgccgccatgggcatgcatgtgatgttagataccccggttccctccctcaactatggcacaggcttcatgacgtcctcctgcgacggttttaaaatcacggtaaaaggcgtgggctgtcatggcgccatgccccatatgggtattgaccccatcaatgtgggcttccatatttacagcgccttccagaatctcatagccagggaatgcgacccgggcgagaaggcaagccttactctaggcgcgtttaatgcaggatccacatccaacattattcctgacagcgccgtgctcatgggcaccctgcgcacctataataaggatctgcgcgccaggctggtaaaaaggatgcatgagattacagaatacatgggaaaagtctttggagtggcggttgaatacgaatccctctccgatgtgccctccacctactctgacccggaccttaccagggagctggcaggatatgccgccgaggtggcgcctgatttcattaaacatacggattactccgtcacaccttctgatgactttgcccgcgtgtccgaaaaggtccctactgtctacttcatgataggatgcggggtggatggatgcacggtccagcaccacaatccgggcgtattatttgatgaaaccgtcatgccctacggggccgcagtacacgcagcctgtgcatttaactggctgaacaggaggaacgcataatggaacgcaaaaaaatatattatggctggtttgttgtttttggatgtctcatgattacatgtaccatggtgccccccatcatggcgctcagcaataaatttctgattcaggtcacgggtgagcttcagatttccagaagcgcctttaccctggccaataccattctccagggtctgggtatcttcctgtcccccattgtgtcggccagacttgcaagaggcaacatgaaacggattcagaccgtcagcattattggctttgtcctttcctacgcttccttctcccttgccaccaacgtgattcatctatacatttcctccttttttaccggtgttttcttcttaaacgcctccctgattccggtaagcatgatgattaccaactggtttgtcaaaaagagaggacttgccatgagcatagccatggcaggaatcggcgtgggcggcaccatcttcagtcctgtcattacatggctgctgggggcctatggctggaggagcacctaccgaatcatggctctcattatcctggtactggcccttcccgctgccctgttcatcctcaggaaacgtccggaggacatgggactcttaccctacggcagcgaggatgccgccatacaggatgccgcctccaaacgtattcccaaaaaggcagacattgtatttccgctcagcgtgaaagaatccaggacaaagctgttcttcatccttttcatcttcggcatgctgtgcaacgggctgattaataccggctccctgggccacttccctccggctatcgaggaacttcagggcccccaggtacaggctttaatcatctccatgtattccatgattggtattttcggcaagctggttctgggatggctcaatgacaggttcggagttgtggccagcactgcctttggatgcatcacctttgccctctcctttatcttcatcctgtttgggcagaatatcagcatgctctacatcatggccttccttttcggcctgggagatgccatcggcaccgtgacccctcctcttattacctccgccatctttggcgctgaaaaatacggcgaggcatacggaatcgccaacagctttacacaaatcggcctttccctgggagcgctcatggtggcagccgtatatgacaccagcggctcctacaatacggcctggattctccttattatcctgaccctgggtgccttcgcgggctgggtgggcgcgtacgcggtatccagaaagtactgtcaaaaatcagtggcggacaatacgtaaaatgcacaggccgcccaataaacccggaaggcaatggcttcggtgcgcggactgtctcggcggatgggttgccctgtctctcaaatccagaatatccagaagggcagctgcccattggcatgcatgtcctcaaccgggccgtaactgaacgcgtaatgggtcactgccttggaaatagcgtcaatattttcccttttcgcacaggcggtgattccgtgttccgatttcattttattataaccagccccggtaaaaagacaagttaaaaggcgggacatttatcgcatcccgccttacggcgctgttgtatcagcacaaagaacctataaaagagaatgttcctcctccaaagggaataatatcatgaacacctaccaggtccgcaaccgttaccgtttcatgggaatcgggcaggacatatcccctgtggtctttgcagacggggtcaatgagatggggttcggggcggctgtcctctacttccccggctatgcccggtatgattccccggaccctgaggatccgtccagacctgccgtcgcagccctggagctcaccggatttctcttaggcttaagcgcatccgtggaggaagccgcattcattctccgcaccatccgaatcgttggcgcccaagactccataaccggaaccatcgccccgctccactggcttgcggcggacaggaccggcaaatccatggtcattgaaaagacagccgacggcctgcatctcatggataaccccataggcgtcctctccaacagtcctgacttccagtggcacctgaccaacctgcgcaattacatgaatctctcctcctcccagaatcagtcacagacctggggcagcctggagctgacccccttaggacagggcgccggcagctttggactgcccggggattacacgcctccttccaggtttgtcaggactgcttttctaaagacccacacacccattccggcaggcagggaggaagcagtgctggcctgtttccatataatggaaagtgtaagcataccaaagggcccggtcatcaccggccggaatacgccggattatacccaatacacggccttcattaacctttcctccagggaatacttcttcaggacctacgacaacagctgcatcacctccgcatcactgcccggcaatccggatacggaaagcggcatgaaatcgctggcggtcctcaatcagcctgctgccttctgccggttacccgagtctctgggcacgttctaacacctggcagagatattccgcatccaccggcttggtcacaaagccgtccatcccggcctctgctgccgcatccgcatcttcctgaaaggaattagccgtcatagctatgacagggatggaagaggcatcctgtctctgcatcccccggatggcccggcaggcctccaggccgttcatctcatgcatctggatatccatgagaatagcctgataggtcccggggctgttccggacaaacaattccacagcccgttttccatattccgccctgtgcacactggctctctttgtcttcagaagctcaatggctatctccgcattcaggtcattatcctcggccagaaggatgttcaattccggaatcatgtcagccgcgattgtctcaacatactcatactgccagcccttatattttgctatctcagtccggcctccctcagcatccaggcaatcctggcgctttcctccagctcttccagacagtaaaaagcgtccatcagattttttcccggcaccactgccccgtgctgcttcagcagatagccgtcgctgtccatcacacgctgcccaaaagcgtcaaacagtgcctgggagcctggcttttcgtagggaatcacccccaccttacccagcttcatcttcagatacggggtatggtccgggattgcgtctgtttcgtcctcagccggcacaaagctccacagcaccccataggtgccatgagtatgcaggaccgcgcctgttcccggctttttctggtataccttcagatgcaggggccattccttgctgggcttgctgctgctcagacattctccgttcatatccatgactgcaaattcatcctctttcagggttccaaagcagcttccgctctggctgatgtacatccttccatcatggaaaaaactcatattagccgatgaaccggctgtcttgttcctctcaaacagactccttccaatccagaccgcgtcctttaatttctgagccaattccttgtccatcattttccttcctccatccgcgtcatctccaacacttttataaaaaactcttcctgcccgaaattcccggactttaatacaaggcgaagcgtctcattctccatgggcaccatgaccggcactccgggcgccacgctggcgccaatctggtaggaagaaaatcccaggcgttttgtcaccgcaccggaggtctctccccctgccaccaccactctcctgattccatgggccactgcccgctccgccagcttggcggctgcctgttccagcatctctgccacgcgctcctgcccgtattgctgcacttccttcacatttcgggctgtatcagagctgtacaccagaaccggaattccccagttttctctcacaaacttccacgcgtcctccaaagtctccctgccctcaagcatggccacagggtccatcttatagctgagtccgccgtgggcccggaaatagtcaatctgccccagggtagccttggaacagcttcccgcaagcagaatggcggatccctctgcctgaatatcaagctccggcagcatctcctgccggctgctcagccgttttgccagcggctccagaatcccgcttccgcctgtcagcagggccagatccccgaacagctccacaatccgttccccatcctccatatcccggtaatccggtatcacatagaaatgctcctgcctgtcctcctgttccgtaagcatggcgcggatttcatctgccggcctgtccatctgctccttccagagctccacacatgggtacttgctctggggcttcatcaggccggcgattctggagtcccacatgggagtcagaggatggttcttcatggggctctcatgcaaaggcacaccgccaacatacagttccccgtttcttaccacacgcccgttgacaggcagggccgggcacagtaccgtataggacaccccaaggaattccatggcggcgtccgcaacaggaccaatatttccctctggagtagagtcaaaggtggaacagtatttcagataaaatttctccacgccctgctccttcagccagccaagggaccgcatggtatccgccactgcttccccggtatcctgggtcctggatttaagcgctatcacaatggcctgtattccctccgcaatcctgctttcttttgccggaatcccgttaaagagctggaccgacatgcctccctttaccaaaaatgaagccgcgtcgctggcacctgtaaaatcatcggctacacatccgaatatcggcatagtttacctcctgtcatcatgaaaagatatattatacaataataccagcaaatttcatgccagcataaatcacaaccttcctgctttgttattcatccttatatgttgcaaaaccgttgaccaaactgttgcattattgtagaatcgaaacagcagcaactgtaccatccgccataggaggcccgccatgattcatatactattcattgtaccatatcccgaacttcgggaaaaggttgagtatgtcttagacaaccatcctgaaaacaaacgaatttccgccaacatacaggtattgacagttgaccagatttcacggattaatgcaggaagctacgatgctgtcatcgcccgggggttcagtgccaaacagttgaaagccatgcatccccagactcccgttatcgacctggccatttccggttatgatatcatacgcacggtcgctgaatgccgcaaagattttaattccacacagattgccatctgcggattttacggaaaaatatacgaagcctccgacatatgcaagctgctagggtgcgaagtggaaatttatccggccagtaatcataaggacctggaagccagcatagacgaggccgtcgcccatggatgtgacgcgctaatcggaggatactccgctgtagagctggctgaaaaacatggcatcccatcccgcctgatacgaaccggagaggataccatccttcaggcaatcaatgaggccatacgcacggtcgaacaaatacagatcgaacgaattgtcgccgagacctataagaccatcatatacgcgtccaaggacggcatcctgtatattgattccaccggtaccatacgggtacgcaaccgggtggtcaaagccatgaacaacaatatcagcctgctgtcaaggtctctgcggaccacccttccctatctctacaaatcctttagcgaggttttaaaggggggacaggaaataaacggcagcattcttaccatccccaaaagcaaccttaccgtatctgcctcctttgttcccgtggtagtcaataacaacatttccggcgtcgtgattaccttatctgatataactgaaatacagaagctggaaaatcaaatccgccggagtctcagtgaaaaaggactccgggcaaaatatacctttgacgacattattcataagagcgctgtcatcgacgccaccattgatacggcgcgcagatatgctgcctcggattccaatgtcatcatcgtgggagaaaccgggacaggaaaagaattgtttgcacagagcatacacaatgccagtcctcgtaaaaatggaccctttgtcgccatcaactgtgccgctctgccggaaaatctgctggaaagcgagctctttggctatgtggagggcgcctttaccggcagtgtcaaaggcggtaaaatgggactttttgaacaggcgcacggcggaaccctgtttctggatgaaattggtgaaatttccctttccacccagaccaagctgctgcgggttctccaggaacgcgaggtcagaagaattggtgataacaaggtcatctccatcaatgtccgcattatttccgccaccaacaaaagcatcaatcagcttgccggcaaagaactgttccgccgtgatttgatgtaccgcctggatgtcctgagaattttccttccccctcttcgccagagagaccgggacgcagaactgctgttcctgcatttgatgcggcagcgggggcaggagtgcgggatacctgttcccgaaatcaatctttcggccttatccgcccttaatgattatccatttaatggaaatataagggaactgcgcaatatcgtagagcgctctctggtaatctgctccggaaatgccatcaccagagatgatttgctaagggcactatatccccgggatttagaggatacatctccggttcctgtctatactgcatctcagacctccggcgaagaaagctccatcatatgggcacttggtgaatgcggcggcaatcagaccagggctgccaggctgctgggtattaaccgttctacactatggagaaaaatgcagaaatatcatataaaaatataattcaaatcatgcaatggtgttgcacattttgttgtgatatcgttgcattttttgctgtaatactgttgcaaccgcactccccctcaccctccggtgtatttctctctatatcgacctttttcttgtgtcttttatgaagcttttattatttttagccgatatccatatacttggcatcataattgctctaaacaactgcatcgggcaataagaacacgccatgctccggccctgccggggtggtcagtctccggggtattggcgctctattccaaaatcaagaagaaggagaggtattttttatgaagatttgcgcgacaatgaaaaaattcccagggggcatgatggtcattccactattgattggctgtttagtcaacacattcatcccacaggtactggagattggcgggtttacaaccggtctttttaaaacaggaacctctacgctggtaggcctgttcatcctgtgcagcggtgcaaccattaatttcaaacaggcagcccttcccctctacaagggagcagtgctgactattttaaaatatgccatcggtgtattgcttggcctgggccttaacaggctgttcggacccatgggaattttaggtcttactccattggcagttatcacagctgtcacgaactccaacggtgccatctacactgccctggcaaaagaatttggagacaatacagacgtaggagccattgcaatcctgtccttaaacgacggtccatttctaaccatgattgcactgggcactaccggccttgcggaaattccaattctgtctctggtagcagctatagttcctctgattatcggtatgattttgggcaatctggatgaagacttcaagatgctgttatccaacggattagctatgctgcttccctttaacggttttgtgctgggagccaatacaagcctgtttactatagcaaaggccggtgccggcggtattgtccttggacttataactgttttgtttacgggtgtgttaacctattacctgtacagcctgattcgaagaaaaccagatcctatgggaatggccattggtaccaccggaggcaatgctgtagctgtacctgcatccgttgccatggcggatccttccctggagccggtagtgggcgtggctaccgcgcaggtggctggcgctgttgttatcacagctattctgacccccattttgaccggattctttgccagaagggctgctaaaaggcagcagaaaaattgataagcttatttgcattgaaagaagggaggacttttatggaacgttatatcattaaagcaaacaaaatcatagcgcgcgatcagctggaagttatggaaaacagcggacttctgattgaaaatggaaaaatacaaaaaatatacgataatatctctcaggttgaaataccagagcaaacaaacgtaattgattatagcgataaggtaatcatccccggtatgattgactgccacaaccatctgtcattagacgccagacttgaaaatcacctggttaaaatggaggactgcgaggcagagcagaccatacgcgccattaaaaccatgaaggacgacctggcagccggtgtaactacctccagatgtctgggagacagattctatattgatgtaacatgtaaaaaggcgcagaaggaaggacggatcgcgggaccgaagctggttgtcagcggcatcggcatgcgcagcagccacggacacggatatgtaggaatgccccattgcggcgcggaagatttccgcaggacctccagggaaaatattgcccgcggtgttgattttctgaaagtattcatgacaaaggtaatcaatgcaacccctttcatctatcactttttgaccttagaggaactgaaggcagtggtggaagaagcaaaaagtgtgaatataaccacagcctgccattgttcaggaggacagggattagacgactgtctgactgcgggcattgactgtctggaacatgtgtattatatcacccagccccaggtggagcgggttaaaaaagaggaccgctgggtggtatatactcccagctacgctctgaatgaccagctgttattcaagttttcgcctcatgacagggaggggagccttcgtgaaaaggaaattatctgcaaatgcttatccggcgccattgagggcggacttaagtttggcattggcactgacgggctgcatcagggcttggcgcaggaagcatgctatatctctggtctgggcgctaaaaaccgggatgtactggccggaatcacaatcaacgcggctcggatctgcggggcagacaaaagcaccggctctatcgcggaaggaaaagcagctgattttgcagtcctggaaggcaatccgttagatgatattgaagctttaaagaaggttacatctgttatccaggacggaaccattatcttctaaattattaggggagcactctttgctgctaaatctccctttccatctacaaaaaggatgctgctgcaaactgaattcgatttgcagcagcgtccttttattctgtgtcacctctatatcatgttaaagcccgtgttgcaatcaaagctttaatccttcgttatataattcataaggaaggcttcctgacaaatccaccacgttctttgttatgggctgtcctgcatttacatcctccagcagtgttgtaccatttaacagatagaatggagccgcatttcccgcatccttaagttcccacaattccggaaccaggccctcaatggaatgatgatgtccctggaccttaagtacggttcccttgggcatatccttctgagccacaccggtcatgacggaaacctgacggcattcagagtgggtacccagtcccaggatgtctcctaacagaatggatataggcgtctccagtcccatataatgatagggaagatagatacatgcatatttaccattacggcttaccacatgccctttacttgtaagcagttcccataccgtttcattctcgcatctgataataatgaactcgccacctgcaaaactggcctcatccggcgcacgcagattgcagaatacatctaccacaccagttttcttaagtatgccgccatcttcctccggaataaagatatctgccagttcgctgatctttgcaacaggataattcagacgtctgtcagacggcaccagcccggtgacattggacacaagattcatctcgcaaagatcggcggaaataactgccatatatttttctaacagcttacggcgtccctccaatgtcccgcggccttcataatgccaaaactccttcagaccaggaatattctcatgcggtttttcagagccttccatataagtgaattcgtcagtgtccggatcccatacaaaatcatattcgctggctttgcccgctgctatgatctctaatcccaatacttttccccaagagtaaagatccagaaggtttcttggctgatctccgttaaccagagagtatacggtgccgtgtttctcagcaatattatttaaaatagggccgcacacgctgtcagtctcctttgaaaccatgtatacattgattcccttctttaatgcgtccgcggatacctctgagctcacagccgtgtttcccgtacactcaaccaatgccgtaatatcgctttccagaaccagccggtagtcatttacaataagaaccccatggcctggagcgctctggacctgctctttattaccgcatataataatatcctctttcctatatccaagtcctgtgagcacctccacacattcgtccgtatgccgtgaagatatcagcctcagttccattaactcaacctttggaatttgtgccaacagcgtatagccatagccgcgggttgcacctataattcctacttttgacttttttccgccgttgttcttaaataaacttgtgtaatccatatcgcgcatttcctttctgttttatattttttcttcccacactgcctgaaacagccctctgccgcattctgtctgaatgtcaagttcagtccgtgatgcttcaggtaatgatgtgggtatatttactactgctaaactataatagcaaatatcatgccaaaaacagattgacgaaaatataacagaatttccgcgcaaaaaaccagtaaaataaggatgctgtcaaagcataagaaacatggtaatatgctgattcatttaaacatcgtgacatgaatgcaacaaaaacaatcaacaatgcaacagcgttgcaactgcaactaaatgctctatttctcagatgccttattattcagtcttttggggacatctccccgcatcattagccgcccccacattcttagtcaccaccacatcgctccccagccccagcacgtctgctgccatcacctgtccgtctgtccttatctccaggggacagtaggcaaatggcctgacctgatataccggaccatgccatccgccagactctccgcctccagggatacgaaatccaccaggtcgtggacctggagaacattaccggcggcaaagattccctccacgctggtctggtaatgttcatccacccccccccccggcgcccggtctgccgctgtttccaaaagaaggtcaatatccccgcatgagcatccgacaatggttcatatgtattggatgacttggattcctgcttttttctcagataagatgtcagcttctcagctattttttcgcccggcatacagctccccctgtctcatccctgtcactgctttgggcagagagcaaatagtcgataatgcggatatcatgcttatccacttccctgaattcatatcctgtatggaatatcttctgcccctttgccgagatacacggtatggtcctgccctcaaagaccgcgcttccaaaataatccgcctcaaattcataccatccgccttccaggtccgcctgctttgcagttccatcctcgttgattacaaatggatggatatccacataactcagctccgggtggcagagttcaatccgcaccgggcgccagtccgtcgtgatttcatacccatgggaaaccaatgtgcggagcaaagcgtctgtataccgggcatcaaagttaatatccacgtccctgtgctccctggtctgtttcccaagcagcacatccacaccccagccgccgtccagccagtaccgcatgccaaatgtctccatcaggtccaatactttcaataaatctgcctttgttactgtctctatttttatcataaaatctccgcctttccccataaactgctcatctgatgctttctgtcactgcatcaagtttaccatatttctcccctcatatctacccggttcagcagctgaaacggaggagaaatggaaaccgggagaacccatcggacctcccggcattccagatatcacgtctcttcccgcagtttctgaatcagctgttcaagctgcggtaccggctgcatacattcatgccccacacagaggtaaaataattctccggcctcaggcaccggataatctcttgtatagggtgccagacgctccatttcccgtacattttcctctgtttttaccaccacagacagcccctctgacgtttcggccaggtttgcgagctgagcaagcagcttcctgtgcctttccatgtcagcgccaggcgacagcgtacacaccagttccttagagggatacagcacatccatcatggtcagaagcccatagctgtgcccagaaggatatccgtccatggcgcctgccaggtaacagagctgtttctccagcaccttctgccatttgacctcgccggtaatttgggtcagccggtgcagtacctgagctgccacggaattcccggacggcatggcgccgtcataggtctcctttgtcctcacaataagctgttccccgtcctcagcatacagataaaatcctccgcgttcccggtcaaagaactgttctgtcattaactccgcccaggcagcagcccgtttcagataatcagcctggaatgtcacccggtacagctccagcaatgcaagactatagcaggcatagtcatccagctttccctcacccgcggcatctccgtcacggtagcgcaccatcagacgcccgtccttcacaaggcggctgtttataaatgcttctgccctgacagccatatccacataccgcttttcccccagcacagctcctgccattgcgcatgcacaaatcatccatccgttccaggaaaccagtatcttgtcgtccttgtgaagcctggcgcggtcaagccggtattgatacagttttttgcagtcctcattttttctgccgccaaagctgttacggacgccatgacagacattgccgccatggtcatcaccgccccatggttcctcacaaatctcctcgtaattctcattttccagcaggttgggtatgctccttccttcaaaattaccatgccttgtaattccgtattgccggcaaaagtccctgcccgctttctctcccagtaccgcccttatctcctcctgggtaaacacatagtattttccttccacaccatcgctgtccgcgtcctgtccgcagtaaaagccgccctgggaatccgtaagctcctgcctgacgtattccagaatctttcccgccacacatccatacatcttccgcccggtgcgtccataggctttgatgtaagccatgaccagcaggctgttgtcgtagagcattttctcaaaatggggcaccagccactgtccgtccgtggaatatctggaaaatccgcctccaatgtggtcaaagataccgcccctgtacatctgcaccagggttgtctccgccatggccaatgcctccggccgcttctgccttgcgccatactccatcaggaatatcaggctgtggggcgtgggaaacttgggcgcgcttccaaaaccgccgtttttacggtcaaaactgtccgcaaactgcctgaatgcctgatgcaccgccgcaagctccggctcggcccatcttcctgtctgttcctggcttcttaagtatttctctatctgccctgcctggtccagaagtttatcttttttcgccttccactgatctgcggccgctgtcagcagttcttccagccccggccttccatagagggctctcggaggaaaataggtaccggaaaaaaacggcctgcagtccggcgtcattatgatagtcagcggccagccaccctgtccgttcatggcctggcacactgacatgtatacagaatccacatccggccgttcctccctgtccaccttaacacatacatattccctgttcaggatttccgcaatcacctcattttcaaatgattcccgttccatcacatggcaccaatgacatgtacatcatccgggacatgtcagctgtacccaatagataagaaaacaggcttattttcatgccttgctttctcaaatgcctcctctccccacggaaaccactgcaccggattatatgcatgctgcagcagatagggcgatttttcattgattaacctattgggtctgttgttttgattgtccacgatatcacctccctgttactgaatatttgtcctcttatgttctccgcgaaaacatagaattataccctcctgccgtcaggtatccatctttatatgtatagagcacggattgcgtttataatagcgataattatctcccccactccccaaaaaatcaggatcgtctccttaaccgccatatcaaaaccgtattttcccgttttctccacaatctgctccgcatactgttccagttcatcccaggttgcaggaggcgtttcagggtctaatccggcttctgtaaagattgttttatcgcagtattctttgcctgggttatttccaaaattagtgttttgataaaagtgaaggggcctgcaaccaactttattgaattatttcacgatgttcttttaacaaccgtttcttacgtttattaacagcttgtcgggaaatatgaagcctggctgctagttctccttccaaccgcaacaataaagactatcacatcagtaataaacggagcagcaaaacgccgtgatatgacctgacatatgatggctatcactctttcagaatacataataaaccagccaaatgttctgcgttctctttctgttccacacaagtataatgatcgccgggagtttctataagattaaaagcgcccaatgccaatctttcccatgtctccaataccattttcttaaatccgacctccccctccagggcaaagaaataatttatattgcctaaatacggatatatttcatagtgcatggcatcaaatgtcgcaacgcaaacctgatataaactcttaataagctccattgccatctctacccccgtattctttttacactgtactgcatataatccgaaacggtcttctttcctcatcactgccagttctctgaaaaagctgcctaacttctcccgctcagctgttccagatatgcttgtcaaaaaacccttgctaattactccttttttcattgataaaagggactgcgggtgttctccggttatacggcttggtttacaaattgatgagctgtgtcttaattgcaaccgcaggtatcttatatatggatggaaggatttcccttccatactgcatgacatttttgttttgtgcatttaccgtttactctgacctggaaaccatgggtaacagcgcatttttgagtaaaaaaataaataccgaattagaccgtttagaagaggttacaaatatccccaaaatggataccattacagataaactgaatcctgccaattatgagatttctttaaaagatgtatcgtttggctatggttcccgcaaaattattgaaaacatttctttaaacataccagagcatactacatgtgcgattgtaggtccgtcaggaagcggaaaaacgacactatgcagcctaatcgcccgtttctgggatgttcaggaaggttctgtttgcattggtggacaaaatgtgaaaaattatactgctgacagtgtgcttgactgtattagtatggtctttcagaaggtttatctattccatgacacaatagaaaataatattaaattcggtaatcccaaagcaacacttgatgaagtaatggaagcagcaaaaagagcttgctgccacgacttcattatggctttgcctgatggatatcagaccgtgattggcgaaagtggatctacattatctggcggtgagaaacagagaatttctattgcccgggcaattttaaaagacgcacccattgtcattttagatgaagcgacttccagtgttgaccctgaaaatgaacaggctcttttatctgcgattgaggaactgactaaaaataaaactttaatttccatagctcaccgcttgagtacagtacaaaaggctgaccaaatcattgtaattgataatggtcaaatcagacaaaagggcactcacaaacagcttagccaagaggatggtatttacaggaatttccttaaattgcgtgtggaagcaaccggctggcaattataaattactcctgccttttgttcaaaaaagctccaaatagaatgtcaacttaggcttctatccggaactgataataaagaatcacaattataactaaggttgtaatcgcaggtgcaggaggcgctgaggagaaatccattattcatgaacatgatgaaaaaagcaaaatgtgaagatattaaactgttatcaagtttaaatcgtattgaagaatagttgctggagcaggtatgacacctgctcctactgttaaactttaatttcctgattgcctgttctgctaagatacgcaaaaagtattgcaagaaattgactagaggttggccttctatcaagtgtatgaccggccaatttttgaaggaggcgtggctgcgatctccatgctacctgcgataaagtcctaatatttcgttctacagaattacatgatgtttgataccgtttcgcgatttcaggatatagacatttagtaacagaatgtatgcgctcctcatcttctttcataagcataagagcgtactctgtatagcgatatccgacataatgcaagtctgctccaagaagtgtcagtatcgtatgtatttctgaagaatcaaatacgggtttatgcggcatctccattcctccttcctatcaaaatttttaactccttgaagaaaatcagaatctcttcgtcggttaataataaaacatagtttaccaatgtcatggcagaaaatccatattttccatgttcttgatcaatatatgatcgcggtgagacatgtagggcttctgccatatattcttgagagaaagcatgaaagttacgatacgtataaatttgtttttttatctataattattatagcataccgcagcttacagctgcaaacaaatttaaaaacataaaagaatcatcctgttcgtagatgcacgtgctataatgcacatatacggtatctgtgtaccactctccatcggaaactaaacttccctgcaagcattcatacgaaaggatgaccctatgaacactattttagagcaatacaaagataaaatcaacggtattttttccttttttgacaggattatcatcaaagggttacagttcacagtaccctatccacaaaatgcttacaacatttttatgctgcatcatccggcaggattggttctatatgcccatatgcttttaaaagcagggtgactgaagattgctctcagtcaccctgctgtttatcttttattcattatttcgctgttccccgttccaaacgccatcgttgtctacgtaccagccatcgatccaggtatttgttaacagtttgcctaatgttccatcggaaacctcgttaaagtaataccactttccatcaatttgatgccagcccacatacatatatccctgggttccgtcagaatatggatggagatagaacacatgatcgccgtccctaaaccagcctgttgccatataaccgtcttcatggaaatagtaccagcttaccacattattccataccaactgtctccactctccatgaggccagctcttatctgtaaactcaaaccaccagcccttttcgtcctgatgccaagcacccggagtattggatgaggaggtataaaccctgccgccgtttccggaaccgccggaaccactgcttccagaactgccgccgttctcacctggcgtaggaacaaccggttcttcctcattgtcgtccacataagtaagtccaaaaccaagttcgtaataattgccctcactgtctttgtatgcgtacgcttttccattctcatctttcatggatgccggcatatactgatccttatcatagccaggcacatcatttggagatatgcacacaccgtccgcattgacagcgatcacactgtcgtcctttggaagggtaatgggcatcttgccggcaggctcgtagacacctgttatcacatccatggttgccgttgtcagggtatcaaaaccagccaggaccacatctgaataaggctctacattacccaacatccaggccagggtaaagtttacatttgtcacaactttaccgccattagctcttactgcctctgagatcgccttgatggattctacattctcaatagtggattccgtatgagtgtccgccaccgggcgcccttcatcatccacatcatggacgatcttatccgtacatatatccagctcaaggtatccctttgttgcagagaaatagttgccggaggatggatttacaaacagtaatgcatagtctgcttcgtgataattgttggtaaggctgatgttgtaatccccggacataatgcttctctgaagctctgaagttgtgctggccgaattactctgtccaaagtactggatataaactttcttccctgtcagcttatcagcagtcaatggaagggttccttccccatcttttaagagaaccactgatttctgatgggcctcatatgcttcatcccagttgtcctggttatctacagtctcttgagcagtatccggatcgcgatatggattctcaaaaagaccgagatcaaacatttcttttaacagccgcacattggactggtcaagcgctgctgttgtcaatgtcacatccgccacctcataacctgcaggaactacaccttcagtcgtataatagtcagattttccgccatcagggcctctgttccaagcctcaatgatcgaattaacatcatttgtatcacttataatatctgttcccacattgatcgccaatgcatttctttcaggaacatccaattcctcaactccccagcacatattgccggtaataccgctgtcgctgtttacatatccctcatgacctatctgctcacggaggatatcgttgataaataccttattaaacgcaaaccctacaggaaccatgtcaatgggattgccttccaggtcatactgtgtttcactcttttcagctgccggttttgcatagtatggcatgatagaagatacacggttttccactgccttgataaatgccggaaggtgatacttctctaagctgccttcagtctgatatacattccactgtccctgtgaataatggggatcgaaaccgttctctcttgcaccgcctcctgggaaatgttttacagtcaaggcaacaccatctgcctgcacaccatccgaaccgttctggaatccctcaaccagccttccaataatatcgctgatcaattcaggatcctctccaaacgttccgtaggtcctctgccatctgggatctgtcatggtatctgccatgtacatatatcccttctttaagcctgacgcatcccattcatttctggcaatctctgcaaaacggctgataagacccgcatctcctccacgggcaatatctcccataaccgctgccgccaggcctaatgtgccaggccatgtggagaatactcctgatgcatcattcataccaaacgtcatctgtccattttcatttctggaattagaagccacaacaaccggaattcccagttctgtcttttctgccaccaggttcatctggttgatccaggaagccatatcctcaggttccggattttgacgcagtataaaatgcctcagcccccagtccacaatcgcttctgttgtgcccagtgtgcgtgacacaccgaaaatttcggaagacatgtcatctgtgttggaggtttcatccaacaggccggttgcttcgtcagggttagagctatagattcccatacctctggagttaataaccatcattcctgctttgtcctggagcgtcatcttttcaaccaaatcttttgctcgtgtttcatcgtcttcccgccagtcttcgtacacgtccaggataccattaccattggaatctttaaagtacatgccgtcttgctcaataatgctcttcgcagtggcgccaatggttggcccgttaccgttttccctataaataatactgtcataccatgccgcaactgaatcgtctgatgctacaggaatcgtggaatcgatatcgttaagcaccataagcttcttgggctcagctatctcataaagtccgtccacacctactgcatccaccttaaaaccatagaaacgcttaaatacattcgtatatgtatatgcgcatgaattatccgctttcttgattccaaggtacagtttagaaggattttgtcctaataatttctctgataaggaggcggtttggctgatgatatcccagataaggccgttctcctgtcttgtggggtctgcctccttctccagaaccttccagctgcatccatacttctcagccgcatctgcatctgccgtaataccaatataggcaattcctttggctttgagttttgttatatcaaactctgtatcattattagatataagtccaatcactgccttgccattgaaattatccggtatgcagaccctgacatagttggtatatgcctgggcaggctttctgatataaggtatatcctccagcaatacaccatagatattggcagtaccgctcactttatatatcgattccttatatccgtctttttcttccacatcacctaccatcataatggaaggctcacttttcatggattcttcaatattagtaaaccatgagggacgatatccaaatatgggctgattttccgctatggacatcatacgctcacgttcttcctctattagatagccttctgcaatcgcatcatccaaagcggactcgtactgatccagatagtcctctctatctgcatacagatcttccaactcctctctggatatatataccatggagccgccgtctgtagagtagtttccattaacgcctccataatacttcgctacaggcaccgaaatctggggaggtacaataccctctgtcaggtttccatagtcatctcttgcatccaggccgatatcatcagcccggaaaccggccggcatatccccgccatccgtccattcaatgaggtttgccaaaacagagttgacataggaatccatattaagatccgtgtttgtattgggacgccctgtatccttatctgtcttcatcgccggataataccctgccggacgccctgcctggatctgaagttcatccgtcagatccggcgggaaaatcttggatgagtgggctccgcctgcgatcacgtaatggcggtacatattctctcccggctcatcgccgtcttctttaatataattgggatttattttaacgcaggcactgtaatcattctcgccctccaccaatatatatggcactggtgaatcatacggtgcggcaaagcttcgggttttgccgccgctgctaagggctgagtccgcaaatgctccaactacattaacaaagccatcaaaaacagcatctccctccccctcatcagaattataatctattcccactgcattggcttgtccaaagcagttaacaaacgtgtttagatacatacctgactgtgactgccccatgaggaataccttgtctgccgtattcccccccaacagatcacaattctgctgctttagcataacacctaactgacctaacatatcccagaacaaaccgttcctgtcatcgtcattcaggctgctggcgccccattccagttctgcataccgcttggaatcaaatttcttaagagattccacattgcagtattttgaagtgattcccacataggcatatccattcctcataaaatagtcgtaacttctgcgccaaatatcgggtagatccactttactgctggcattcagtatatcaacaaaaaccacaccgttaaaatcagctgattcttccggcatatacacaaataccctattaacgtagtcctgctcctttggcctggttgcattgctggatgttgcagtcaccactttatggtcgtcttttaaatcatagacatgcgcttttcctttcaggaaatactctgtctctttataattatatttatcagtaaaaccaatatcctgctttgttcttccgtttttctggcttagatacatgaaactgtcatctgtttcagaaattttctcataaacaggcgtatcgttatatgtaataattaccctctccagcatctcatcatccaatgaattattacggctagcttcactgggagttgcctttgtggcctcgctgggagttgcggtcttttcttcctttaagcctaaagagacagatacacctgcacccttgattgcatctttctctccagttacgtcttctaacttgtccggagcatcggcgtccggtgtctccggagcatcggcgtccggtgtctccggagcatcggtgtccggcgtctccggattatcagtttccggtgttcccgggttatcaatgtccggcgtctccgggttatcagtttccggtgtctccgggttatcaatgtccggcgtctccgggttatcagtttccggcgtctccgggttatcggtgtccggtgtctccgggttatctgtttccggtgtctccgggttatcggtgtccggtgtctccgggttatctgtttccggtgtctccgggttatcggtgtctgacgtctccggattatcggtgtctgacgtgttaacttcttctctttcaatctcttcagcgtaagaattaaagggccttatacccccccccccagctgcaacactatttcctactcctagactcgatcccatcatagaagcggcaagaactaaagccataactggttttaatctttttttcataaacctttgcttacccctttcttaatctttgcatttcatccttttcgcgattaaggaatgaaatacaaataaaaatacggtctggccatactcgcattaacaaaatgttaacatttataaatattatataaatatttctatacataataaatagtaagtttttaacatttctagtactattttgtcttttggcacatatttcaagcattattttgcattacattgagcatttatcccaatacatgtcataatataattttccgtcacaacaaaatcggacaatagacagtaatcattcatacgcaccagttcttcatccgtggatgattgtgtccctgtcccctcctcacagtaatcaagccatatgcagcgacagtaattgcacctttaaacatggacaaaatccagtccatggtttcgaaataattcattttaatcggatccacattcctgtctgccatccttttcattcgtttcattttgaacttcctgtatgacgtaaagcaggaattcctccagggtaggtattttccctctccgaggtatccggctttaaagtttactcacttcctcattttgtggagtcatgaaggcctccataatggctaactccatctccctcttaaccacctcatcacccactccataccatccagcgatttccttaatcaagcttttcatggtctgcatgttccatcctcctgtgcgcataatgtaaacacctataaaatgatattatatgcgattttatcgtgtattttaacagatttaagcgttataatcgctcgttatgcaacttattatgaattatgattactcacacaggaggtgggttacatggatgaacaatatatatgcaaccgcatcacacagctccgtgaggccagaaatatctctgaacgcaaaatgagcctggatcttgtcacagtaccagctatatccgaagcataacctcttgacgttcccttccttccatgggtgaattcctttatatctgcgaatatcttgacgtaacgcccatggagttttttaatgaggaccgggaatattcccctctccaaaaaagagcgatggattatatctacaccctatccgatgatgatattcaactaatgattggtttaattgaacgtatcaaaaggaaccgataaaatatccttcaatgcaaccctgaaaaaatccctgacagaagatacctttcacatctgccagggattaataattcattttcttcgatatttattggtgtcaaaaggcgccccagccaagccggagcgcccttaattgcgtcactattcgcttaaaaatacttcttgcttccccttatattaagggtgtttcatactgtcccgctatgttttaccacttactgagaatcgcataattacgttgtttgcagcttatagcatattacattttattaccctttcctccacaaatggagtcaaattggagtcaggaaagaatccgctattttccaaaggaagacacatactgctccactgcgttcaatactaactcggcagcgtcaatttgttcctgggcttcttcaacggaagcgatatagaactcgtcataatcactggcgtgacgaatctcctgggccctgccaatcctgcggccgagctgtctggaaaatttctctgtcttgacgtattctttattaaaatatgcaattgtgtccttatgccgcttaaaagcaacctgctccaaggctaatactgctgtaattgagtgatagattgaataatacgccctgttattagctgctctgaaatgcttgccgataaaatcatcctttgcagttgccaaatcctcctttgcaactgtaagacggtgaagagcaaggtccctgggattaccactattgggcgacatacaattcgaccccctcatttttcacattcttataaaaagggtcagccggaagccagtactggaaatgatttacattttttacaatcggcataatcataatgtcatggtccagattaaaatcaaaggttatatcagaaaccatacgccctttctgttttatggtatcctccgttgaatccaccagaatcataatatctatatctgaggattcggtataatctccccttgcataggaaccatacaaaataacggcctttaattcactcccatatatctcatgtattctattcacatactgaaaaagcacatcttgagtctggctttgcaaaataccacttcctctctgttttttagggatatatcacaactgtatctattttcattatatccgattgatagataccttacaacattttccggaatctaaacagaaaaatatcaattgattctcaatcttccttcaagaacctccattataacatctatatccttccttgaataatggttatatacgtccatagtaatccttatatcggaatggcccataatcatttgaattgctttatagtcgtgtacaactgcacataagcggctgcaaaatgtatgtcgttaaaaatccaaacgtttggattttatccggcacaattacgcaatacagaacaccaactcatggatttccgccggcttcgactttatcgacaagctgctttatctgagcaagagcatggggcatacatccctggacagcacacgctattattattcgatagtccctgcgctggcaggcatcatcgaggaaaaaagcgaaggcagtttcgatgacatcataccggaggtgccagactatgaagaataaaactgccgagccgttggaactggcgcactatatcaacaaatttctttccgagtatgcgccatcgcatctgacaaacagcgacaataccctggattcttacgggactgcccttacgctgtatatgggatacctggaaacgcagcgcggcatcacgccggataagttcagcccggagtgcttcgaccagcagcatatcgaaggctggctggaatggctgtccggggaaaggaagtgcggcgccgggagtgtaccgaaaaactcctcctctcaaaagtggagtatggcgtgtgttatggatatgtgaagcattgtagaacaattctcaaagatcttatccttttctttgacgcaatcggtatccatgctccggaagaagtaagttacacccatttagagcggttcatcaattcactggttggctggtccgcttccacagtacgcagcagaatcagcctggtacgcatgtactttcgtttccttttcctaaacggcgatatcaaggaaccgagcacgtcttggcctgcgcttaggggatatccgggaactgaagctttcagacattgactggcaggcgtgcaccctgactatcatacagaacaaggcgaaggagccgctgacactgcctgtccccgatgatgtgggctgggcagtcattgactatctaaagaatggacgctccgtcacggaaagcaaaaatgtttttgtccggcatgttccgccttataacagttttgccatcacaagcaaccagcacaatatcataaacaaagcactgtccgatgctgggattacataccgcggtaagcccagcggctttcatacattaaggcattcaccggccccctggcagcacatttttacggtattgtggaggaacggcaccggatgggtttcaagtttggagaagaagaacggctcctgcatgaactggacaggatgagtgtggagttcgactgccaggaagggcttcccgaagaacatcccagttgtcgtgccagcgcttcatagaattcggatatttcggcgtccacttttgcttcatagaattcggatatttcggcgtccacttttctgtcaccttctccagcgcttccagggctttctcctcgttcgcagcgtggtagatagttttcagatctgtggagacggctttccggtctttgtcagagacatatttgagtgtgttgcgtaccatatgcgcgatgcagcgctgctgctccgtcttcgggaatgctgccgatatggcctccttaatgcccgtgagtccgtctgaacagaggatgaggatatctttcactccgcggttcttcagctcattcaggacagagagccagtacttggaactctcattttcccgatttgtatacttaaaacttcctttttcccttccggcgtaaagccaaggatgacataggcggcaagcttgcggatcactttgttctcccagacagaataagatatccatcagcgtgtcggatatctggctggtggtcatgccttttgccctccgtcataactaccttgtgtacaggttgcttttctcttctcgccataataataggcctccttatgataatagattttatcatagaagacctactgcttgatagctattccaataaaaactttcatactcctaaataggccggagtacaaaatggcccccacaatatcgcggaggccacaatctgttattttaatgcttcataatcagcatccgtataatcttcttccagattccaattatcaaattccaactctctataatccattcccactgcttcacacgcacgcttccactctgtcgtagtatcttccgcaagtttctgcaatgcactatcataatctgtaatgctccgactcagcacgccctgcataattgcccctaggctcggctgaacatcttttacttctgaataaaatgcgtttgccttttcagctctctttgctattgtcggaactatctttgctgttgcatttgcaatcgtatagtagtccttcataatagcgtttgtcatatactgttcattaatttcaggaataactgatacaaacacaccatcctctacgcaactggactgatatccaaactcctcactataaagagccatcagataatccaccgcttcctgcggatgtttggactggctataaagtcccatccacggggaaagctctccctgctgcacatacgtgtctttcacaccatcaggaaccggaacagccattactccataattcaaatccggatcattaatcccccattgagcaatgcaccacattccttggcaaagaaatcctgcctgtccttgagcaaacagttccctcgcttccggtgcgctgatatttacagtatccggatgaatgcttccgtcatcttcaagctgagcaaataactgcattacaccttttaccgcatccgtatcatatggggccattccttgatccgtcaatactttctgagtagccgcaatcttgccacctgccgctgctgccattgatctggtcaaaacatccaaacggtttatctgttttccaccatcaatcaaaccgtaaacatttccatttccatatttagtaatttttttgcatgcttcgcgaaattctgaatatgtttccggaattttatctactcccgctgcgctaagcacatctttattatagaaaaacaggcactggattgtaggcataagctccgtaatcgtataccactgatttcctttatgtgttacaccttcactgaacgatttcggatcgaacttttccgcaaaattatccattacataatcattaatcggctgaaaccaatcctcctgaagcgctgtatccaaagtcattcccaccggaatcgggaaaagatcaggaccatctccagatttaatcatagtcacaatcgtattcttgaattgatctaccgtcaactgtgtatactcaatattgatatctggatgaacttccatatactttttatgaaattcttttctctgcggagcagatccgtcactccaatccacaatgcgaatcgtaacttttccatccgtattctgatccgctgaaactaccttatcacctacttctcctgccgtccccgaattacgcactgatgatttttctttcttctcatccgtctgaattgcaggcattgcacagcctgtagtgaccgctactgccaaaagtgctgctaaagcgcattgcccccatctcttcttcatgtcctactcctttcacactttgttagtgttttatatatttttactactattttctgcctaaatatctaaaattcttcttttgtcaactctttactgcacctgcaattccttccacgaaatggcgttgaaggatgatgaacagaatgataacaggaataaccgcaatcgtaccgcccgctgcaattccagtccaatctacagtattttcgcctttaaatgcataaagtccaaccgccagtgttctcgaagcaggattgtttaaagtcaataccaacggaagcataaatgcattccaagtccaaatcgtctccataattactacagtcgttgcaatcggtttgcacaaaggcatcataatattaaagaaaattctgaagaaactgcatccatcaattttagctgcttcttccaattccattggaatagaggcaaaaaagcttgtaaacagcattaagaaaatcacatgcgctccaccggcctgtgcaagaaccaaacctgttttggttcccgtcagatgcataccctttaccacttcatatgtgggaataatggtactgaccaacgggattgcaatgctgcccacaaaaattcccatcatcaagtttcttcccacaaatttataacgccccattgcataaccggcaagcatcgtaataatcagaaccaacactacagcaaagcacgtcacaactaccgtattcaaaaaataactgccaaaattagcttttacccaaatacgtttaatattatccaatgtcggtgcttgtggaatcaagcctaaacgattattaaaaaactcgttctgactcttaaatgatgcggaaatcatccaaagaaacggatagacccaaatcaacccgattgccagcaataccaaatggtttattcctttttttacccaactcataacctctccttatcatcaatttttcttatctagatgtactttgactccattcaaaatcacacccacaacaattaccactgctccgaagaaaagtgctgcagcgctggcatatcccagccttggcatcccgatttcacttgaaaatgcagagcgataaacataagttgcaattacatccgttgcataataaggtccaccttctgtcattgtttttacaatatcgaaaaccttcaaagaattgattacacataaagttgctatcactccccctaccggagcaatcaaaggaaggacaatatgaataaacatctgtacccgatttgctccatctactgtcgccgcttcatatacatcctttgaaataccttgcaggcctgcaagccaataaatcatgtatgttccgcaatctttccaaagcgaaatcagcactaacgacggcattgcccaagcagcatttccaagaaaattaattggtttcctcaaaagatgaaagctcattaaaatgtgattaaccggtccctgcactcccataataaaaatcatgataataccaaccacagatgccgtagtaacaacaggaataaaatacatggtacggtaaactccacgaccctttaatttctcatcgttaagcaaataagcaagaataagcgatacggccaattccaacggaacaatcataactgtatatttaatactatttaaaaaagcattccaaaacagcttatctgtaagcaatttcttataatttgacaaccccacaaatcgtgctgtccgtgttaatcccgaccagtcaagcaacgaatacacaatactgcagacaatcggataaccctgaaatagaatataaaagataaccgccgcagccataaaaagccagcaccacgcatttaacactaacttatcttttctttttctcttctgaactcttaattcaagctctattgtgttcgattccataatcccccgtctcccttccctataacttctttttcctggttgcggattccatcggaagtcccgtatcataatccaattgccgaggctcatattcttcattctctctctgtcttgtatacccctcattatcccagtctggtacaaaatctttcctccatggccgcatgcgccactgataacccctgtataaatctctggtgttattcatatgttcaatcaatctttcatgcatggcatttctggcctctgcataattttcatcgttaatcaggttattcatctcatatttatctttttccaagtcatagaactcatcactgtccagcagatgaatcaccagcttatatcgtttggatattgctgctctcataatctgcagcccgccgaacccatcatggtcaatctcatatctggtaaactctgtatataccacatcattgatttctttggatgtatcataaatctgcggaagcatgcttttaccttccagcagctttggaataggaagtccaaaataatccattatggtcggaacaatatcaatatgggatgccattgcatcttccacgcacccacttgcaccccccttgatgattaacgggatgtttgctacttctttgtacgctgccgcattttttgagaacaatctatgtgccccaagcatatctccatggtcagatgtaaagattaccattgcatccggcgctacctctttaatcttatcgagtacccgtccaatctcataatccacaaaagaattacagcccaggaataaagataggccatcagaagacttattaatctcgtcttttgcggcatgcagtttttttcctgcccaaagacgctgcataaatggtttcttagaaaggtcatcctgaaaattcggacaatcatcaaacttaaatccatcatacatgtgattaaacggagccgggcagagggatggaccatgaggctcatcataggacacactcagaaagaagtccttatctttatatgtctccagatatttaattgcacgctctgagcaccgatatgcgtaagtaaacttttctgaaaagtctattttatatgattctttcgaatctctggattttactttatcttcatcactcaactcatctaaatatgttttcatgtcataccagtagtctggattccaaccttccgggcaatgtccgtttccaaaataatccgaaccgtccagatgccatttcccaatatagccacattcaatattattatcactaagtctctgacctatcgtctttatattatctcccatagcgatactattggttaccatgccgtttgtatgcggaaacgtccctgtaaagattgcacttctggccgggccgcataccggctgacaggtatatgcattctcgtaacggattccctcttcagccaaacggtccaaattcggtgttttcatctttggattaccataacagccaaccatatctttcctggttgtgtctgtcatcaaaaaaatacattgtcttttcacttgccgcctcctctgttaattaagtttatcatgaatgattctgcttatttacgacaccagtatagtgcgtatagagctgtattcccatatccaatcataagttttacatggacaattctgtttttatctgttatattttttagcagaagagatttattataaggaagaaggaagtattatgataaatgtttcaggtcacctaagaaacgaaagacgcacaaccggcttcgcagactactctagtccactgtctatcaactgttgtggaatgcagattttcaaaacaaaagattactctcagaaccgttccgcaggcagagtcgattatcagctcatatatatccacaagggggccggacactattatctaaataaggaatggaaagcattgggggctggaaatattcttctctttcaaccgcaagaaccccaaacctattcctatttcgccaaagaccatcccgaaatttactggattcatttcaccggctatgactgtaagaatatcattaagaagtataacctccataacttttatattggagaacaccccctgttaaaaacccttttccaagagactatcatggaattacaactgaaaaagacattttgggaagatgttgttttaagcaattttcttcaaatacttgctatcatagcccgggcacatcaacagattctttctcctttaggaaatgacttttctatcgattgcctcgttatgcagcttaatcaaaagtacaaagaaaactggaatgtacagttaatggctcaatactgcaaattaagtgtgggatatttttctcacatatttaaaaaacgtatgggagtcgcacctatgcgttatctgaccgaacttcgagtcaacaaagcaaaagaactcatagctaccaatacaatgaacttgtccaccattgcccccttagtaggttactctgatcctctttatttcagccgggtatttaaaaagactaccggaattcctccaacagaattccagcagtccttgcttacttccaatacccctgagtggtggcccgatagataattgggtcactatttttttactattgtacattccaaaccgctaagggatggttccccatcctgctacatatagctggctactccttgtgtctgcagaaaatagtctattaactaatctaaatgagccccatactgtacttactggaggaatgaaaaatggttttcagcagccttgttttcctatttcactttctgcccctgtttttactgctgtactatatatgtccggcaaaatggaaaaacgccgttctgtttgccggcagccttatattctacatctacggcgtaaaaaatgagccctggtactttttcttatttctgctgtccgtcctggtaaattaccatatcggcctcctgctgggacggcgcagatggcctgaacgccggaaaaaatggctgatactcggaatctgctataacctgttctggttgttcctatttaaatattccggcttttttgcaggaaatctaaattggatcctccaaaaaatagggattggattttccatccggattccggagcttccactgcctgtcggaatcagcttttacacctttcaagccatctcctacctcgctgatgtttacagaaaagaagcctttcacgaaacttcccttatcaactacggcatgtatatcaccatgtttccacagctaattgctggtcctatcgtcacttacgcttccgtacgtaagcaaatccaccggcgtagccataacctgaaaaatgctgaaaacggcttgcgggaatttacgattggcctggggctcaaagttcttctagccaaccaggttgggcggctgtggagccaggtaggcgccattggctatgagagtatttccactccccttgcctggccgcgttcagctttcagatttactttgattcttatggctactccctgatggcaaagggacttggacaattgatgggattttctctgccggataatttcaactatccgtatctgtccctgtccatgaccgaattctggcgtagatggcacatgaccctgggcggttggttccgggactacatctacatcccgctgggcggcagtcgctgcggcaaagccgcaacgattcgcaatatgctagtggtctggctgcagaccggattctggcacggggcaagctggaattttattctatggggaagtgtcattttcctgctcatgttcatcgagaagatgggactgaaacatctactagacggctgtcccctaatcggccatctctatatgatgatggtcatcccactgacctggctgagctttgcagtgacggatctggtgcagatgaaaatttattttctgcgcctgttcccctttctcgctcctgaaaaacagtctctttattttgcgggagatttcctgaaatatggccggatttacgcgctgtccttgactctcagcctaatctttatgacacagctgcctcgtaaactctacaaacagtggaagcgctcctttctgactgcggtaatcctactagtacagcattgccaaaataataatgaatagacgttgcttttttattgtagtcggtgcataataattctatcactaaagaatggatgtgttattatgcgaaggaaaacaattgatactatcccggttttatctgatgccatgaaaaacatattatctgctttttcaaaaagccgctcccttccgtcaggactggtcaaaagagccagcattgtcctgcttgcgtcacagggggaactcaaccagaatattgcaccacaggccgggcttcattataataatgttgccacctggcgcagtcggttcctcgcggcgctcccagccttgcggaggattgaaatggacgccccggaaaagcttgaagatgagatacgggcagtcctgtccgataaaaaacgccccggtgccccgtctgtttttacgccggaccagatcatgcggatcatcgaccttgcctgcagcaacccaaatgattttgggtacgaagtaagccagtggagtctcccgctgttagtggcagaaattaaaaagcaggggatcgctgaacagatttctgagaaatctgtcagccgttttttaaaaatgaggtagatttacatccccacaaaatccgttactggcttcattcttcggaaaagacggaagccccggaatcttttgcgcggaaagtaaacgaaatctgcggcctgtaccagagtgcccaggaacaaagccgggaaggtgcacacattgtttccacggatgaaatgaccggggtacaagcgctggaacataaatatcctgacaagctcccattacccggccagtgcgccaaaatggagtttgagtatatccgccatggcacggccagcctcatcgggttctttgatgttgcaacgggccgtatggaaatgccgtatttaaactccacacgcacagaagaggattttgtggaagccgtgaaagcattggtagggacagacccgcaagccccatggacatttatatgcgatggcctaaacacccataaatcggaagcccttgtccgctttgtggcagaagcctgtgcccttggcgtggaactgggcaaaaaagggaaaacagggatccttaaaagtatggaaagccgggcggatttcctgcatgacccttcccaccggatccgctttgtctatactccgaaacacagttcctggatgaaccagattgagatatggtttggcatcattaaccggaagctgctgaagcggaaaagctgcctatcaatagaagaactggaagcaagcatcctgcgctttattgaacaatacaatcttacagcacacccatttaagtggacatatgccgggataccattagtaatttaatcactgatatttaaacaatgctgtactagccgttttctggctctgcgtttaccttatgaaaatgggcgcggacgatccgtttttgtacttccgattttaaattaggagcttacgactatgaagaaatactggtatacctcacttctggccttcagccttcttatctcagccatcgcgtctacgttgcccgcctcagtttacggcattgttacttctgtcttcgtccgggtatgcagcaatggtcaggaaacgactgaaaacatcgacgcagagctttctgccggaaaatatgaccgcccggaaacaagccaagctgaaaataaacgtccgcaggatccggccatccacggtactgctcctgtggttccaaaacattctgctcataaaaacgattcctcagaaagcgtttccatggaagcttcctcttccgacagcatagacgccacaccgggaccagcaacttctgcaccgcaaactcccgctgctacctccgtggggcccggctatatccccccaaaccctgacttcaccggcgtcctgttcatcggcgactccaggactgtggggctttccgaatatggcgatttaggaaaagccgagatttttgccaactccgggatgagtgtgttcaacctgtttgaatctaccgtaaggaccaaaagcggcaaaaaacaggatctggaagaagtccttttccaacagcaataccacaccatatatctgatgctgggcatcaacgaactgggctacgattacagcagtattatccggaaataccagtctgtcgtggacaccatcaaaacccgtcagccgaacgctgtgattgtgctgggagccaacctccacgtgactgcccaaaagtcctcctccagcagtacctataccaatgaaaaaattaaccagataaacagtggcatcagagctatcgcagaaaacagcgattgctgctatattgatgtcaacagcattttcgatgatgaaaacggcgctctgaagaccagctattccaccgatggctcccacgtgctcggaaagtattactctgtctggacagactggctaaaaggggagtccccggatgcctaaacctgtttaccaaaaagaaaatcttatgctgcactgtagaaagcagaaaaatacaaggaggtgtaccataaaacttgtaacaacattctccaaacaagttttctcctatgaaagccgtttctgcccttcctgtaggaacatatacaacctaaaatgggcgtttcgtatgtcctataaactgttttcccctgatattaccatcaaatatatcagcagatacctggaaagacctatccttgccatttctaggattgatgcctataatggagatactgtaaccttctattcaatactttgaatccagcactctcagacactcggagtgcgacacttttaacttttaaaggacagggttaaaaagagttgcatacatagaaaaagctccccatggagccataagtagaattttcctcgattgttggggcagcagaatgtgaatgctttccccgcggaaatgacctttactttttctaccaagtaaccggaattgctggaatttcacccatttctatggtattctgaaaaggtgaatccctgatacaaggaaatctggtgctggttactgtcggttcggcggaacatcccatgctgccggaacactatattgaatgggtactacagaccaaacaggtaaatcagcatatgaaggagggaagacttctttaagccttccctccttagactgtagacactgaactacagtgtctccttccttaactgcagacagtccctctggcttatcgccttcaaaactaagtgcatactccactccatccttatcagtaacaacaaacataaaatccttaatatcgctgatttttcctgttattgcagattcttcctctgtcgtgatatcattttcagatgatggaacatcatatatatcatccattttctgagaattaaccatctgtgagggttctatagaaggggctgctctttcctgcccagaataccctgtagccaacattaaaagtggcggcttttaaatatgctccaaattgtggtccaattactctcgctgcgtgctcatctatgactgttggctcctggtagtacaaatcttctacttacataccttcatagttagagcaatgttcttcagaaccttcacgattttcttgttttggtttagtctctgtcaacacctttattttcatttcctgacgtttttcactgttaagtaagtagtatcaaaaaatgtcctttggcagtttcggaaactctttgcggtagaaaatcaatcatataatatggctttttaagtatgtcatcattctttttgaacatatcctgcatttatttatctcctaaagttccgatttgtttctatatataacatattctcacataacttgcacaagaaagtgccttcggcacctcaactcccctagcccctcattcatgaggggaattagggcttgttttttgcgtcattttattccataataatctcatgaatgtgattcagaagatgctcagagactattacgaaatcattgaatacgatataaaacccagacctgtcgtcatggaaaacattgataaggtcattaactgcggggatccttcttatggtggcgccatgtatggctgtccccattgcggtaacctcaagttcgttcctttccgctgccactccaagttttgcccctcctgcggcgctaagtattccaatgacaggtctaccgctatgtcttttaaattaatacagtgtacccatcgccatctcgtcttcaccattgacgaatccctccgccgctttttcctcgaagaccgcactctgcttaactgccttttcgaggctgtttctgatgtcatcaaagaatattttttctccctgaacaaatccaaaaactttgtccctgggtttatctgtgtccttcataccttcggtcgccctcccggttggaatccacacatccactgtctccttaccgaaggcgggttttctgatgatggtgtctggcgcaaggtcacatatttcaattattcctacctccgtaaatcctttcagactgttttgttaaataaactggaaaaacgcatcggtccctcttttaaaaagatgaaagccgccgtttaccatagggacagaaatggattctacgtttatgccaagcccaatctttgcgacccagaatccattattaaatatgtcagccgttatcttggccgccctgtcattgctctttccaggattgattcctacgatggggagatggtgactttccattacaataagcatgaagacaactcttttgtaaaaaagactcttcccgccattgatttcattaagctgctcattctgcatatacctgaaaaaaacttcaagatgacccggtactatgggctttatgccagacaccgggagattgacaatcagctccataaagcagtcccaaaatccaaacacaggattctcctcgatttcaacacctggcgtaagcttttccttcttaccatggggtacgaccccctgcaatgcccaaactgcagacatgaaatggtctttctagagctgtaccataaacatgaacgggttcctctggatgaattatacaaaaggacaaggataaggcatggcctttatccccggtcccgctctgcttgactttctctcccatctgcttcatactacatttattacagatgggaggcagttgcaaatgaatcaaagatatgtggatgaactcagacaaaaatacatcaaaaatcctccagaaggaatgacacccaaactggtcagaaatatgaccgattctgatttattggatatgcattactttttaactgaagatgacgacctcgacgatgatggatgggaagaagggttctatatcgacctgttctaaatcaccgtctgttttctataccctcctttggcagaatcattagtttacataactttatttcagcaaggactttggtaagtaggtaagccccttacagggcttacccctctcagaaccggacatgcagctttcccgcatccggctccctgcaaagctaatacatctacagttatccgtatatactgacataaatacgtggccgcacaagcgggaactgtctcattagttccttatatccttccttcgtatagctccttctctgacttcttctgttcagccagtagaataacctaaaccataccacattattgaatgagttcaggcttcttgaattgtcagtaattccgtaataatgataataaccagtcagtacttcatttagtttctttactatcctgtttatctccagaaacctcatgtctcttatcatggcgtttatttccctgcttttctttgcaagctttttcttactggttttcctctttactctgaactttcccgtcctgccatgcgaacagtaatgcgtgaatcccaggaatgtgaacgtctccggcctcccttttccccggtctttccggttactttctgcgaatcggccaaattcaatcaaccttgtcttgctttcctccaattctagtccaaagtacttcattctgcgctttaagtgttcataaaatatttctgcatctgatttatattggaagcatcccacaaaatcatccgcatagactaccagccccgcatatcctctcatcactggctgtactttctccctgaaccaccatatcagcacatagtgcatatatatattggctatgaccggggagcagtccgagccttggcctgccccttcttctgtctcctcatatctgaaatctctcatgattcccgctttcagcatccgtcttaccagtctgataatggtcgggtcttttatccgcgattctatgaactttactatccattcatggtctaaatggtcgaaaaaccctttaatgtctgcgtccagcacccaattcgtcttttccctttccagcatcccattcagtctccttaatgccatgtggcagttccttcctgggcggaatcccatcatttcttcgtagaaatggggctcgaacactgcttccagtattcgccttagcgcttcctgtactaacttatcctcatagcaggatatactgagcgggcgggtctttccattttcttttggtatttccacccgttttgccggtttgggcttgtatgccttcttcttcattttcctgattaattcatctaagttttcttccaaatttacttcgtagtcctctttggtaattccatcaattcctaccgctttctttccatccatctccttgtggcattctttcagtaactctttattaatcagatgccctatggacgtaaataccatttccggatgttcgcttgacaactgtgatattctcgccaatttcgtttccataatttctcctgtctctgcgtacagattatgtttcctctttgatatgactttgcatggctgacctgcgaggacaggtctctctcgacttccaccgcttttttttgctgtgtactattcggccatccgacttctgccggccatttacggttctcctttctaccgttgttccgtataccgggcttacgcaacctgcccggagcctggcagacctccccagttgacttaaaatccttgattacatgaccagccttaaaaccccggggaagcagctgcattctcgctcttaacgactacagctgtgttgctttcagtgtataggagcacttctgccttcccaatttcattttaatatcgaagctatatacggctatgccctgcaatcccgctgtctacgcttagcaggcaacatcgctgctgtccacccaagactcgcttgatgcggtatagcttgtaccttacaccgtgggactctcacccactaagtttcaagcccttagctgggcgcaccctataatacaagaaatactggccactgcccaaccatgactttttccatatctgccactgcttcctcctcctctttcggccctgcccctatcaaaatagaccagcacttaaaaggccatattcttttgtaacttttatcaccagcaaatagttacccttaccagatatcactgagatggaaataaagctcaaaattatccttgatgtatgctctcctctctgtatctatcaaggaacatctatcccttgaccgcccccatagtaatcccttgggtgaaatacttctggaagcaaaggaacacaataatgataggaacagaagccagggcagctcctgccataataagtccaaagtcattggacatctcgctcagcttgctggcaatacccagggcaatggtcttggactcattctgggtcagcatgaccagctgcagaggatattcattccaggaattgataaaggtaaagattgccaaggcgccgaatcccggtctgataatggggaacgccacattaataaaggttgtcagttcaccggcgccgtcaatgcgggcagcttccagcagggaaacaggaatattctcagaaaactgtttcatcatgaacacgccaaagggccagcccaccacgggacagatcactgcgaacatggagccccacacagagtggatcaatcccagatccgacatttccttcatcaacggaataaggataacctgtttgggaagcgccatggcgcacacgaaaaggctgaatatcagtcttttgccccagaagcgtttctttgccaggacatagcctgccagggatgcggtaatacaggtaagtatcatggctgttgccgagataaacacgctgttgaacagccaccggatcgccatgggcatgcctatgccaaacagctctgtcttgctcttaaacagcctggcaaagttgtcccaggaaacagtggtgggaatccatttgaccatctcacccgacttgatgatgatatcgctcttttcctttacagatccggtgacgatccaataaaggggaaagaggaaaaacacagccaggaacgcaaggatgataaccgtgaccacataataaggagatactattttctttttgcctgtcatatgttccgtcctcctattctgttgttccgccgttcatgaccttaaactgcagggcactgaacagagcgatcacgattgccaggatgacacccattgcatcggcatagccaaattccttggttgtcttgaacgcaatctcatataataggtacataaccgtgctggtactgtaattaggcccgccggaggtcagcagctgaatcagggcaaagcactgaaagctgttgatggtagtgatgacagccacatacagcgtggtgggcatgatggatggccacttgatgcgccagaatacctggaagctgttggcgccgtcaactttggcagcctcctccagggaactgtccacattgcccagggcagctacatataggacaatgggctggccaatggaggtagtgaacaggatcaggatgatacaccacaaagccatggattcgctggcggtccagggtagaggctggcccccaaagctcctgatcacataattgagaagaccgtcatatttgtcaaacatccacttccagaccacaacaaccgctaccgaaccagtgactaccggcaggtaaaagacgcagcggaaaaatgaacggataccggaacgcattctgtagatagaggatcctacccatagggagaatgcagtgacggcgggaactgagactgccacgatgatcacggtgttgacagccgatttcaggaatatcttatctttaaaaagacggatgtaattctctaaacccacgaacgttcctttgggatccgcaaagctggcattggtaaagctggtaataacccccattgtcataggagtaatgacaaatcccacaaagaaacacaacgccggaagcaggaacagatatgagaccatggtctccctgcgctgaaggaccatactgcgcgccggcgccttttccttcccgggccttctttccttttgcttggaaacagttgttttttccatattctttcattcctctctaaagattggttcaaaatctccgttctgaacagatgcaagaaacatcccatccaaacatgctctgaaagcagattccctccccccgcacccggcagaggaagggagtccatggtatatttcagttagttgctgtttgcagatgcgttaaactcatctgctgctgcctgtgggtcggtaccgttaaatacctgctgcagcatgttgaaccacagaggacgcatagcggcaaatccggcgcgtgtgttgtaatatgggccatagtactggctccaggaagccagcatagctttgtgctcgtctccgggatataaatctccaaaggaggtgcggaccgggaatgcattggtcttaaccacgctctttggtccccattcaggatcatcacagataaatttaataaactctttggccgcggctgcgcgggcatctgatttattgtcaaatacacaaaaaccgtttaccaggtattccagagaaggcttgccgtcctcggatgggaatggcactgcgagctgggtataatcttcagacgcgtaggtaatctctgcggatgtgccaaagcagaaggtcatggcgcaggtctcctgctggaacttctgcagttcatcggcggctgccatatcaaatccagcgtcaatggacttgttatcgtacatttcctttaaaagggcaagggccttaacgccgtttgcgtcaatgttccactttccgtcagaacctacgatggaagaaccgtataagttgttcaccaacgcacgggtaccctggtcgccgccctgtccgccgcagtatacaatacccggaacctgagtgggagctgcatcccgaagggcttcacacatcttaacaaagttttccgttgtccaggtacggtcgccttccaggttcacgtactgaagcgcatctgccttctccagcgcttccttatttagacccatatagaatggagaggaagaaatcggatacatccaggctgtgccgtccgcgcccacgcaggtttccacaagtgactggctggtaaggtcgctcttaaggtcacccagcatgtcatccagggaaaccaggtatcctgcctcgccaaactcaatgatacggcctggggcatcaaaaaggatatcgggcgcagtgtctgaggtaagggctgctgtcagtttatccggtccggatgtaaagtccaagtattcaaccttaacttttatgtcggaatgagaggtgttaaatgcgtcaaccacctcctgctcataaccagtgtctacaccaaatgtagggaatgcccaccatgtaatctccgtcactgctgcgctagattcttctgtcgattccatagctgactctgtcacagtagtctctgccgttttgtctccactacaaccaaacagtactccaaccgctaatgctgttgctaaaccaagagctaaattttttttcatgacttctcctccttgaaaatattttatatcaggtaatcgcgagactcggaataccataaattctccgccttttggaaccgtctttctatctctcccccttgccaatccttgaatttacatattctctctttacaaaatttttgctccatatattcaagccaagtttttctatacaacatgcacaaactccaatcaggtcagcctcgcaatatcctaaatatgttatatatttatataatatataaaagatattttttgtcaatatttctttttaaaaagaaatttttttctattttccaaagaaatttaaaagtaaattctgcccccctaagcttatatttcattccaattttataaattacttacttctgatcaatcttatctctgtatcgttatgggaatcatgattttcattatgaaatttaaacatttaatccgggatgacaaaaagtcatcccggatggatttaaaaactatctgtctaggacaaacattgaacactctatcagcaaagacttatctgcgtctcacctcatacttgggaaaacacactttccactaatcaggtatttcagtatagacaacttttctctgcgaaggcaggtatctatactcgaaagaaaaaacgcaaacaaaggaaccttaaaagatttttactttttattgttttttcggatggcaggtgatataatgcagccatgataccggagacaattgaatttaaaaagttggaaaaatattataccaaagtatgatgtgctgttccatgtgtatattactgtatgggcgaagaaagcgtattccggcaccgtaccaagagcacataggcagttgaccttccattttccattataatatcccacagctcacaggctttcacctttccatgagtctgttcaggcgtatgctggagaatgaaaaagtggccggcattaaatgttcttccgccccggcccaggacatcctgcgctttaagctgaccggtggaaaggattttctcatattcaacggaccagacgaatattttatcgtaggccgtctcacgggcgttggtgcagggctcggcggcacctacggcgccacgattaaattatattaaaagatagacaacccagctaactagggcaaatgggagaaggcgcagatggtgtagaatcttatggccctgtctcatgatatcaagcaggccgaagcagatacaaaaagtctctaaatccaggaggtacgctgatgaaaaaaaaacatattgtatgctttggagattccaacacccacggttaccgcgcttcaaacgacagccgctatgatgagcaggagcgttggacctgtcttttgcagaaacagcttggagacgattatctgattatagaggaggggctgtctggccggaccacctgtttccctgatcctattcacgagggactatctggcctagactatatctatccctgtctcatgagccacgagccggtagacctgttggtcatcatgctggggacaaacgataccaaagagcgttttggcgcctctgccacatgcatcgccttgggcctaaagcgcctgattgctaaagcagcttccatttctgatgcatggcatatgggaaagcccaacatcctggtggtcacacccaagtctattgacaaacgctatgtgaccactccggttggaaaaaccatgggaataggttgtgctgagaaatcagaatgtcttgccgaagaatttgaaggaatcgcctccctaatgggatgccattatctggatgccaatgccgtggtaacggaacagaaccactatgactatatgcatctgacaaaagaggggcaccaggaactcgccaatgcgctgtcaaaggttatacgctccttatttatctaggctttaggtgtttgataaacgccggaacccattagttttacgttgataaggaagtattcacaacaacttatcatcaacgctgacaaacagggtgcaattaaaaacagagaattgattgctttcaaaaataatcaattctctgttttcaactacattcctctatgaaagctgaaagtgttcctgatttgcaaaaatctaacagacttcacgataagcatattactgtatcttttgttatagaatttctgttttattatattccttaatccgtggagtttaattattatttcatgctgcaatcactttgtttatgcggtctgtcgatacttttaaaaatattaacaatatcacccatttggtgatgttttctgatacaatattccataagaaaactatggaggcagtcatcatgaaaaagataaaaattgagtttaccaatgagcggctcatcccagccagcggccttgcagttgtcggtgccattctcggcaaaagcgacttcgtaaagcggtgcaaccgtatggatgtcaccccaaaccgttcacagcaccagatcaagaacggggatgtcctgctcacttatatcggacttctcaccatggggaaacctgcttatgagtccgtccatgagtttgatgacgacccggatttttacaaatacgcacttggcattgtcagaagcatcccttctgaggagacgctgcgccagcggatggatgacattggctcatccatgcgttcttatatccttgcggaaaacatcaagatgctcagggataatggcattgtaccgggaaaactcccgaacggttatgtgcctgtggatattgatgtcacgccctttgataattccaagaccaaaaagcagggtgtctccagaacttataagggatgtgacggctattcgccgataatggcatatattggaacggagggctatctggtcaactgtgaactccgggaaggaaaacagcattgccagaagcatacccctgagtttttacgggaaaccatccgtatgtgcagggagattacggatgaaccgctcctgatccgccttgattcaggaaacgatgccgcagagaatatcggtatcctggtggaagcgggctgttatttcgtcataaaacgcaacctccgcagggaaagcaaagaggactggctgcagatggcacaggaatacagccaagatatcgaaactccccgtgaagggaaaaccgtctatatcggcagcgactggaaaccggtttcctataaaacagcggatgatgcggaaaaaaccatcaccgtccgtgccgggtacgagatcataaaccgtaccattgataaatatggccagttccttctggaaggcgacattgaagtcaatacctggtggacaaaccttggaatgacggaccgcgaagtcataggactctgccatgcccacggcgaatgtgagcagttccatagcgagatcaagaccgatatggatatggagcggctgccatccggcaaatttgagaccaatgagctggtactggaactggcaatcctggcctataacattctgcggatgatcggacaggaaagcatcggcaggaagggcacagagacaaaacataaagtcaggcgcagaaggctgcgcacggtgattggtaatatgatcatgatggcaggtcacgttacagagcatgcccggcagttgttgttaggccttggccgaagtaatacatggcggtatgcttttgcgcaggtgtatacagcatttgcggatttccggtcataaatgtcatcctgccaggtagcctttgagaaaccaaggggaaagcatgcccttttgaaaggatttctagtgtgagagtatgaaagtttttctgtaaatagctattaagcattaggtcttctatgataaaatctattatcataaggaggcctattattatggcaagaagagaaaaacagcccgtacacaaagtagtcatgacggaggggaaaaggaacatcgtccatcagctcctggaagagtatgacatccagactgcggaggatatccaggaagccctcaaagacctgctggggagcaccctgaaggagatgatggaagcggagatggatgagcatctcggctatgggaggtcagaacggtcggattcggatgattaccgcaatggctacaagcccaagcggatcaacagcagcttcgggagcatggacatccaggtgccccaggacaggaagtccacgtttgaaccccaggtggtaagaaagcgccagaaggacatttccggcattgaccagaagatcatatccatgtatgcaaaaggcatgacaacccgccaaatctcggataccttgatggacatttatggttttgaggcttcggaagggttcatctcggacgtgacggacaagatactgccgcagattgaagactggcagaaccgcccgctggaggaagtctatcccgtggtctacatcgacgcaatccattattccgtgcgggaggacggggtaatccgcaagcttgccgcctatgtcatcctcggccttacgctggaaggtaaaaaggaagtcctgagcatacagatcggggagaatgaaagctccaagtactggctctgcgttctgaacgagttgaagaaccgcggtgtgaaggatatcctcattctctgctcggacgggctcacgggcattaaggaagccataacggcggcattcccgaagacggagcagcagcgctgcatcgtacatatggtacggaacacgctgaaatacgtctccgacaaggaccggaaagcatttgccacggacctgaaaaccatctaccatgccgcaaacgaggaaaaggcgctggaggcgctggagaaggtgacggaaaagtggacgccaaagtaccccaactcaatgaaacgctggcatgacaactgggatgtggtatcccccatcttcaagttttccatggaggtcaggaaggtgatctatactaccaacgcgatcgagagcctcaactctacctaccggaagctcaaccgccagcggagcgtgttcccgggcagcacggcgctcttaaaggctctgtacctggccacgttcgaggcgacgaagaagtggaccatgcccatccgcaactgggggcaggtctatggggaactgtccattatgtacgaaggcagactgccggaataagagcgcacaggcataggtgtacacctatccggaaaggagctttccatgtatggattttcaaaatacgatgctcaggacaggtacgacagctataatactgtacaggtgaagttaaaactgaatatgaagacagatgcagatatcctggcctgggtcagacagcacaaatatggcagggacacttccgtccaaggggccatcaaggccctgatacgggaagacatcgccagaggccaggccgatgggacacaaggttaatccctctgcattttacattcgttggctgtctgcagctctgacagggattccatgatagacaggtaatcgatcccctccacaacagtccctgtgccagggtcaaacagttcatcgtctgcggtggctttcgggtcataggatttcagttcactgtcataccagctatagatatcactgtataagtcggctgcatgatccagcagggactgcagtccattgatctttgccctgatatcttcaggtacaaagggatcgtctgtttttagcttcatggcacacctcctgatgttttcctgtaagaagtgtaccataatttgatgggattttccaatacatcttgacagaatccaaaagcatccgtatagtaaaggtaggtggtcacgacatccacctacctttctcattaacttatcatagaagatctcaatttacagactttttttcatactctctctagtgttcctaaccgtcatttggaaccaaaatcaatccagatacattaaaatactgtctttgaagaactatttatcaagaataagccaatccgatttgggattagcatcataaaacaaccagtttcacggattcaggtattacacagtattactgcaccagtcgcaataccagtcaatgcatcaaccttttctcttccatcagtgtcacccacttgtttttgtaactctgctgctaccatttctttatcgtatttcagtctttctaacattggcttatgcctaaactcaaagtttctaaatatatcatcccaagtaaacgcatacacctcataattttctgatttggataccaatccaatttttcctttatcctcgaatactttgtattgacttttaatgtattcatcaatttccttgcagacagctataaatttccatttacgaaattcactattaaattgtggctgtcttcttacaaaatccatataatcttctatctgcctcaaaactttcttcgtcaatggtactttaggtgcttttagttctactacgatgttttcgtctagtaccgtttcaaacgtgttttcaaccgttcgtgtattacacataaaaatatccatacgacgctcattctcaatgtctggttctaatgaggccttaatattttcctcaccatacaaaatatttgtatattgctgcaatgccttttgcattctttgatcagcactggccaaattatattgctctccaaatagccaaaactgtctctccactattttttgtatatggtcacgctcatttgcaaactgtgttaaatcatatacaatactttttaataattctatcactttataacgttcttcaatgaatttaattgtttcaataatattttccaaagaagtttttttcaatatctgtgaaaaatcatgtctttgttgtggagatagtgttgttgctaagctaatttgtcatccatactgctctgcttgaatgtcagagacttgctctgtataatgtcaatgaacattctacagaaagagaaagtcacagaagaccctcccgctaagttgtgtcctctgagactcatgataaaaccatgattattgtatcagagtacacggaatctgacaagggggatggcgtaattactatccattgtaacgaaaattgtatatgccccatatgccggtcccctgtcagccaccgtgactggaaaccacgaatcatgaagctggatggcggacaggtggtgtggctgatgattgagcggagacggtgtgacaatgagggctgccggaggcttcacagtcttctccctgataagctcgtcccttataagcattatggctccgaccttatcgctgccgtgctggatggtgatatcatgccggaggataccatgaacgaggattatccttgtgatgaaaccatacggcggtggcaccactggcttatggcaaacttctcccggacagaaggttactgtcggcaggctatgagcctcttaaggaatcccggactggccggcgcggccattttggaaacaattaggaaatcctgtgacaggtggcttcccgctgtcctgcgcatggtctataactcaggcggtttcctggtatccgtctgaggacatcttatatgcacccactttgttttggctgtcagcgctttctgcggtatgctgtccaaaaaggaggtgcataccatgcagacaatcaaaaaagatttaaacgggagggataacgaggcgctctcacgctacaccttgatcgcgccactgcttgatgagagcctggatcccgccaaacgcagccagctgcgggaagaagcagcctcaaagtcaggcttatccgagcgtaccatcttccggtaccttgccgcctatgaagaaaaaggcttcgagggtctcaaacccgtcgtgccggctcaggcggttgtctccgggaggctgccggataattaccggaagattgtggagcaggcaatccaactgaggaaggaagtacccaggcggagcgtggagcagatcatcttcatcctggagcaggagggctgggcggagccgggcgtactcaagcgccctaccctgcagcgtcacctttataaagccggtttcggcacgagacagatgcagacatacgcaagcgcacgcgaaagctcgtccaaacgtttctgcaagcccaacaggatgatgatgctgcaggctgatatcaagtatgggtgtaagctccccatagggaaaaacggggcgatggtgcagacatatctgtcctccgccatcgatgaccactccagatacctggtccattcccggttttatgacaaccaggaggaaagcatcgtggaggataccttccggaacgtcctcttgaaggccggggcttgtgatgccgtatactttgacaacggttcgcagtatgtggcaaaacagctgaaattctcccttgccagacttgggattacggttcggcacgcaaaagtccgcagcggaaaatcaaaggggaaaatagaaaaattccatcaggtggtcgatgcttttctcagggaggcccggatccataaggtcaaaacactggaagagcttaaccggcactggaaaaactacctggaggaatactaccataagcagccgcacgagggcatccgggagtattatgagagccttggcatgcccgtcccaccagaagggatcacccctctccaggagtggaaccgggactgccggcctttaaagttcctggatacatccgtagtggcggaagcgttcctccatcatgaagaacgccttgttgacaagggcggctgtatcagctttcagggccgcaaatatgagacaaaaccgtcccttatcggtttccgggtggagatttcctatgaccctgcttcgccggaaaccatcacgatccgccataaagggattgaaccgtttaccgcaaagccgctcgaaatgaggccgttttgtgataaaaaagaccccctgccgatttccatgcaggaaacggagccggataattcccgtatgctggaggcgctggaaaagaagagcgcagcatccaaaaagcacatggcagatgccatctctttcggacagtacaggaaggatggtggcagcaatgtataaagctttttacgaaatgcagcgtctccctttcgtgcgcgatatcccgtcggggatgctgtatgagtcaccggcgatggcggacacccttgggcgcctgtcttatgtggcagaccgccagctgttcgccgtggtgacggcggatgccgggtgcggcaagtcaacgctggtgcgccgttttgtggagacgctccccaaagaggaatatatcttcctctacctgtcggactccaaactgaccccaagatggttctacaaaggcatgctcgaccagctgggcgtggaatcaaagttctaccgcggcgatgccaagaggcagcttcagaaggaggtggagatcatccgcggcgtgcagggcaggaaagtcgtctgcatcctggatgaagcacaccttctggaaaaagagaccattgaggaattccgcttcctgctgaattataaattcgattctatgagccctatggcactcgtgctcgtcgggcagacggagctgtgggataaactccggctccagcggtatgcggccgtcaggcagcggattgatttaagctgcatcctgccccatcttgaccgtgcgcagacggaaagatatatccgttcccaccttgcgtatgccggaggcaggcaggatatctttaccgataaggccatggacgagatcttccgcgagtccacggggatcccaaggcgcatcaaccggatctgtaacggctgcctgatgtacgccagccagcagggaaagcgtctcacggacgaacatcaggtaaggtttgtcctcgaacatgagatgctgggaggtgaggcctgatggttcagaacaaagaacatcgcccggcagagacctttgctgaccgcatgcgccagtccggcgtattggatctgctggaggaatacatggacatccgggacgaactggaggaagccctcaattccatagaactgctccatggggatatcaggatcgccatggatgacatcagcggacagcttgaagatcttcaggagcatatggataacgtcagcagtaaactgcgcaggttcaaatcgccgcatgcaaagcagtatgaagttgtcaaagatcaaggcgtgcttccatttgactgaaaagcctatgcaggagcactctctatcaaaacgatggttttaagggtggagaaatccacccagaagccaccgcaatgactgacatgagttagagcagcctgctgaaaaatgaacaaatctggtcagcgtcatatcaggaggtcagtaacagagatagttctaccaactgttcaattatccccaatacattttcccgttcttcagaactcaacaataaattaagaaaagctagtagtgacttctcctgaaccggttttaatttataaaatatttgcggttctaatttatatatctcagtcgtaactttttttaaatctttttttcgcatttgcccgtagatatcatcagtaaattgaggaaatgtctttttaacatttaacattttctctacttcggcatctgctttttcggttaaatacactcctatcgttttttctataaaattctgaatagaccttcgtaatgcttttaatatcttcttttcttcttgggaatcaaataggcctatttgatcatcatcttgattcgttgtaacgtcttccttatcatcaaaaaattctgattttacaaatacactatggttaaaatcaatagtattccgattaaaagttgttgtttccctaccttttagcgcatctgcactatcgaagtaatagcagcaaaatttttcttttatagcttcttgccaaacaaccaaatttatttcaaaacgataaccttctatcgtaactaaagatttactacttaaatcagtatttatatattttttgtaatcaatttctttatcattaactactatgctaacattcttatttttaaataagtataaaaaccacgcaaactctttcaacaagaaaggctcaagcacttcaaaactcatgttctctacagtcaatgatgtaatattattaaattttactttcgttccacatatttcatttttaactatttgaggatcggtacaatcaacaacttcttttttgttattggacatctgtatactatattctttgtaactcgctccatctttataaatagtagaccattctacattattagcaaatgctgtaaatgaaaaacgccctttacctttattggcttttgccttcattttcaatgataacaagtttttcttagaagccaaaaatgcaccaaatgtttcagataaatcatcataattaattccatcgccattatcttttataattagctcatcaatgccaaaagcaacattaggactatatcttacactcactgttgtcgcatgtgcctcaaatccattccatatatattcacagatagcttccttataatcatttgttattccagaagtttcaatactctgattttttacacttaaaggaataatcataacgctctatctcctctcattctgacttattttcatcatatcacattcatattcctttttctatctaaaatcaaatagataatgtgctttcaaatgactttataatcgttttgccgcagagtatatcttttgccagatagtatccacttttgccaaatagtatgggttttgccggattgtatcttttgcccgacaaaaccctcattttcaaactctctggcattatccccgtccccacttccggggaaacttatccatctcaccatccacaaaaacacaactccatttcccgctaaaaatcccgcaaacccgcctagaatcaaggtttccgcacgagcaacgtgacggtctccacatgcaccgtccccggaaacatatccaccggccaagcctccaccgcccgataccccagcttcttcatatacctcacatccctggccagcgtttccggattacacgacacatacaccacctttccggctcccagctttcctacggcgtccataaactcctccgtacttccgcttctgggaggatccatgataaccacatctgctttctcaccctgttcagccatattcaccagaaaacggccggcgtcattacaataaaaacgaatattatctattccattcatcttcgcattattaacagcatccctgaccgcatcctgattcagttccactccaataaccttcccggcagccttacttgctatgattccaatggttccgataccgcagtacgcatccaccaccagttcccgcccggtaagaccggacagtgacaatgccttttcataaagaatttctgtctgcacggaattcacctggtaaaatgactttgacgatatacggaaccggcatccgcacagttcgtccacaatatatcccttgccatataacacatgctccttatcacccagaaccatgcttgtccctcttccgttaatattctggacgatggtggtaatctccggatgtttctcccgcaaagccttaacaaagttattcttagacggaaacactggagatgccgtaaccagcactaccataatttcccctgtggaaaaacccttgcggattaagacatgtctgagaagtccaaagcccgtatcctcatcataggtccgaattttaaaagatttgagcattccgcgtatagtaccgatgatttcatccgccttctggttctctataaggcacttctccacaggaactacatggtgtgtattttcttcatatattccggaaatgatatttccttttttatctctgtcaaatacagcatgaaccttattgcggtaatgaaatggatccttcataccaataataggcttaacaggacagagcccttttagcagttcctctacctgcttctgtttgaaatcaagctgcttagcatactccatatccagcagctggcagcctccgcacagattcagcaccgggcagatactgttgctccttctggttccccgtcccccatatgaaccgcctcttttggaatcctctctccgatatccagcacttaatccccttccatcttgtttttttggtgcagacaatccatccgtccctttgcgctctcttggcaaactgccatccttgcgtttttctccactgcgctgtttggacaaagcatccccatcttctgcaaaccgtttcccgctcttacccacaccagtcttaccttctccgtccctcaccttatgtttactatcctttgctctgtctttatctccatctacggctttcctgctttcttttcccgaacctgtatccattcttttagccgtctttccagctatttttccagccatccctctctccatcctttcagccatctttctatctatctcctatattcgtccataattttctacgcctataaccatttccaagtcacttcaacttcattcaaaaatacctaacctccctcaaaatcaaaatccatatggccattctaccatatatttcccctaatgtataaccatataaactgaataaatcacatacctgctgtcagctaacaagtcaacataaccttttaccctccccattataagggtcctatctcgtaaaagtgttcatgctgccggatactacccccatcccccacacaaaccctcaaaaaatcccaccaccaaacacctcaccctttcccgcaaaaaaggcccggcatctcccgcagcactgctctgcattctgcaatgccgcgggattacccagccattttacacccattatctatttcagtctgtccggcccttttctccgtatccggccatcatcaaaccgctctcgtaacctccgccagccacactctctcatcctcatccaaatatggactaatcttctcatacacctgttcatggtaccggttcagcagttccacatcccggtcggacataatccccctgtcaattacctccaaatcaacaggaacatacgtcaggtactcaaaccgcaggaactggccatattcattcttttcgtcctcaacacacaaaaccagattctccgttctgattccgtggcttccctcaatatacacgccaggttcatccgatgtaatcatacccgcttccatcaccgcattatcctggcgctccgggaccattttgaagcggatgccattggggcgctcatgtacgctggacagatagctcaccccgtgtccggtgccatgttcatagttaagtccccgtctccacagcggctctctggccgcataatctaggctgagtccgcggcagccatggaggaacttaacgtctcccaagcgcagcatactcataagcaccaaagtaaaatgttccttttcctcatctgtcaccggccccatggcaatggtcctggtaatgtcggtggtcccttcataatactgacctccggaatcaataaggtacagtcccctgggctccagagagatattgctctccggtgtggcggaataatggcacatggctccatgtgcaccatatgcggatatggttgcaaagctcaggcctatacacccctcctggtccatgcgcagcttctccagataatccgacacactgatttcatccatgggaatgcgccccatattcttcttcagccagtagataaacttggtcatggccacgccgtccttgatatgggcccgcttttcattttctatctccacatcatttttaaccgccttcatggaagcagtgggattcattctgtcgattaccttattggctccgttaatcaagcggtaaacggcatagttgaccctgcatttctccagcaggaccttttcgcccttaagctcctccaccatgtcatatactccgtcataaggcatcaccgtgacacccatccgttccagatactccctcacgcttatgtcctccgcatcctccagatacggataagcttttcccaccagcacactgctgttgacaaacaggtacagttggtccatggtcaacagcgcgtacgacagcaccaccggattgtacaggatgtcgttgcctctgatatttaacagccatgctatatcatccagggaggtaagcacatggaccgatgcatgggcctttttcatagccgccctcacatccgcgatcttttccaatgcgctctttcccgcatatctctcatccagaacccatgcaggctccgccgacagctcaggccgttcttcccaaatcatgcctgccaggtcttccccgtaggaaatacgcgcgccccgctcctttaacagttcctccagggcaagcccttcggccgcatttactaccctgccgtcaaatcccaggcagccgccctcaggcattttgtcgtccaggtacgctcccagggagggaacgccctcctgtcccattttcatcatggtcatcgtggaatcctttagctgggcagctgcctgcacatagtagcgtccgtctacccaaaggcatgcttcgtccattgtaaccagggccgtacctgccgatccggtaaatccggtcatatattccctgcatttgaaatgctctcccacatattcggattcatggaaatcagccgtgggtatcatatacgcatccattccccgctctttcatcaatttccgcaatgcgttcagcctgctctgaatcacaatcatactattatccttccttccatttctttctgtctcccccgcacctatttcttcctcatggcatcctctatagccgccccaatgccttcattgtaagtaggctgcgcccgcatggcaaaggacatttcctctgcgctcagtccgttggctatggccgtggctatttctccaatcatatccgtggccctgggacacatcatctgcgcccccacaatggtgttggaatacgcttcaaataccagacggataaatccattttccccgccggttatgatggattttccattttctctcatggagaaatgcccgcagcgcaccttcagccctttttccctggcaatttcctccgtgatgccgacggtggcaatctccggatccgtatagatacagtttggcacgattggaagggacacatacatgccattgggcactacctccagcttaatgctgtggggtcttccggctatcctctccaccacatatgtgccctgggccgctgccacgtgggccagctgtgttctggcggacacgtcaccaatggcgtagattccccgcacgcttgtctcaaaattgctgtttacggcaatcttcccgccttccatctcaaaagaaatgtccctgcccaaaagcttttccacatttggccggcgcccgatggccatgagtatctggcctgctctcattttaacgggctctccctccccgttgggagtgatgacgcagctgagtccgccctcttcctccagtatctcagtaaccgtggcatcacagtacacgtcaatgcccttttggcgcagctccttttccagctccgcagacattacatcatccatgggcgccatcagatgcttctgcttctccacaatggtcacatgggaacacaggttgttgaacatggtggcaaactccaccgcgataacgcctccgcccatgattgtcagcctgtcaaaattccagctctccgctgccagcagcctgtcgctgttccatacgcctgccaggtccgcgccgggaatccggctcatgtaggacaccgcgcctgtggctatgatgactgcgtttccgcggaagaattcccggccgccttcctttagctccacctccacggtcctgtccctgcgaagcaccgctgttccgtaaacaatttccacattcagcttttcaaagccatattgaatgccatcccggtatttaaccactgcttttttcttatacttctgcattttcccaaaatcaaaggaaatgaaatcagtagacacgccaaattcatcgcagctctgcatcatatgaaacatatcggaggcatgcagcagcgccttggtgggaatgcatccccggtttacgcatgtacctccaatcttctttgcctctatcaccacaaccttgaggccaaattccgctgctttaagcgctgccgtatagccccctggcccggctcctataatcactacgtcaaattctcttgccatacccgttctcccttatgttcttaataaattattcttttaaattatcttgattacattatgttttaaataatttcttccaagcatttcttcaaagaaggcgaacctaaatcaaactcaaatgcctgcaggccttccatatcccgtcccggtcaatatcatctgtaacataatccgccacggtcttcagctcctccacggaatttcccatggcaacaccgatgcctgcctcacgtacaatctcatagtcattcatgctgtctccaaaggcgactgtccgctccaggcctatgtcatagtactggcacagccgtttcagtccctctgccttggaggcctcccgttccaccacatccgcccccatgttccccgagaacatgggaaatttgaattcaggaaaatggtcctccagctctctggcgccttccggaccgcctatgtacaccaatgtcctcaccggtatatccatcagttcccatccatccatgaaattgcgttccgaaacaccccagcgaagccggtccatgcggactacgccctccgggtgtatataataatcctttccctcctggctgacgcccagggaaattccgtgggtatccccatattccagcaatgccctcagccggcccttgtccatcagatgttcaaagaggacattgccctcagccacgacccgcgttccgttcatgtgtatcactgcgtccggcataatcatatcccggtataccacactcatatcatggtccatgttcctgccgcttcctatgacaatgaccgagtctttccgcagcagctccagggctttcatagcgctgtccggaattttccatgtcttatggtccagcagtgtcatatctaaatcaaagctgacaatccgctttttcttacttggtttctgtgtcatttttaaattctccgaataaattaaaattaggtcttttcaaaatgaaaattatctgatataataagtgaggttcgagaacggagtatggcgtagcttggtagcgcgctcggctgggggccgagaggtcgcaggttcaaatcctgttactccgattttttcttttaattcataggttcctgatgcttatcggtgtcaggaacctttgtttttttgattacctttctgcaatatattgattacctgttacccagattgggcatttcagcattaatacgcgatatgatttcagtcttttcctcaatcccgctaatatcgtatgtataataccgttcattcacatcttccgtatgtccgagaagtgctgctgtagccgatacccccttacaccgctttttagagtttaccgtcctgcggaatgcgtaaatccccttttcactgtttcctacttgtctacatttgttctttgaacaggaggatatcattggcgcatgcactctcccgttctcatttaaaaaaactctgactcatatccccattgaacctccaatgtcctttactcgtttaagcaaattcctgatttcgtttgtcatcggagaaatacgcgctttgccaggtactcttttctttgttcatttttactttctcttgtacgtatgacaggtcaataataccattttccagggcgtaatgcaatatgcccaaattgttttctgctttcatcatcacttatcaggaaccgtgtatacactcaccggccgtggggtggggggctactcttgtatctttaattttatgtctgttaaatatatagggtccgacatttttggggctctcggacactttttttcttcaaattctgcggtatagcggcacacaaataactcccatcagaaagaacatcggataatacctccgcatcatctggctccatcttatcagacgaactaacgttgcggacatataaacacgaacagcaccatggaaggcctttggaatatgtgtcagataggtcactgatggtgataaggcacatcatttgcctggcatatttttcggatcaattctcttgtccttagtgctacctgacccatcaggactggcttcccatataaatattcataatgttacctttcacttttctttattcctcaaccattccaatcaggtcgaatttctccgttgaaacaatgacatcatacgattttttctccggtatctcatacttcacccagatggttctgtcggaaagattgtaataccatccggttccggcttcctcccagccgtcccttacaagataacgcgggatgcgctcgccgtcaaccgttacccagaatgcacctttttgcttgctgacaagccggattgtaactcgctccaatgggcattcgtaggttcccctggtatcaaagtgaattatcgtctgattaccggcagttacattaactgcggttttcgcgtaaacacccttcttatagtcctccgtgtgtccgtcatcgtcatagaatacaaagctggtgtccgtatccgcgctgatcaggaaatccgcatgacgcatcctgtccgacataatatgcttaacatcctcgctggtcacataaaccgcacttcccctgaggaacatgggaatgctgcccagatttaccggaagctcgatagtctgaccgcccgaatactccttcaggttgtcattcatgtcgaaccatctgcatcctgacggcagatagatagttcttgtccttgcctccggctccaccacattggcaaccagcacgctctttccgaacataaagatgaaattattatcgctgtaacacttcttatcttccgggaactctaaaaacagcgggcgcatagccggcatgccgttctggtttgcctcatacatcaggctgtacagatacggaagcatccggtatcgctgggcgtaagccgccttcacatattcccgattctcctcatacatccagggctgtgtcaccgtgttgtcgttatttgccgaatttaagcagaagcgcggctggaaaataccgttttgaatccaacgaagcaaaagctccgcctccggcacagatcccgcgaacccgccaatgtcacagcccatgttggcacagccggaaagtcccatgcccacgatcgtggcgatgttgaacttcactgtacgccagtctgtcaggttatctcctccccatacctgcgcgtatctctggatgcctgcatatcccgcacggttgattatgtagggccgctctcccggataaacgtgggcaatcgcctgctttccaagaaatgccatcaaattggaatgcagaatcttgagctccgccattgtccctccggcgccttcaaaatcacagtatgcgtcccgatcctccacgccgtccatctcacaattgtcattccatacggtctttgttcccattctcagaatccggtcttccaaaagcatcttccaggtttcacgggccttcgggttcgtgaagtctaaaaacctgccttctccgccccaccatcttccataataatccccgtcaccgcccgggtttttaataaacacgccgttctcctcaaacaggttcatataaggatgatttttcagaatacccggtttcagattgggaatcacattgattcctctggcattcatacgctcaaagaaatcctcaggatttggaaatctcctgtaattccagttaaagatatagcggaggttgtcctcctcgccgctggaatagccggatgccagccaaaagttatcgatcaggatgccctccttctcatgcttatcgattacccgatagatttcctgatcacagttgtcctccagttctgcgtaatacatagtcgaggcacaataccccagagactgtttggtgggcagcgcgcagcgccccgtcagcatcgtatagcggtctaaaaccgccgaaagctcaggacccttgagcaggaacaggtcaatatctcccccatccgtctgataatagcaataccgatcccaatagccggaaacctcctgccccatatcaaatacgctgtcgtaggaattatgataaaacaagccgatggcataggctgttttctcgttgatccggatataaaacggtatatgcttgtacatgggatccccaaactccggatcgtggccaatcgcgtccttgggtgacatcctgagtcttctccctttcttgtccagacagcccgtcttttcgccaaagccgtaaaagtggtcgttaaccggatccattttggaatagtgggccaaccgtcccagatgatcctcctcaaacgccctctccttcagatcctgataaacgacagccccgtccagggtctttaacgtcaggaaaaagggggttttgctgatttccaggacgcaggtgcctgttgtaaatacaagctttccgttcttctcctcgcagggaatatccaggggctcgatgcgtgtgcgctcgtcctttaaaagttcgtccatccgatcctcccaggcggtagtcaccagcgtataggattcttccttaaaatcccgccggaagctcacccgtacccgaatcacgtcatccgtcataaaaatcagcaatacatctgccgcatccccgtgcagaatatagccggaaccagtcttttctattgatttcagttcacgtaaaagcatcgcgttcctccataatcataaaactgcagccgcccgaactcagacggctgcgtcgatagttacatcccaatcaaatcaaaatcttcaaaggatacaaccaactgagcatccttcttcggatttgcatattttaccagaacggccttcttcgtctggctgtaataccagccgctgtccgccgcttcaaacttcctgcggtttaagtagtgctccagccgttgcccgccaagagctgcccagaatgggctcctgtccttgcggatgatttctactgtaacgctctttactgtatcccggtagtcaccctcagcggtaaaatcaaccttcaccacatcggtcccgctgacgctgacagtggttttgcggaaaattcctttttcaaaatcgttggttcttccgtcatcatcgtacagcacaaattgagagccttcccttgccgaggcaataatcagacggagttcctccacacagtcgcgttccatgttcatcagttgattatccgccatagctgccttcattcggctgcccggagagacccattccggtgatggccggaatgttgtactttaagctcttccaactggtatagttgtcgccgcaccaggtctgcgcataacgctggatgccgctgcttccgcttcggcatacggaatagggccgcatatccgcgtcatgctccttcaccgcatcgttgctcagcttgcacatcagcgtgctcatgattggcttcagttgggcaatggtaccgcctttgccgtcaaagtccgcaataacatccttatccagcaggctgtcatactcacagttgtcattccagattgagttggttcccacagcaaccaggcttccggtcacatattttttcatgcctcacgagccgcaggctttgtaaaatcccagaacgccccgggaccgccccaccagcttcccaccgcgtactgctccggattcttgctgtccttcacaaacacatcctggcttttgaactcctcaaaccacgggtggcacaggagaatcccaggcttgatatcgggaacattctccgcccccttgtcctgcattgcatggaaatatgcagatggatccttaaagcgggtcgtattccatgtgaacacgcagcgcttgtttccaacgctggtatatccggaggaaagatggaagccgtcaatcggaaagccttcctcctccataaaggaataatgggtcacgcggcggttggagtccagcgaacgggatttccgtgcagatcactgtaaagcagggttccttccgtgtcatacagctcaaatccaatgggatccttcataagtacaaggcggatttttccggtatcgaaggtaatctcattatctgtttcttccaccccggggattaccggctccacacgagttctctccccctcaaacagcgggtccaggcggtcctcccatgccgttatcatcaaaacataggattcctccgtaaattccttgtcaaatgaggtacggaccctcacaatctcatcggtaacgaatataatcttgatatcggcgcagtttgtatgtaccagccatgcgctgtctgtcctttcaattcctgaaaattgtgtgcaaatatccatactctgtctccattcttagggttatcgatgggttttttccgctttttaccattattaccaccacatgcttggcacaagaccgcacagatacggcacaagcagcgggatagcagggataaagcttaccaggaacagggagattaccattgccgtaaaaatcggagcaatatatttagtaaccccctcaatctttacgcggccgacaccgcagcccacgaaaaggcaggaacctaccggtggtgttacggagccgataccaaggttcataatcagcataagtccgaaatgcaccggactcattccaacgctggtggcgattgtaaggaagattggagtgaagatcagcacggccggagtcaaatccagaaacatacccatcaccagcaggaacacattcatgattaaaataatcatataccgattattggaaacactcatcagcccctcgctgatagccgccggaataccagaataggacatcacgtaggacatgattgaggatgccgcaatcagaaacagaattgtcgcggaactcttcatcgtgtctgcaagcaggtcataaaaggtttttatactcatctcacggtagatgattgccagcagcgtgcagtacaggcacatgaccacgcctgcctccgttgccgtgaaaataccggtcaaaatgccgcccattacgataataacagccaacagggacggaactgcctccagcacgatcttccatgccggatcctcctccttcacagcggatgccttgtagcccttcctcaccgccaaaaagattgccagccccgcgactgcaatgccaagcagagctccggtcagatagccgcccatgaacaaggctgccacggaaacgccgcctgcggtgatggaatacagaattaacggaccagacggcggtatcaggattcctgtcggcgccgaacagatgtttacagccgcggaataattgggatcatatccctcgtccagctccagcgggctcatgatggaacccatcgcggaggttgccgctacggaagaaccggatacggcgccgaaaaacatattcgccagtacatttgtagctgccagatatccgggtacccatcctaccagcagtcttgcaagacggaccagccgctttgcaatccctcccttgttcataacgttgccgcccaatgaaaagaacggcagagccagaagggagaaggaatcgcagccggagaagcatctctgtgccgctgtcaacgcgaagatattcccgtccataccgctcatgattgcagtaataatggaagcgataccaattcccgccgaaatcggaacgcctgcaaacagcataacaaaaaatgaaccaaacagcattaacgcagcctgaacaaccatgcttatttccctcctttgctgtcagtaaaaagctgtatatacttgattacacgggcaatcacaatgaaaatgcctgagatcggaaggcatgcgtacagcagcctaaacgggatacgcatcacggaggacttgttggttgcattgcctgcaagctgcattccgccgtaaataaaaacatagcacacaaagaacagaatcgccgcctcaatgaaaatcataaggacagagcgcaccgatcctttcacacgatcctttaccaaatccagcgccagatgctcatccttgtaaaagcagtaggcagaaccaagcatggatgcccagatcagcacgtagcggagaaattcatccgtaaatgtagacggatttttcaaaatccagcgggtaaaaatctgccatgtaccgcctgccagaagagcaaacatggcagcggccatgataaagcgcattacggtatccagaaaatcattaaactttttcaaaatctcatctccttcatgaagtaagcaacagcatccggccggttcctacctgccggcagcctgaatcttctcaacgattgcatatacctccgcgttgctggtctttaagccgtcataaatagactggcatgcctcctggaatgccgcggtgtccacatcctctacaaaggtaatgccgtttccttccgccccagtcttaacctcgttctcaaaatccgcccagcgggtcttgtactcgtctgttgcggccgccgcagtctccttcatgatgttcttctggctgtcgttcatctgattccaaaccttggtggagattacaatgacgtcaggaatacgggtatgctcatcatagcagtagtattttgtaacatcgctgtgatcgcggagagcggtgatgttattctcagcgccgtcgattactccctgctgcaggccagtataaatctcagagtagctcatgaccgttgcggagccgcccagcgcgttcatcatgtcgatggctatctggctgtccatggtgcggattttcaatccctttaaatcagccggtactcgaatgggtgtgttggcggtatagaaggaacgggaaccggaatccagccaggtcagtccaataaagccgtcgccctcggtaatgttgtagagttccccggctatctcgccatccataaccttatagtaatgatccttatcgttgaatacatacggaacagacagagcgttccatgcctcgttgaaattaccaagggttgacgcggaaacctttgccatatccagcgcacctgcctgaatggaagaaacattgtccgcttcagatcccaattgaccattgggaaggatctgaatgttgattgttccgttggacttctccttcactgcctcagcccatgcagtcatctggatgtgcaccgcatgatcctcagccagtccatggctcagcttcagattaaaggtctgctcagaagccgatgccccgccgtttcctcctgccgcctgcgaagcagcagtgcctgatccgcctccacatgccgtcagcatcattgctcctgctacggccaatgccatcattgcgcaattacgtaatctcataacttacttcctcctttaaaatggtttcatttatcaatcagccaacgcctgctttgcggctgtcaactgttgctttttatgcagctatggaatatcatccgcgctttaaattgcatgctattgtttttcattgccggtctccgtttcaaaaattaaggcatttttgcacaaatatacgattaaaatattatgaatttcatcaataattgatatattttttgtttatataagcaaattttatcagttttatatcataaaagtcccattcttttgtgattaaaaacttgcaaaatgtgatattaaagaatatacttttggaaaaagaagaagatggttttttgatttaagcaaagaagggggaaactacatgattgttcagaagattacacactgcactgattccattctgacacaggagatggcccgcatcggtcttgaggactatggagtggttgtaacctggtacacaaaccagaacaacaagcagtctgtggtccactcacacccgtaccacgaaatcgttctgccgatctccggaagcaacgtgctctacgcctttcaggggagcctttacaccctccatcctggagagatggtcttttttcccgcggaaatttatcactccggacgttatacggttacagacatcgtatctaaccgactggttgtccagattggcgcggaaatctgggattatgccattcacgcatccggattaatcaatccggattggcagaagaatatcgttattttgagcgcggacgctgtatccgccttggacctgcgggggcatttggagcgcatggcccagattccctggatcaaaaaagcttatcagaaaacggtgttaaactgtgagctgatggaactccagctttttatcaaccaactcgtggaggagcagcataccaaatcccccagcttaaccagcgcgctgatttcccgggctgttgaatacatccagaagcattacaccgagtccacccttacggtggcgtctctcgctgaaaatatcttcatcagccgggagcatctctccagagctttcaaggaatacactatggagagcattcacggatatatcaacaacctgcgaatgcagcacttccgccgtgatattgccgccggacacagcgtactggatgcctgtacaaacagcggctttgccagctataacagtttcctgaagtcctttagaaatctatacggaatgactcccacccagtatcgcacgcagcttaattccattgaaaaaaggagccttaatacttataattcataggttagaaccaattccttcagtcccttcggcggcagtctgtagctataacatccattatggacaactcctgtcattgtacaaaaagactcccatgacattacatcatgagagtccttagtaccactataaatttttctaacagacacattacttttgcaaaaaatcttttgcttcacaatacttctgccgcacaatcccctgccatattccctctggcataaacagaaagaccatcgtatcttatcctaatcatcctgtcctacatttcagttatacacagtaacaaatcagttattttcagactattctcatgaaatatccagtgttttcggtggataatgtggataactttgtggatatcttgttaattccctgttgatgtcatgtggatgtcctttgacctctgcgtactttatcacagcttaacccattccataatttaccatcccataataccgaaacccttagagggacgtataccacgcgttcagtgtacggtcctcctcactcattattccagcagttcttcataggacgttcccagcgctgttttgatggctttcagctgagagacctttacatgctgcgtccctttctcaatcttcaccaatgcctccctcgtaatgtctacccccatcagctgcaggatacggaccagatccgtctggctgattttagacttcagcctgattctacgtatgttggtgccaatattggttcctttatcattttttatcacatccattaccattcccctgtacgcatgattccataaaccctcatttcatgtccccatttttgaacccattccagtccatttcactcttcatattatggagattttatgatataatgggaccaaaaccagtccactattaaaaaattcaatgaggtgaccctatggaacaatatgactttacagacaccggcaacgccaaagatatctacggattactggattgcatgtcggataaggaactggagatggccagggaggcggtcagaaacatccgtgaaaccgcacagctggcccaatacgagcggtacaatgtatggtttgaccatacacttctccccatcttcaaagaatatgcccagatgacctcttccctgctgcagattgagcgggacaacgggaccatcgacgtcctctttcgcaacagcggcggtctggacattacggagaactgtaagggtatgtacatggcactcatgatggccgtacatatattcctggattcagacgccggtgattcggttctggccctgacctatgactgctgcaggattgtatcatgaaatgcttcccgctcatcctgtgcccgggaagcatccgctccatatccgccccaaagcactgcacaggatgctgataaccttcatatccagccatccggcagcgttcccggttcacctcatgacaatggacaggctacagaaaaagaggcggctgtccgtaccatatggcggcgtctgtattctcaggaatttctacagcgggatagtatggcctaactccataccgccgtctactttaacagctcatcataggtcgtttccaaaataaccttgatggcctttagctgggacaccttgatatgctggatgccccgctcaatttttaccagggcctccctggtgagattcacctcaaaatcccactctgccaggtcaatcttctgaatcagttctgtctgtccaatccccttttccttccggattctgcggatattcgcccctatattagcactctcatcattcttaattatgtccattctgccacccctgaatatccggactgattttagtcctttttgccattaatcttattcaaaatttatgatataatgggaccagtatcagtccaatggagagcttccgggatcagaatctcaaagcggaagcaccagcggctgccctgaaggccgcgcaccgcttcccgggatggaggtaaagattgaaaatgagaagcagagtactcccatgaaaaaaataacaggctgagtccccccgcgccaaaaggcgcggtcctcagcctgttttctaatctattcattatgtttggtttttccgtttcccggacatccgcctctgcctacttatacagtgacagaccatccatcagtataatgggatcatcccactcattatccgtaaccagagaaacctcaacgcgaatcgcattctgtccggtcacatccacgccaaagtgaatcagcttttcattgtaatgaatatcctgtgacgtatagagtacggtatcattgtcaccatatacggttactttagccatgattccgctgctgaactgggaagatggagctataacgccggataagagccggtactgtccgttggcagcatacttcacatagcttcctttgcctttcagacggatggcattattccagcgctcgccggtggatgttttgccggaggtaatgatattgtatcccttagtagaaaggccgtccaacagattctgcaccagatatggtgtggacaggtctgtaatattggccggttccacctcactctccgctgcaatccatatgccgtccgcgccaatctggcgtccgtcaatcactgtattcgtggccatggctccgttgggaagcaggaagtaccatttgtcgttatccttaaaccatcccctctgcatgacacctgcctggtccatgtaataccactggccgtcaatctgctgccatcccgtggtcatgacgccgttgttatccatatagtaccagttgccgttatcctgaatccattccttgtaggcaaacttattggcgcctctctgatacttccactgatcattcacatatttccatgtacctgcataggccggaaccgacataaccacactcagagccactgctgccaatataaccgccaaacgtctcttcattctgaatctcctttcattctcccttagctgccttatacagacagatactattcatcctgcacttgttacattataattcattctttatttttatgcaactgtgtgtacaaactgtaattaaactgtaaagattaaattcttccaggatttaagcctgtccgttaacaccatgtggcctgccggtcctatctcccaggcgtttgcggctgcagccggacatcaggtattcttcataatcacgctttccaccacatccgccacatgctcgcaggcatcgcagcatttctccaggtatacgtaaatctccctccaggcaatgatttcaatagggtccgtcacctcggcgtggagactgcgcatggaatcaatgaacagactgtcgccttcctcctccagagcgttaatctcgataatcagaccgtgaagggtcttggattttctgaagtccgcaaattcctccatgacctccttaagcgcctcacagcagcggatgatgacttttatgaaggcaagggcctcggggcggatttgctgaacattgtttatgtaaatacgaatcagcacatcctcaatcttgtccgtcacctcgtcaatactctggctcaaaagaatgatatcctcccgctcaataggggtgataaatgccttgactaacaccgccatcatctcatgctttttcttatccgcgtcatgttcaatccggtgcagctcgtccagcttgtcctgtaaaagccctgtatcaaaatggttcagattgccctccagcattttagctgcctggcacccgcactcaacgcactcaatgaaattctgaaaataataactatcacttttcttagacatcttatcttctcctttgcttatccatggaacaacatcataaacagcttcgccatcaggaatccaatgataccgcagccagggaatgtcatgacccaggtcatcaccatatccttaaccacgctgaagttaatggccgacagacgtttcaccgctcccacgcccatgatggctgtggttttagtatgtgtggtactgacaggaataccgaaaatggaaaatccgagaagacaggcagctcccgccatatccgcggaaaagccctggtatttctccagccttaccatatccatacccacggatttgatgattttctttcctccaatggaagttcccagggccatggcggccgatcccagcaaaagcatccacagtggaaaccgtactccctgggtattgctggacccgttcaccatacagatacccagcagcatgactcccatgaatttctgtccgtcctgggcaccatgcatgaatgccatggcggcggctccgccaatctgggcataccggaagaatccggtggttttccggcggtccatatcccggcaggtccaggccaccagcttgcaggaaaggtagccgcttaaaaatcccaatacaacggaaaaaattagaccataaaccacctttatccactctgccgagttaatggcagaaaatcctccgcggatagccacggcagctccggtaaggcccgctatcagcgcatggctctcactggtaggacatccaatggaaacagcaaaggatgaccataccacaatggaaaaaagcgcggcacacagggcaaccagagcaatcgaagtatcttccccaaaattgaccatattggtaatggtcatggcaaccgtggaattcaccatggtcatcacaaccacccctgcgcagttgcatactgccgccattgcaatggccagattcacatccagggacctggttgacacgcatgtggcaatggcatttggcgcatccgtgataccattgacacagatgaccccaagggtcagaagaactgttatcaacaatgccggatttgtcaccagctgccgcaggaaaaaggaaaacgacatgtccataattcttttttacctactctcttaattatttactttatctttacgtaaactttacaaacccatgattttaattctagcacggttttttatggtagtaaagttcaatttcgttaagaaacagaggaaaatattcgtctttggataacagaaatgctatggggtaaaatggaaaatgcctccattatccatatatagataatgcaggcaatgcagaccgtgcaaaaatgtttgcagtttctttaaatatattttcagagaaaatatactccaattattgataatgttttatctctcatccgggtttcctgtttattcttggagctgcgggccgccttttccagtctgttcctcacaagacagacaggtccggtccgattttcccagtccatccctcctgagccggtcagctcagtccggtcagccccacatccatgcttccggaacggaatccttctgcatccagggttatatatacaaaccccatttccttgagacggctgacgatttccttccggcatttcataaatacatcaaaggcttccgggtccagttccaggcgcgcgatatctccgtgaagcctgagacgtacattgccaggaaccatggttctgacataagcttctcccgctccgattcttcccagcacctcataatccaggacagcgccgtaaggcaggcgggtagccatacagggagtggacgggcgggatgccaccgatattccgtactctgatgccagggcctttacctgggccttggttatgcgcagctctgccaggggactaatgattcccagctccttaagcgcctggattccggggcggtatacatgcatatcgtcctcattggtgccgtccagaatataccggattcccctggcctgtgccagttctgccagcttggaaaacagatggcgcttacacagatagcagcggtttaccgggttatttttgattgcctcctgctccagctcgtccacggtaatgacttcatggattccccccagctcccctgccacgcgcctggctatctccaggtcgcaggaaggatgcaggcggctgtcaaacgtcacggcgtatacgtttcttcccgtatgggcggctgcgtctgctgctgtctttaaaagcaggcttgaatccactccgccggaaaacgcaaggcatatatcctctttggccagctgctccatcctggcctccagacactttttcatatgatacagagatggcctttcatcactgtagctgttatttaccgtattcatacaaatctcctaatctgacattatctgtatccattaatcctgccggctttcctctgccttcctacgtacctgatgatacgcggtctgaaaatccgcgccctgttccatacagatacgccggatgctttcatattcaggatagaagaactttctgcctttgtaagcgcacaccttcacatccgccggcccgtaactggtttccacctggatttcactccgctcaagaacagtcctctccgttggataacggcggattccgatggtggtggtctgggtcagtatgatttcctccatggcctctatggatgactcacggcaaagcacggacatcatataggcaggacggtttttcttcatgtgaataggggtataccacacatccgcggccccggcatcaaggagcatctccatggtaaggcccagcatttcccctgtacagtcatccaggttcgtctccaacacccacatggtacggtcctcatcctgtgaattctccagcagcatggcccggagcacattcgcctgtttaaagaccttgttccccgcccccattcctatcttaagcagacggcaggaagccggaagccggtcctttgtccgcagcgcggcggcaatggctgccccggtaggcgtaaccatttccccgtcattgtctgtaaaatgcagcttaagtccataggaggaagcaatattagccgtagccggtacaggaaccggcagtacaccgtgctggcagcggacatggccgtggccttcagacaatgcggaaaccaccacatcctccacgcccagattgtccatacagactgccacgctgataatgtccacaatggaatcaatggctcccacttcatgaaaatgaacctgctcaacaggaagcccatgggccttggattccgcctccgccacaatgcggaacatggtccgggccatttccttcaccctttcattggaatccagatggtctatgatatgataaatgtcgtggaggttccggtgagtatgggagtgggaatggccgtcctcatgctcatggctgtgctcgtgcttatgcccatgacaatgctcatgtacctctaaatgcccacagctgtctacgcgctcatacgcatcttcctgccgatgcgtatgctcgtggctgtgtccatgcccatccgcctccaaatgcacatcaaaatcaaaggcatccagaccgcacaccaccttccggccaaaatgcagatggtatccatccactcccagactctccagcgcattctccagcacctgcctgtccgctcccaggtcaagcagggctcctaccgtcatgtccccgctgatacccgaattacactccagatataaaatctttcccattttatctcaccgccattctgtttatttgggccgccaggtagccggccccgtatccattgtcaatattaaccaccgatatcccgttggcacaggaattaagcattgtaagaagagccgataacccatggaagctggcgccgtatcccacagaggtggggactgccaccacagggcattccaccaggcctgctatcaccgtgcccagggcgccttccattccggccaccgccacaatgcagttagccttgtccaggcgttccctctgggccagaagcctgtggattccggcaactcccacatcaaatatccggtctgccctgcatccgaaatattcagcggtctgggctgcttcctcggccaccggtatgtccgccgtgcctcccgtgcacactgccacacaccccctgcgctctttacccggcttctccaccttgagtatccgtgatatgggatcatacaccacctccggcaccgctgttctcaccagctcagcctggctctcagaagccctggttcccaggacctccccgtctctctcataaaatttcttataaatttccagcaaatacgcatccggttttccctggcagaatacggtttccccaaaaccggagcgcagcttcctgtgatggtccagcttggcatatcccaaatcctcatatggcaggttcttaagccgcatctgcgcatcctctatctcaacactgccggactttacctgttccagtaattccctgacatccatctttcgttctcctctctcaaatccatacggttaagctatccgttctcaaatcagccaccctgccgcaaacacgttccagcagctcctctgaatggctgaccaccagcagacccagctcccgcgtcttcacttcctccaaaaggaatccccagatttggctctgggtgataaggtccagcatggcgcttatctcatctgccagaatgaaccgggtgcgcttacccagggccctggctatacagaaccgctgcagctcccctccggacagctctcccggataccggttcagccagtccggttcgattcccaggccgcggaccacccgttcctccacagcatccccttccctcagcacctcccgcatcttaagacggggatttaccgacagttccggatgctgccatatcatctgcaccggattgtaaccgccccaggaagaaatactttttccgtctaaagccacagtcccatggtctggcttctcataaccagccagtatcttgcaaaaagtagtctttccaaaaccgctgggagccttcagccccacacgttccccgctctccagactcatgctgacattgttcagtattttccggttcccattgtcgtattgaaacgaaatattcattgcttccagtctcatactcccgccttcctgcattttaccatgccgccgcgaaaactgcgataggaaatttcctgaagacagccctcgtccatatccgggcagcggggcccatagggacatcccgcgggcatatccgccgcatagggctgggttccggacgctgccttaaacccgtgtcggggcatggcccggaaaagagctctggtatagggatgacgaagcctctgttcagcctcaaaatccgctgccagggcttcctccacattggtacccgcataaaataccacgattctgtcagccacctccagagccagctccaaatcatgggtgatgagaagaacccctgccccctcgtccgctatctcccggaaatggttgagcacacgcctggccgctctgatatgaagccccggagtgggttcgtctgcaatgactagtctgggatgctccatcactgcggttgaaatcagaacccttctggtcattcccccggacagttcaaaaggatacagtccctccgtatcctctcccagcccgtagcgccccagagactcacggcagcgcttcacgctctccttatccttttgtccccttcgtacctgctcccccaccttcatcagcggatccagataggacacgctctggggtaccagtaccatccggcttccccggagctgttccttccgcttctggttcaggatttccccctcaaagaaaaccgtcccctgacaggcggcattctgcggcagaagtcccatgaccgcatgggcaagaaggctctttcccgaaccgctggaaccggctacagccaccacctcatgttcccgtacctttatgttcaggtcccgaatcacgggaagttccctctggcgccatccccccacatactgggaaaatgaaatcatcaggtgttccaccgacaatatgacttgtttctcttccatgacaacctcctacagaacaaacccctgcaacagtgcaggcagagattctacagatgggcctgggccgggtccagcagacggctcagcgtatccccgataaaatggaacaggaccaccacaaataccagcaacagccccggaaacagggccagccaccattttcccatgaccaggtatttcatgctctcagacaggataacgcccactgcgggctgctccggcggcagtccgaagcccaggaaggttatgctggcctcatgaagaattgcatggggaaacagcagaaccatgcccactaacagctggggcagaagatgaggcgtcatatgtttgagggcaatataaagccttccctttcccagcttcttggcaacctgtatatactggctctcacgaagctgcatgacctccccccgcagaagcctggccagggatgtccagtgggtcagtgaaatgccaatcagtacaccccagaatccctttcccactgcaaaggaaatgagaatcagcagcaggatatggggtattcccatgaccagatcaatgattccccctatgacagcgtccgtgaccctgcccagacaggcggccatggttcccatgatgaaggccgccaccgcgctgaagcatgctgtcaaaagcccgatgcgtatgctgatggataagcctgtaaggctgcggatgaacatatcccgtcccatccagtccgttccaaagggataggccaggctgggcggcagattctttctggtgaaatccgtggccagtgcccgctcctttaacacctggccggcaatggcaatggccgccagcaggatgaccgataccgccagcagcaccgccatggccttgcggcggttccatctgtgtctttgtgcgttcatcccctgctcctcctgattctgggatccaccgttccatacaagaggttggcggtaaagttccctaaaaatacaatggccgcgctgatgattgtaattcccatcaaaagcggcacatccccgcccagtccggccgtcacagcagcctgtcccaggcccggataggaaaatacctgctccaccagcacggagcctccgaatatctcgctgacagaggcaaactggagcgtcatggcaggaagaaggatgttgcggattccatgcctgcggataatggaccattccgactcccccctggccctggcaaacagtacataatcactttccatgacctctgccatcttctcccttgtgtggagggcaatgttggagatgcctgtaatggacaatgcagccccaggcagtatgccatgtatcaggcggtccttcatggtcacagcccacgcctccaccccgattggaacggaaagtcctatggggagcagcttaagccagaccgcgaatacaaccaacagtaccagggccacccaaaaggccggcgtactggcagttgccagggcataggaagaaataatacggtccgctgcctttcccttttttgccccggctatgattcccataaggaacccaatgaatccggacaaaatccatgccgccgccataatccaaagggaattggccagcttctccccgattacctgggccacaggcctgcggtacaaaagggagatacccatatcccccttaaggaaatcaccggcccaggccagataacgggttacaggcggcgtgttgactccccagtattcctggagcctggcaatctgctcgctgctcatgctgccaagggccgcctgccccacattggtggtaagggggtccagcggagagaccgacaccaggaaaaacgccgccatactcaccagcaccagcaggaccgccatccgtatgaaactaacacccgcctgtttccaactcatgattttatccttcctgcatacatacaactatgtcttcttttattcccagctccactggtccacattattcacaatggaccatccgtggccatggggatggattttctgctccgccaccttaagtccgtccccggaccagtacagatggtctatattaaccagccaaatccacggtatatccccgtcctgggtcactccctcggtcccgtcccactgggccttcttccacagctcgtaagaatcctccaaattcccgctggccagggcctcgtccatgtaccggtccacgctgtcattggcatagggagaatactccgccaggccggtatccttcatagtatggtaaatattgtagagctccataggcgtatgggcgccccagccccacataagcggctctgtctgggcgcggtcataggcgtcatcccagccaacgccctctatctttacatcaattcccacttccttaagctggttggcagtatccgccgccagggcctggcgtacagaatcgctggccgggtacatcagtgtaaatccggccctgacgccatccttttcccttattccgtctgaacctgccttccatccggcttcctccagaagctctgctgccttttccgggtcatactctgtctttgcagactcattgtaccagggcatcttatcacacacgctgtatgccggacttccgtaaccgttcagcacatgttcaatcatttcatccctgtcaatcgcaatattcacagctcttctcacctgtacatccgacgtaaaattatttccaacaacggttttgccgtcagatacggtgccggcctttacagccggaaggttgaagccccggttatccactgtctcaaaggaaaggagctcatatccgggaagcgtctggtccgaataggacgcggccgtataggccaggtccacctgaccggacataacagccgcgtaagccgcgtcctcttccatgaaaagtatggtcaccttcttcattttcggctctgtcccgtaataatccgggttcgcctcaaatatgacctgctgtcccttatcccactgtttcatgatatatctgccggaaccaatgggatgtgacccgtaatccgccccgtaggcatgttccggtacgattcccacgattgccatggtatagggccagatggaatagggccggttcatgtgaaataccacggtggaatcatccggcgcctctgcactctctaacatggtaaaatcattgacagagctggtgtcccggagtgtgttgtatgtaaatgccacatccctggcagtcagcttctctccgtctgtaaacttaacatcatcccgtatattcacggtccaggtaaggccgtcctggctcacctccatatcggttgccaggtcatatcctattttcaggccggctgtggtcacggtcagcgtactctgaatcagcggctcatggacatgttcgcctgccccccatccgtaggcaggatcaaatccggcctccggctctgaggttggccccataacaaccaccacatcgtcccttgtcccattgcctgccttctcccgggcgccattttccccgctgtttccggtactgtctcccgcactgtttccagtactgtccgcggccgcagatgtcccgctgtccttaacgctgctgcccgcgcagcccgtcacaaccatggacacggccagcatagctgccacggcatatttcattccatttctcattcctcgtctcatttccctctccatttcctttttatgccctgcccatgtgcccggacttcatacgcttatatctataatccctgattcaagccctgattccataaatccaatccatttcccgtcgcaaaaagcataaaaaaataccagaataagcgtattccttgagaatacatcctaccttcctggtatcccttacttcttagatgatttaatcttacttcatcgaatttacttggttcattctgaatgttgacttctgtcaaccgttaggaaaattatacgcaaaagtccgcaaaaggtcaacgcttttcttgccaaacgtttgcccatatattaaacagtcagcctgaaccatccccacaaaggggaaaagttcccagggagccaacacctccctgggaactttttagtgtaactatgcacctttcttatctgtctcttatttattcacccttctgctgaacctctacggtacgtccatccacgtctttcgggtctcccacggtcagtcccgggacctccgcatccgggcacgcgtttgtccatgcaagcttcatgacatcgtcggctgtcatttccttcttctggataactccaaggcggatgtaatcggctgcaatattgccaagcgcttcctctgtgattgcgtcagacaggccgaaatccagggaatcccagaactcaagctgattttcaaactcgcctgtcatcttattggtgtcaaacattaactgcacggcatcctcagagtggagacgggcaaattgccctgcacgtttaatcgccataacaatgtattttgcatgaaccgggttcttggcaagaaaatcattgttcatggcggttacacagcacacctctccctcgaactcatcgctgggggtaatggagcataccttgcgcatcttatcgctgtagttggcgattacaaaataatccgagaaaatggaagcgtcaatctcaccgctctccatggcagctacgctggccgcgctgtcagcgatatcaagatactccacctcagaggtagggtctataccctccccgtccagcatacggtagataatgttctggtcggagtttccgatgccatcatggatggcaatggtctttccctttaaatcctcagctgtcttaatctcgctgtcgttgaatacgtagatggatttgcagcccatgtgggctcctgccacaaaggtcatatccacgccgtttgtcaccggcacaagcatggttgcgatatggtctgttccccacaggcacttacctgtaccaaccgtcataacaacagactcgccttcaatgtattccgcgttaataccgtaatcctcataatagcccagcgcctcggcaaggtataccgcagacacacaggcccctccgttaaacagataatttaatgttgttccaaaggcaggctccttctgcatggcctcccagtcctcctgggacacagcctccggacggcttgcgccgccggttgtctcctcaccggatttcccggtatcctgggattccgccgctgattctgcctctgctttagtctcggccgatacaactgctgcggccgcgccttctgtgggggatcctccgccctgttccccgcaggcgctcagggataaggccatcattcccgcaagcgctgctgccagaacgcgtttcgcatttgtctttttcatcatactgttctcctttttgcttttaatagttatttatgtacacaaaccatagggtctgcgctttttactgtacacaggcctgtccgttttactgctgaccgctgtttcttccaccgaagtgcaggcggttgaggatttcattccggcaggccacaaaggtctgggatgagcgctctctggggtatgcctggtctatcttaatatcagatacaacccgccccgggtgcgcgtccatgacaatcaccctggttcccatataaatggcttcatccacatcatgagtaaccatgatcgcaagctgctttttctcctgccacacctttaagatttcatcctgcatattcatgcgtgtaaatgcgtcaagagctcccagcggctcgtctaacagcagtatatccggctcgttaatcagagagcgcaccagtgaaacgcgctgagccataccgccggaaagctggcccgggtagtcgttccggaaggattcaaggccgatgattttaagcatcctctctaccttctcctcattccccttcaattttccctgcagctttaagctgaaggaaatatttttttccactgtcagccatggaaaaagggttggtttctgaaacatcattccccgctccggcgacggccctgtaatctgtgtcccatttacggtcagatggccggtggtcgggggaatcagtccggccacaaggcggagtatggtggatttcccgcatccggacggccccacgagactgataaattcaccgctcttcatggacagattcacctcgtttaacgcatgggtaacctcatcgtgctccacctttgcgaaactttttgatacattttctaaccgaaggataattgtattttctgccattatttcactactccgttctgccatctgaggacgcggcgtttaatcaaatccagcacctttgtcacaatagtgaaaataaagcagatgacaaacagcgctgcaaacattttgtcgtaggccgcccaggatttagcccaattcatgtaccagccaagtccggcctttacccccatcatctccgcaatcatgattgcgacacaggatgagctcatggcctgggtgcagccctgtaaaatagagggcattgcatgaggaatcgccacccggaaaacaagctgccgctcacttgcccccagggtccttgcggcctcgaagaaatccctgtccacattttggatgccggacatggatgccacggtaactgcaaaccaggagccaagggcgatgataaacacggctcccctgaacagggaggttgccacaaccatgataatgggaatccatgttgcggtggggatgggccccagaaatttgataatgggatttatccagtaccgggccttttcggagtaaccgcaggtaattcccgtaaccagtcccaggacaataccgataaaatatcccaaaaacagcaggcgcagagtgtgaagcgtacattcaagcagataagcccggtcctcccatgcaatgttcaatatgctgttcatacacggaacaaagggctgggacaggatgcctgttttcagggtcaggtaatcataaacggtaagcaggagaaaaaaagcagagaccaaaggcgcgcggtagcgcaggtcctccactgtccgtttatcccccctccggtttttaatcccggcttcaagggcatagagagcgtatgcggtcataaaggctgccactacccatacataggtgtagggatggctgttgggacttccgttgggaacctcccagtactcgataatagcgatgaaaccgcagataaccggaagcaccataataacaaaatccaggattttctgcccgcgtgttttttccttttgctccagttcttttagctgctgtctcgtcagatgtcccagcgggtttatctgtccgctgtcagagacaggcttttcctccatattagttgacatagtccttctcctctgcatgtgatggatactaaagtattcaaatatcgcgtttctattctaatcgaaattgaacggactgtacaatttaaaataactaagatggaagccgtgtttatagcttaattctataacaatgcctctttattcggttttcctgtaacgtttataccatctgcccatgcatatggcacgcgcacccgcagtcctcctgccccttgccatcatacgcctcatccttcatcatcagatggaccgcgcccagcttaaaggtctggggaagggccaggatattgggattttgtccaacaaactttttctttgcgtcagccagtgcttcctcaatggtggccctggttttaaggcccatccctctggcatagcccggttcctgggcgccgcacagatagatggcggaggtattcatttccgctatatggccgcagctaatcatggagaagccgtgaaatgggtggaacgcattgcagtaacggtattttctgatatattcctcattggttgcaaagtattcgccgtaccggttcatgtccggcagggtgttcataaaatcatgctggaacatatcatacatttccctggtgtaaggccacagctcatcgtggaaataaccgctgcacagggaggaacagataatcacacagttatcgctcataatgcgcttatgccggatgacctgggccgagatggcctgcatcagcataatgggattggtgcccatgccctcgccgtagtggaagaactggggcataccgaatatcatcacatcatacttcttttcggcccacggcacataggtcctcttatccgccgtaatccaggaatggggctgcatgactttggcatatccgctgttaatctctatctggcgggacttggtgtccagcacggcgtcgcagcagaaaaacttctttcccatgcacttttccatatactggccaatctcatcaaatttcgtcctcataagcgactttccgctgaccggagtaaaatccttccggtgcatgacctcaggcacatggtgggaggcaatggaacgccaatgggtgatgcctgtggcgcagtgcttatatcccccggagtagccgccgtagggattgccctgggtgtgcccgatgaggattgccacgtcgctgtcatacacatatttgttcatgagcaccgggtcgccgcggtccgtggtgcccaggtccaccagatgctcataatcctcgctgtcatggttgataatctggtgtgagtgccagaactcgtggaacagctcatccccaagaatgttgtggatttccgcctccgtgttcttacggtgaagtccgttggaacagattaaaaggatgtccttcttctccactcccgcgtcgtacagctccttcagtatcaatttaatagatattttcctgtgggaagtgggctgttcccctccttttaccctatccgggaaaataatggtcaccttggatcccttatgggccagcctggacagcggctccattcccatgggattgcgtatggattccagggtcttttccaccagccggtcctccgggatacagggcgggtctgccacagtctcgccgggtatgaacacatcggtgttgtccggaagctctgccgccataagccccgcgccatattcaaatgataacttcatatgataatcctcctgtgattttcctgtgattttcaattgtgttccaaacgcttcagtcctgttccagataggtgcgcacgatctccagatattcctccggatagaatccaatttctccccggaacctggtgagggcaatcaggccgccgtccatgaccggaaccgaagccagcatcctggcgttgtccgttttaaggccgcctccatagaccacatccattcctccggtcatttccttaatatagaaaccaatcttcgtgatatatgcttcatccggcggtgtcttgcctggtccgatggcccatatgggttcataggcaatgaccaccttctccttatccacatccttaagccctgtctccagctgcgatttcagcacttcctgccattgttcctgctccccggccgtttccccgatacagtagagcacggtaaggccggcctggattgccgccttgatttcctgattcagcagccttcccactgcgccttcatccgtgactccggcctcctttagaattccggccttatcctttcgctcctcgcagtggccgatgataacggaactgcatcccattgctttagccgcgttggcagtgcggttggtggtaaatgcgccgaaattgccgttttcagccgtatcgtccctgtacactccctggcagccaatcttaaccgggctgtcctcacacagggcttttaccgccggaatcaaatgggcttccgggaaatacatgacgaactccacatcttctgcgccgtacgccttcagcttttcctgggtattctgcacaatgtagctcccccattcctccatgggcgccacaccgttgacccctccgtactccctgggtatatcgaaccgtttcaggttcagaaatatgtgtttcattttcccactcccatcttttcatactcttctttaaaatccacaaaatccctcagttcgggtccaatcagcggcctgcaccattccagaaacgcgccggttacatcattgcccctgtcatttatgtattcatccggcaaaacccgctcatggagcatcacctctttgatgggtatggctgaggtatggacatgatacccgccatcctcattttcatcccgtataagtccaatcatgacgccgctcccgccggccatggctgtacgcagcgcttccctgccggccagaactgcctcttcccggtccacaggagactgccaggctatggacgcccttccgcaaaggccgggcttctcgctcctggccttaattcccagcttctgtatgaccaaattcgccagataagcgctgacatccccataataggcggctctccccgccttaaaaacaggtggcacaatgggttcccctttttcattcttaagcccctcgctggcaaccaccaccacgcctcccttttcttcgtaaaggcgtttcacatcctccaggaattcctcctcatggaagggacgctccggcagataaatcagatggggcgcatcccccggcttcttcctggccagggcggatgcagccgttatccatccggcgttgcggcccatggcttccatgacgcacacatggatgggcagggccctgacatccgcgcccacctctgccgtggaagcggcgataaacctggccgcgcttccatatcccggtgtatggtctgttatggcaatgtcgttgtcaatggtcttgggaattcccaccacatagatgtcctctcccctgcatgcctcaaagatacggccgcaggtgtccatggtcccgtttccgccgttcaggagcacataccggatcccatgcttcctgaagattcccgccatggcatcatagtcctcctgtttcagggcataccgggaggagccgattgcggtggccggcgtctgaagcaaaaggctcagcttctcctccggaacctgcatcaaatccagaaaattctccttcaggattcctccgcttccgccaattgccccgtacaccttccctatgctgccggatttcttggcttcctccaccacgccgtacagggaagcattgataacagccgtggggccgcctccatggaccaccagaacatttgccgacattgcctttaccacctttctcatttattatatctgcattttcttatagcgctcagccatctcctccagggaaacctgttccaccagaggcgctttgccgtaggagccaaactgtacgatgagggtgcccaccacttccttcacgccccgctcaatacagtctgttatggctgccgtatcctcatccggtatgacgccggtcatcaccgtatccatgattggagtaagaaataccctggggtcaaactgctccctcttagactctaaaagttcatagatgcccccgatggagctgctgctcctcttatccgggttcccggcgaaaaactccttcatattgcgggtaaccgccagcctgatatccgtatccacattaatcttgttgataccgcatctggccgctgcctgcagttcatggatggcaattccgtaggcgccggtcagagtacctcccagcccgttaatttcattcacaatatattccggaaccgtggacgatccatgggataccagggccccgaaaatcccctcgtggttcaggcactcccttatggccaccgcaatctccttgcgcagctttacatcctttcccttggaggccccgtgcatggttccataggatatggccagtgcgtccacaccggtcttgcggaaaaattcaaccgccttcaggggattggtataagtggaaccctctgaaaacacatggtcctccactccggccagcactcccagctccccttccacgctgacgcctcttgcatgtgcgtatttcaccacttcccgggtcagctccacattttcatcaaaggcaagggacgacccgtcaatcatcacagaggtgtatccccctgcaatggcagccgcgcaggaatcaaaatcccgcccgtggtccagatgaaggacaatggggatagggctgtcctccccatatttctttacggccctggcaatatttttggcgccctttttcttatcctccagggttgcgttcataaagtcgcatcttccccccatgaagccgtttgccaggtcagctccctgcaatatggcagcggagcggaacatctcatggaccccgatggcggcctttgcctgggccaccgcgttgacgttgaaagcgccctgggcaaatccatgtttaacagaagcctccatgagaggtcttaaaggaatcaatgtcatattttaccttccttttccggcgttttatcactggacagggtcacgccctttcctgggatcctgccagccggataatatctttaatgtcttcgcgcagccgcagttccgcatactgtgataatttccaggcgtggccctggtccttaccctcagccagcccctctttcagatagttcacatactggcagcgcacctgggtaccaaaattaatcttggccactccgctgtcaatggaacgcttcaccagttcctcatccatacccgtgcatccgtgaagaacaaaggggatatccgtaaatttcctgcactcctccagcacctccgcccggatatccacaggcccgttgtaaaacccgtgggcattaccgatgccgatggccagtgaatcgggatggcagagcttaagatactgtctcaccacatccgggtccgcgatgttggatgcacccatcttatttcccttgtcatccagacggcacagctctccgatttccgcctccaggggcacgccaaaggacctgcataccctggccaccgcctctgtggcagctgcattttcctccactggcagggcggaaccgtcaaacataatagaggtaaatcccagcttcagcatctccatacagcgctcaaagctgtctccatggtccagatggattgcaaccggcacagataccttggcggccatccattttgccgtctcataaaaccagtcatggcctgaataagcccctgtattcacatagtgggccaatatgaccggggagcgaagctcctccgcggccatgcacacggcccgtatgatgtcataggttcctccctgggtattgatagcgggaaccgcataatgtcctttataggcattctgaagcatttcataagtggttgtcagcatgctattctccttctcagatgttcacgatgactttcagataatcggacggggactgaatcatgtcctttatggtatcctccacctggtccagttcaatcatttttgttatgattgcgtccgtgggtaccctgccctcgtttaccagactgattgcctccggaaactttccgttggaattcctggacgggcacacgtcaatttccttctgcatcaggcgtaccgtgttaatccgcaccgggtcatgaggccatcccaccagggcagtccttcctccatggcacacgtaattatgcatgttctccagaatgaccggagctcctgtacaatcaatcatggcctcaggcagcttgccgcctgtcacctcccgcagatactcctccacatttccatccccggaattaaaggtgcatggtacccccagctcctttgcgtaatccagacgcttttgcagcacatccaccagtatgggggtcgcgccgtaattgatgcaggcaaatgcagccataaggccgatgatgccggctccgaacacggcgcagtgctccccctttgataccctggccctggcggccccgtgaaggccgatggttaagggttccaccagggctgcatgggtaaaggtcaattcatcgggaagcttatataaaagctgcaccggatgaaggaaatactcggacatcatgccgtccttatgtacgccgcacacatgcaggtccgcgcagttattgaagcgccccgccgcgcacatatggcacttattacagggcacatagggttccagggccacccggtcgcccggctttaaccctttgtcattctccccgatttcctgaatgactcccacgccctcatggcccagcccgttaatgggatagcgcatggtggggttcacccccctgtaagcagtcacgtccgaaccgcagataccgcacatttccatttttatgattgcctgtccttctttcagctccggcatgggcaaatcctttatcaccaggtttcctggctccggcagacataatacctgcatgttttcaatcctcctcattctctctgatatagtcaagtgcatggggcatgatgcccagggaccagcctccgtcggcaaatatcacctggcccacaatgtagtccgattctttacaggcaaggaaactggccagactggcaatttcctctgtctttccgaaacgtccgacgggcgacacggacaatatggcctcctcatccagtattcctgatttaaggggcttttccaccatctccgtccgaatccagcccggagcaatggcatttaccttgatgttatacagggcccactctgctcccagctgctctgtcagcagattcacagctccctttgtgatgccgtagggcacccggcccacattaatcatcctggtgtttccggaggagatattgacaatgctccctcccccgtcccgtctcatataagctcccactgcctggcagcagaacagcggagccttcatgttgatgtcgattacctcgtccagcacttcctccgccagcttaagggtgggacagggacgggccacgcccgcacagtttaccagtatatcaatatgcccgtatgtttcatgtacataatccgccatggcgaatatctgccctctgtcccgcagattaatctgataaaactctgccgtggggccgatgtccatggcagcctttctgccctcttcctccagcacgtctgctatgaccaccctggctccttcatccgcatatctggaagcaattccaaacccgattcctctggctccgcctgtcacgatggctgtctttccatttaaccgtcctgattccatatctctaccaccatttaatcttgtctgttatatagtttcggtactcaataaaccgtgaggatgtgatattcctgggtcttggcaggtcaatccgtacctcctcctttattttagccggtttgttgctgagaatcagcacgcgctccgccagatacacggcttcctctatattgtgggtgatgaataccaccgtgctccccagctccttccacaggcgtatgacctcatcctccagataaaatcgcatcttcacatccatctgtccatagggctcatccatcagcagcaggtccggctgcatggcaaaggaacgtccgatgatgattctctgctccgctgatacggacagctcacccggatacgccttcctgaactcccaaagtcccatcaggtccagtatctgagccaccctgcggtcgatttcagccttggggattctcttaatcttaagtccataggccaggttatcctccacggtcagccacggaagggcgcttggctcctgaaacacaaaggaaatgttatgcttgcgtgggtccgcagggactccgtctatatacaggtcgccctcactgggcatatgaatcctggtaaggcagtttaaaaacgtggtctttccgcagcctgtaggccccactacacacacgaactcgcctttgcggatgttaaatgacatattatccagcaccagcaggtcgccgaatcgctttgtaagattcctgacctcgacttttatgggccgggtatcctctctctcaggcattcttgtcctcctatccaaccgttcagacggcccatcctctttcccggtttacccgccgtctgaactgttaccattaaattgctaaatcagtgttgtcggaaataaccgtacgcagcttcaggaattcctcgcttaccatatcccttggcctcggtatactgatgggatatacctcctttacagtggccgggcagtcgctgagaaggataattctgtctcccagatagcaggcttcctctatattgttggtgacgaatatgacggtacgcttttccttttcccagattcttaagatttcctcctgcatctggtaccgggtctgggcatccaactgtccaaagggctcgtccatgattaacagcttggggtccgccgcatacgccctggcgattcccaccctctgcttcatgccgcctgacagctgggtgggataggatttctcaaatcccttaaggcccaccagctctatgtaatgctgtgcaagctccctgcgctgtcccttggacattccgcgaaatttaaggcccagctccacattttccataaccgtcttaaagggcatcagggccagcttctggaacaccatgctgatttccgggtttacgcccttccactctctgccgttgtacacaaccgttcccccggtctgctgctccagccccgcgatgatattgagcagaacggtcttgccgcagcgccccggccccaggattaccagaaattcgccgtcgttcacatcaaagctcacatcttttatggctgtaaaatatcccttgtcgctgaaaaacgtcttggatatcccatttatttccattcgtttgtttagttgttccacgggcacaccaccttctcaagtttttgaagccccagtgacaaaagggcgccaataattgcaatggttatgacagagacaagtaccagggccatatcgcttccctgccagcctctggtcaccagtgctcccagtcctttccgggcgcctagcatctcggccgccagtaccgttgtccagcctgagctgaccgaggtgcggattcccgcaaagatggagggcagggcagtggggataacgatatccgtcagtatctgcctgttatttccgccaaatacatggcctacatccaaattaattttatccaccatctcaattcccgtggaggtgttgatgactaacggcacaaaggttccgataaacaccagcagtacctttggaaattcaccgatgccgaaccacatgattacaatgggaatccaggcaatgggcggaatggggcggatgacctcaaatatgctgccaaaaaatgccttgcatttcttattccatccaatgagaatgccaaaggaaataccaaaggcccacgcgataagcagtgccatgagtacacgccttaagctggcccatgcgtgtcctgccagggaggtctttgcaatgggtttggtaaatgttttcacaaaacgcgcccatacgtcagccggagcaggcatcagctccgggcggctgtccgagaacaagacccagcccacggcaatcatcaggattgccaatacaggcaggccgtagtacaggacgtttctcaatgttttctgctgtttgcttgctacatccatattccttactccctcctacctgtttaccttccagcgcaggaaatatttttctgccctggacaaaaatcctgaaagaatggctccgatggcgccaatcaccaccatacccacgattacaatatccggacgggccacggtacggccaatctgaatcatgtatcccagtccggcgctggctgccagcatctccgccgccaccagggtggaccaggaatttcccaatgccacgcggattccggcaaataccatgggaagggaggaaggtacccccactttccagaatatctccgcattggaggccccaaaggtcctggacacattgatcagcgtcttgctggtcagctttatgcctgtgtaggaattgatgacacagggcacaaaggcggtaaaaaagatgatgagcgcctttgccttcaggccaattcccatccacaccactaccaggggtatccaggcaatggggggaaccggcctcaccagttcaaagatggggcggataaaacggtccgcataggtccaccagcccatgaccagtcccaggggaacgccgatgatgatggccgccaggaaaccggataaggcaacctggagactggccagtatattcacccaaaggacgttgccgtccggggccttattcgcaaacttatacatcagggtctcaaaaatctgagtgggcgcgggaagcatcctttcattgacaagacccacacttactaccagctgccacacggccagcagcgtaatgatgcctgccgcgcttaacagggcgtaattcaggccttcctttgatttctgctttttccactccaaaaggccagcctctaatttctcatttccagttgccatatcggtatctcaactcctttttaatttgcggtttcggtcagtacctcatttaacagctttccatccgtatgtcccacgaatctctcctggtcgccttccttgtagttgcccacgctgatgaagaaatcaagtacgtccagaagtctctggtccagaaccgtattgtcggaaccctcttccttgtcattcagcatgccgcatgcctcataaagggtgtaatatgtatcggcctccagatattttgcggttgtctccctgtccatggagcttccgttctcatcattcatgtccacacagtagtcaatggccttttccttgttctccttcatccagtccatggtcttaaagtacacctccatgaataccttcatggcctcgtatttatccggatccgcgtagctgttcttatttgccacaaagctgcacatcagaccggagtcagccatgggaccgctggccacaggcgtatacttatcggattcggccagcatcttgaaggtgccgccagatcctgtcagtacgcacacgtcgccttcgccggccagaaatgcgctgtaagccgttgccgggtccatggcgatgaagttcacgtcgtcaaccgtaagtccaaagccttccagtaccttaatcagcacatactgggtaacgcttcccgtgttgcacaggatggattttcccttccagctgtccgcgtccccgtaaatttcatcactcaggttgttatgtccctggccggctttcacgatatccgaatcattcctggcaaatacatactgtgttccgtcatccgtattgccggagccaaggaccagcgcatcgtatcccagaacacctgcgaacacgccgcccacgccggtacagccgatatcccatccgtcagatgaaagggattccatctgcaccgggccgttggtgaacagcacttcctcaatatccagtcccttttccttaaaccatccttcctgctccgctatgtagataggaagataattaaggctgcctccaatgccagacaccgtaagctcatagctcttgtccgctgttttgccgtcacctgctcccgatgcctgagcctgtgtatccgccttcttggaatccgaacctgccccgcagcctgataccagtccggcacacataactgctgccatcgtgactgccaatgtctttactaatgattttctcataacgtttgacctcctgtccccaaatggttctctcatttttgctacatgttttgcgtaataaacagccgcctttaccctttataaaagttgtatatttttttctttctttctgttaaatagttaacatttaaaccattcaaacattatgtattcacgatacattatttatttttgactatttattacccaacttgcaaagtcattatagcaatatgaccatttcaaggcaaggcaattcaaaccaaacgtttgcgtaccaaactcccttgaaaaaccattgatatactttgattatcccccctttcctccattttctccgatattttttacgcaaacgtttgtgtattattttatagtaatccatatttattttttgtatacttaaagcaaataaatgagtcatttgcttgaaatgccccagaagaggaggctagacatgacattaaaagaaatcgcccgggaagcaggggtatccatctccactgtctcccgggtcataaacaaaaacagcaccaatgttgccagcaaggaggtccaggaccgcatctgggagattgtccggcgcaccggctataccccaaacgccacggcccgcagcctgaaaacaggggcggctaaagccgttgacgctcccacccgctccattgcctgcctttacgccagggccgaagattccaactcagacctttttttctccacgctggcccgcagtattgaaaaggaagccttcaagcacaactacgtattaaaatactcctttaccgccatcgacatacaccaccccaatacattccgtctcataacggataaccatgtggacggcgtagtggttctgggccggtgtgacaaacagacactaagctttttaaagaaatattttaactgcgtggcctacacaggtctcaacctgttagaggccaagtacgaccaggtaatctgcgacgggtatcaggccagcctggctgccatgaatactctcatcggcctgggacatacaagaatcggcttcataggggaaacacagtttgaggacaggtacaccggctactgcgctgccctaagcgcccacaatctgcgtccggctaaatcctatatcgtcaacgtccccctgtcctccgagggaggatataaaggggccaaggagcttctgtcccgcaaaacggatgtgtccgccgtgttctgctgcaatgacaacacggccataggcgctatgagggccatcaaggaagccggtctggcgattccggacgacctttccgtcatcagcatcgacgacatagacacggcccagtatctctcccccatgctcaccaccatccacataccggtggaagaaatgggacagatgacagccaaaatcctcattgaccggattgaggaaggccacaagcttcccatcaaaataaaccttcccttctatctggcaaaccgggaaagctgcgccccctgctccgaaaaaacgtccgccgcagaacacgaacaaacaatatcaagaaaagaggaataaaccatgctgattacaattaaggattccaggataactgctgtcattgactccacaggcgcccagcttatttccctgagggacgctttcggccgtgaatacatctggcagcgcgacccaaaatactggaaaaagtgttcccctctcctgtttcccgtggtgggcaactgccggaatgacaggaccatactggaggaccgcatatacgccatcgaaaaacacggcttctgccgtgaaagggactttgacgtgtcacaggagacctcatcaaaggcagtgttctccatgggtgacacgccggacacacacaaagcatatccctacgccttccgcctctccctggcatatgagctgaaggacggcatgctgttcatgaaataccaggtggaaaacagggaccagcgcgacatgtggtacgccattggcgcacatccgggatttaactgtcccatggaggagggctatgcctttgaagattaccagctggtatttgaaaaggaggaaaacactgtcagcataccctatgatttggaccagctccactttgccccctccaagacaggtaccacgctaaagggcagcatcctgtccctgagccgggaaatgtttaaacatgatgctgtattctttgacaggctgaattcccgggccgtatccatcctcaatccatccaccggacgcggcgtggaggtgggattccccggctttgaaaccgttgccttctggaccttgtgcccggaaccggccccttacctctgcgtagagccctggaacggctccggcatctatgagaatgaggacgaccagctctcacataggcatcacatacagcgtctctgtcctggggacagctgcagctatgtcatgaccatacgaatactggaatgattttctgagcaataaaatagtgataatatgaaaccggccccgcattctattttcctgaatgcagagccgttttttaaccttaagtttcttccggtctcaacttatttttgacacagtacccgcgtatgccgtcatacgcgcggatccgcctctgccagaagagatagatttaaccctttacttttgctatactcagttatatccaatacctccctttatcccctactattttacacgcgaatttccccggccaatccttcgacatttagcgacataatttatcgttttttgtcgtcctgtccaacttgataaaccccccatccccggtttaactttacaggagtcaaacgatatcgggaggaatcatcatgaaatacgaaagagaaacctgcaacctgctccggcgcctcggagtcaacaactcctacgtggggttccgctacacagtatatggtgtcatccgcgctattgccaatccggagctgcttatctacatctccaaaggactctacgtggaaatatccgcggaatatcatacgtccattggctgtgtggagcgcaatatacgcaccattatcagcaccatatggctgcatggagaccggcagcttctgaatcaggtcttcggcttcgagttggaacagaagccccgaaacggcgccttcatagatgcgctctcgcattatgttgtagaacactattacgactgattttacaaaatcataagggagaagagaatacaggcccggtaaccatcgggtctgtttgctgcgctcatataccattaccggcagcttcccatctatggtgtttttattggaaacaaaaaaagccctgcagatacaggactcttacgtatgcggctaacaggactcgaacctgcacggtttcccaatgggacctaaacccatcgtgtctgccaattccaccacagccgcaaatataaaaaatgcgggtggccggacttgaaccggcacggtatcgctaccgagggattttaagtcccttgtgtctgcctattccaccacacccgcagattgctacatgacacagccatatgcagatataaaacaaatggggcctacagggctcgaacctgtgaccctctgcttgtaaggcagatgctctcccagctgagctaagaccccaaattgcatatgttgtatcgcattataaaatgcaaacgacccggaacgggttcgaaccgtcgacctccgccgtgacagggcggcgctctaaccagctgagccaccgggccattatttagatgatatagttctcattctgctttagttaggaagagtggaccttcggggactcgaacccaggaccgaccggttatgagccggttgctctaaccaactgagctaaaggtccgaactatataatctctaacattgtttactgttgtacagtaaaagccgatgatcggactcgaaccgataacctgctgattacaaatcagctgctctgccaattgagccacatcggcatatcataaactggtcaaatgaccccaacgagattcgaactcgtgttaccgccgtgaaagggcgatgtcttaaccgcttgaccatggggcctgaataaggtagtggtcgccatggacttccactaaaactccccgagtaggacttgaacctacgacagcgcggttaacagccgcgtgctctaccgactgagctatcgaggaataatgatacgcttattgtactttgcgctgaccaaatcattatacaataactttgccaaaatttcaagcacaattataacattttacgtaccctcaaaaccgcatattgaattccgattgcttcacaaaccactttttcccttaacctttttggataagccctcgaccgattagtattagtcagctacgtacattactgcacttccacctctaacctatctacctcgtcgtcttcaaggggtcttactcgctttcgcgatgggatatctcatcttgaggggggcttcacgcttagatgccttcagcgtttatcccgtccagacttggctaccctgccatggccttggtaggccaacagatacaccagcggtctgtccatcccggtcctctcgtactaaggacagctcctctcagatatcctgcgcccgcgccggatagggaccgaactgtctcacgacgttctgaacccagctcgcgtaccgctttaatgggcgaacagcccaacccttgggacctgctacagccccaggatgcgatgagccgacatcgaggtgccaaaccactccgtcgatgtgaactcttgggagtgataagcctgttatccccagggtagcttttatccgttgagcgatggcaatcccactttcataccaccggatcactaagtcctactttcgtacctgcccgacccgtcggtctcgcagtcaagctcccttatgcctttgcactctctggatggtttccaaccatcctgagggaacctttgagcgcctccgataccctttcggaggcgaccgccccagtcaaactccccgcctgacattgtcccccgcccggctcacgggcgcaggttagaaacccaatatcgcaagggtggtatcccaacattggctccacacagactggcgtccatgcttctcagcctcccacctatcctgtacatgcaataccgaatcccagtatcaaactggagtaaagctccatggggtctttccgtcctggcgcaggtaaccagcatcttcactggtatttcaatttcaccgggtgcattgttgagacagcgctcaaatcattacgcctttcgtgcgggtcggaacttacccgacaaggaatttcgctaccttaggaccgttatagttacggccgccgtttactggggcttaaattcaaagcttcgcttgcgctaacctctcctcttaaccttccagcaccgggcaggcgtcagcccatatacctcaccttacggttttgcatagacctgtgtttttgctaaacagttgcttgagcctattctctgcggccacatctctgcggcaccccttctcccgaagttacggggtcattttgccgagttccttaacaatgcttctcccgccggccttaggattctctcctcatctacctgtgtcggtttacggtacgggcatgtatcacacgatagcggcttttcttgacagccggaatcacacacttcgctacttttgttcgctccgcgtcacgtattcggattgcacggcggtttttccagccgtactcctaccacgcttgccccggtattcccattcccgggatgtgctgtccttctgtgtccccacagttctgatgatacacggtacaggaatttcaacctgttgtccatcgactacgcctctcagcctcgccttaggccccgacttacccagagcagatcagctttactctggaaaccttggatattcggcctggaggattcccacctccatctcgctactcattccggcattctctcttctcagcactccacggctccttaccggtaccgcttctccgtcctgagaatgctcctctaccaatgtcttacgacattcctaagcttcggtgttgtgtttcagccccggacattttcggcgcaggacctctcgactagtgagctattacgcactctttgaatgtgtggctgcttctgagccaacatcctagttgtctttgaaatcccacatccttttccacttaacacacactttgggaccttagctgtaggtctgggctctttcccttttgactgcccaacttatctcgtgcagtctgactcccatacatcatttacgcggcattcggagtttgatatcccttggtaagctttgacgcccccttaggaattcagtgctctacctccgctaaactaatatgaggctagccctaaagctatttcgaggagaaccagctatctccgggttcgattggaatttctcccctatccacacctcattcccacccttttcaacggatgtggatccggtcctccacggaattttacttccgcttcaacctggacatggataggtcacccggtttcgggtctgcctgtactgacttgacgcccatttgagacttggtttcccttcggctccgagccttaagctcttaaccttgccagtaccggcaactcgccggaccgttctacaaaaagtacgcggtcgcaccttaacgtgcttccacagcttgtaaacacagggtttcaggttctttttcactcccctcccggggtccttttcacctttccttcacagtactatgcgctatcggtcactaaggagtatttagccttggagggtggtccctcctacttcccacaaggtttctcgtgtctcgtggtactctggatcctgctgcttcctattgctttcgtgtacggggctttcaccctctccggcctgacttcccagacagttccactaacaattcggttcacgtacgcagtccttaaccccagcatgcacgcacgctggtttgggctcttcccatttcgctcgccgctactttgggaatcgatgtttctttctcttcctccggctacttagatgtttcagttcaccgggttccccctgcatggctatggattcaccatgcagtgactgaggtttgctcagccgggtttccccattcagatatctccggatcaaaggatatttgctcctccccgaagcttttcgcagcttatcacgtctttcatcggctcttagtgccaaggcatccaccctgcgctctttatagcttaaccaaaatgattccccgcggcgggttgccgcggttcctctcacgtccatagcgttggacgctttggttctaggtttgtttataaacgctttcgcatttacaagtttgtttcttccatacaatctcttgtatggcctcggatgtcttgatattctgattttgaatattcaattcatttttattcaatatgcggttttcaaggtacgtatgcagaatcgaatgtttggacttgtgttggaagcttgcttccataagcaagtctgaatattcggttttgcagcgtgcctgcacgcgaccgaaagaacgaagttcttgaggtgcatacgtgacacgtatggtatgcttccgtcacttccgaggtttccggtttagccttcttcctcacagtcacttcagcaaatggagatggagagattcgaactcttgaccccctgcttgcaaggcaggtgctctcccaactgagctacacccccatggaaatctggcacccacctgctctcccatgccgtctccagcatagtaccatcggccgcttaagtcttaaccatcgtgttcgggatgggtacgggtgtttcccctaagcgcatcggcaccagaatttctttgtgtccttttcattgaacactagacagtatctaaaacccttacttcttcttccttagaaaggaggtgatccagccgcaccttccgatacggctaccttgttacgacttcaccccagttacctgccccgccttcggcagctccctcctttcggttgggtcactgacttcgggcgttgctgactcccatggtgtgacgggcggtgtgtacaagacccgggaacgtattcaccgcgacattctgattcgcgattactagcgattccagcttcgtgtagtcgggttgcagactacagtccgaactgggacgttatttttgggatttgctccacatcactgtctcgcttccctttgtttacgccattgtagcacgtgtgtagcccaaatcataaggggcatgatgatttgacgtcatccccaccttcctccaggttatccctggcagtctccctagagtgcccaccttcacgtgctggctactaaggataagggttgcgctcgttgcgggacttaacccaacatctcacgacacgagctgacgacaaccatgcaccacctgtctcccctgtcccgaaggaaaggccgcgttaccggcccgtcagggggatgtcaagacttggtaaggttcttcgcgttgcttcgaattaaaccacatgctccaccgcttgtgcgggtccccgtcaattcctttgagtttcattcttgcgaacgtactccccaggtggaatgcttactgcgtttgcggcggcaccgaagggctttgccccccaacacctagcattcatcgtttacggcgtggactaccagggtatctaatcctgtttgctccccacgctttcgagcctcaacgtcagttatcgtccagtaagccgccttcgccactggtgttcctcctaatatctacgcatttcaccgctacactaggaattccacttacctctccgacactctagcaaaacagtttccaaagcagtcccagggttgagccctgggttttcacttcagacttgcttcgccgtctacgctccctttacacccagtaaatccggataacgcttgccccctacgtattaccgcggctgctggcacgtagttagccggggcttcttagtcaggtaccgtcattttcttccctgctgatagagctttacataccgaaatacttcttcactcacgcggcgtcgctgcatcaggctttcgcccattgtgcaatattccccactgctgcctcccgtaggagtttgggccgtgtctcagtcccaatgtggccggtcaccctctcaggtcggctactgatcgtcgctttggtgggccgttaccccgccaactggctaatcagacgcggatccatctcacaccaccggagtttttcacacactgccatgcggcactgtgcgcttatgcggtattagcagtcatttctaactgttatcccccagtgtgaggcaggttatccacgcgttactcacccgtccgccactcagtcaatcaagattccatccgaaaacttcatcttaattgcttcgttcgacttgcatgtgttaggcacgccgccagcgttcatcctgagccaggatcaaactctcatgttcaaaagttgattccaggttttcagactacttagcttggctagttatctttaaccttcattacttggttttgttctgaattttctcaaatcctaaggtctaaaccagaccttttgtttttagaattttcagggttttacatactgtctaatcttcaattatcaaggttctttgttgtcgtcttgttcagcagcaacttttatatcctatcacagtcgcttgtgtttgtcaacaacttttttcatttttttctttcttactctcttgcgcttttggtactcaccgcagcgcaagagatatcttaccagatgcttcagcaaatgtcaacagatattctcaacttttttcattttttgcgtttttccatatccaggccctctcaatccctatgattttcctggtttaaccggcttaaatccgatatgacagaacgcataaacatgggattcttcttatattcagccatactgctttcctcgcatatggattcaaatagcttttgaggactttctttctgcattcgccccctgtacgcctctgtacactccctgattttagagattcttgaacgcccgccatgaatcatgtgcattcctgtccttctgtcgtagaccttatcccacgcaggacaatacaggtcaacctcctccagtccttccagacgccttaatgttgcttcgctggcatgagagttttcataaatcagagcatccgacggatccggaatggcatctccggtaaaaaggattttctcctccctgtaataaaagcacagtgattccttggaatgaccgggtgctcctattacctgaatggtaattccgggttccagatacagcaggtccccgtctgacaggatattgtccaccggaacagaaccatccaccagaccataaaagccaggtatgggccgcttctcatattgcaggtctatatcttcaatccaatccctctcccccctgctggcatatacgcagcaggaatacctttcctttatggattttagggctccaatatgatccggatgggaatgggtcaacagtacagcatttatattttctctgttttttccaaatttatgtatatattccccaatttttttatcacatccttttactcccgtatctaccaggtaacagccctcctttcccattataatatacacatatacatacctcgcgatttcaggtgtaacattaaactgaatgagcagctgatgaactctgtcatatattttcatcccattttcccctctcttttatccctgtcatccccatacatttcaccggccgtgataatgacagcctggctatccactgtattttcccttttactcatgatccttctgtattcctctgaagaaaaacaccggtctatgctctccctgtccggaaaccatatcataataaagcggtccggacgccagtctttccccatatattcaatcccttcgcttctcaccacatacctccctccgtgtttctccactataggcctgaccagttttatgtaatcgtcataatctgcccggtcttttcctggctccagggatacagaaataataaagtagcagctcactttttctcccttctttgcaagtgaacacttgcatatctgataaaaataaatggcaccgcatggtaccatatatttttatgtttacttggccactccatggataaatgcatctaccatttttacaatatactcatctgcctccatctcagtcaaaccgccgccaaaggaggccttaaaaaatacaaatccaaaatttaaggataaaaacatcatcgccatgttctcgtaatcatccgatataagctttcccttatcatacatttttctgagatattccataacaccggttttaaagaccagaggaatggctaagattccttcccttgtatcttccgccagctccggcgtacgcagtcccagagagagcttgacaaactccggcgtgacctttttcatgtaaatgcgggcaaattggcatagatcctctgtcagattccccgtctcattcttaaagtcttccggttccaaatccggatgccatcttttctgttccatggcctgaagcacaatttccttctttcccttaaattttctaaagatggtacactcgttcactccggcacgtttggcaatatcctttgtagtggtagctgtatatcctctctccactaccaattccatagctgcatctataatattctgtcctgtctggtccatatcaccctcccgcaaaagcaagtttacacttgcattatacagtaatctcttccttctgtcaagagcgcctgtcacaaaaaggccaagctgttcattattccatccgtatccaggggcgaaataacgccgccgaatatgaccatctgcactctgcctccactgattctggcataaaccttcaaaaatcccggtatgcccagggaagatgcatccatatagtgataacagtaccaagagccgctggcaagatgactggctttcttggactggggtgcccccaactccgcttccacagctgtatccagtactctttcctggtatgtatataccagttctgcatatcctccaaagtccgccagtgattccgacatgatacagataaggctgctgccgtccacactggtcatatagattcccctctcatcagaggaatgaaatacaaacccaccgggaacagtgacaaccacattgtcaatctgctttattgcgctgctgtcctggctctgttcctgcacccgaatctgttcctgagtctgtaccacgccgccctcaatccatgccccctgtgcgtcaacgctgtatccatccggtgtctgaacgctctggaggcagtaaccgtcctcattaaaatagtaacattttccatctatccaggaccattcgctttttaaatacgtgccattctcattctggtaccaccagccggtatcatcctgcctccactggcctgccaacgcactcatgctcacagccgcagtggcaaataacaccgcaattaccatcttccagcaccttttcctatcagctgctctcttattagttactctcatttcagttactctcatatcagcttccctcccttagtcttatacttccaatatacttctcttttccagggacaagaacctaaaatgaactaaaatcatactttaagatggtaaatacaaaaacaaaaaaaccggagcaccttgtaaaaaaataaatacaaagctccggttaaacaacaaaaaagcgcgagacgggattcgaacccgcggcccccaccttggcaaggtggtgctccacccctgagccactcgcgcgtaaatgttattattttatttttaaagtcggggtgacaggattcgaacctgcgacctcctggtcccaaaccaggcgctctagccaagctgagccacaccccgtcatcaccgtgtacataaatatatcacagatgatataaaatttcaagtacttttacgtaccctcaaaaccgcatattgaattccgattgcttcacaaaccactttttcccttaacctttttggataagccctcgaccgattagtattagtcagctacgtacattactgcacttccacctctaacctatctacctcgtcgtcttcaaggggtcttactcgctttcgcgatgggatatctcatcttgaggggggcttcacgcttagatgccttcagcgtttatcccgtccagacttggctaccctgccatggccttggtaggccaacagatacaccagcggtctgtccatcccggtcctctcgtactaaggacagctcctctcagatatcctgcgcccgcgccggatagggaccgaactgtctcacgacgttctgaacccagctcgcgtaccgctttaatgggcgaacagcccaacccttgggacctgctacagccccaggatgcgatgagccgacatcgaggtgccaaaccactccgtcgatgtgaactcttgggagtgataagcctgttatccccagggtagcttttatccgttgagcgatggcaatcccactttcataccaccggatcactaagtcctactttcgtacctgcccgacccgtcggtctcgcagtcaagctcccttatgcctttgcactctctggatggtttccaaccatcctgagggaacctttgagcgcctccgataccctttcggaggcgaccgccccagtcaaactccccgcctgacattgtcccccgcccggctcacgggcgcaggttagaaacccaatatcgcaagggtggtatcccaacattggctccacacagactggcgtccatgcttctcagcctcccacctatcctgtacatgcaataccgaatcccagtatcaaactggagtaaagctccatggggtctttccgtcctggcgcaggtaaccagcatcttcactggtatttcaatttcaccgggtgcattgttgagacagcgctcaaatcattacgcctttcgtgcgggtcggaacttacccgacaaggaatttcgctaccttaggaccgttatagttacggccgccgtttactggggcttaaattcaaagcttcgcttgcgctaacctctcctcttaaccttccagcaccgggcaggcgtcagcccatatacctcaccttacggttttgcatagacctgtgtttttgctaaacagttgcttgagcctattctctgcggccacatctctgcggcaccccttctcccgaagttacggggtcattttgccgagttccttaacaatgcttctcccgccggccttaggattctctcctcatctacctgtgtcggtttacggtacgggcatgtatcacacgatagcggcttttcttgacagccggaatcacacacttcgctacttttgttcgctccgcgtcacgtattcggattgcacggcggtttttccagccgtactcctaccacgcttgccccggtattcccattcccgggatgtgctgtccttctgtgtccccacagttctgatgatacacggtacaggaatttcaacctgttgtccatcgactacgcctctcagcctcgccttaggccccgacttacccagagcagatcagctttactctggaaaccttggatattcggcctggaggattcccacctccatctcgctactcattccggcattctctcttctcagcactccacggctccttaccggtaccgcttctccgtcctgagaatgctcctctaccaatgtcttacgacattcctaagcttcggtgttgtgtttcagccccggacattttcggcgcaggacctctcgactagtgagctattacgcactctttgaatgtgtggctgcttctgagccaacatcctagttgtctttgaaatcccacatccttttccacttaacacacactttgggaccttagctgtaggtctgggctctttcccttttgactgcccaacttatctcgtgcagtctgactcccatacatcatttacgcggcattcggagtttgatatcccttggtaagctttgacgcccccttaggaattcagtgctctacctccgctaaactaatatgaggctagccctaaagctatttcgaggagaaccagctatctccgggttcgattggaatttctcccctatccacacctcattcccacccttttcaacggatgtggatccggtcctccacggaattttacttccgcttcaacctggacatggataggtcacccggtttcgggtctgcctgtactgacttgacgcccatttgagacttggtttcccttcggctccgagccttaagctcttaaccttgccagtaccggcaactcgccggaccgttctacaaaaagtacgcggtcgcaccttaacgtgcttccacagcttgtaaacacagggtttcaggttctttttcactcccctcccggggtccttttcacctttccttcacagtactatgcgctatcggtcactaaggagtatttagccttggagggtggtccctcctacttcccacaaggtttctcgtgtctcgtggtactctggatcctgctgcttcctattgctttcgtgtacggggctttcaccctctccggcctgacttcccagacagttccactaacaattcggttcacgtacgcagtccttaaccccagcatgcacgcacgctggtttgggctcttcccatttcgctcgccgctactttgggaatcgatgtttctttctcttcctccggctacttagatgtttcagttcaccgggttccccctgcatggctatggattcaccatgcagtgactgaggtttgctcagccgggtttccccattcagatatctccggatcaaaggatatttgctcctccccgaagcttttcgcagcttatcacgtctttcatcggctcttagtgccaaggcatccaccctgcgctctttatagcttaaccaaaatgattccccgcggcgggttgccgcggttcctctcacgtccatagcgttggacgctttggttctaggtttgtttataaacgctttcgcatttacaagtttgtttcttccatacaatctcttgtatggcctcggatgtcttgatattctgattttgaatattcaattcatttttattcaatatgcggttttcaaggtacgtatgcagaatcgaatgtttggacttgtgttggaagcttgcttccataagcaagtctgaatattcggttttgcagcgtgcctgcacgcgaccgaaagaacgaagttcttgaggtgcatacgtgacacgtatggcatgcttccgtcactttcaaggtttcaggaccagccttcttcctcacagtcacttcagcaaatggagatggagagattcgaactcctgacccttctgtctttgcaacagccattcttccagaagaacgatatgataatcatacagggctacccttataaggcaatctcttattcagtttactacatgggcttaagtggactcgaaccaccgacctcacgcttatcaggcgtgcgctctaaccggctgagctataagccccggttaattctgcaaaagccaagctgtcacatcattaccttgctgtatatgttctcagtgatagcgaagccactgttcactgcaaaacttcttttaaaatccggcagccacctgctctcccatgccgtctccagcatagtaccatcggccgcttaggtcttaaccatcgtgttcgggatgggtacgggtgtttcccctaagcgcatcgccaccggaaaattttaagcaccttgaatcaaggactcaataatacataaacccctacttcttcttccttagaaaggaggtgatccagccgcaccttccgatacggctaccttgttacgacttcaccccagttacctgccccgccttcggcagctccctcctttcggttgggtcactgacttcgggcgttgctgactcccatggtgtgacgggcggtgtgtacaagacccgggaacgtattcaccgcgacattctgattcgcgattactagcgattccagcttcgtgtagtcgggttgcagactacagtccgaactgggacgttatttttgggatttgctccacatcactgtctcgcttccctttgtttacgccattgtagcacgtgtgtagcccaaatcataaggggcatgatgatttgacgtcatccccaccttcctccaggttatccctggcagtctccctagagtgcccggctctacctgctggctactaaggataagggttgcgctcgttgcgggacttaacccaacatctcacgacacgagctgacgacaaccatgcaccacctgtctcccctgtcccgaaggaaaggccgcgttaccggcccgtcagggggatgtcaagacttggtaaggttcttcgcgttgcttcgaattaaaccacatgctccaccgcttgtgcgggtccccgtcaattcctttgagtttcattcttgcgaacgtactccccaggtggaatgcttactgcgtttgcggcggcaccgaagggctttgccccccaacacctagcattcatcgtttacggcgtggactaccagggtatctaatcctgtttgctccccacgctttcgagcctcaacgtcagttatcgtccagtaagccgccttcgccactggtgttcctcctaatatctacgcatttcaccgctacactaggaattccacttacctctccgacactctagcaaaacagtttccaaagcagtcccagggttgagccctgggttttcacttcagacttgcttcgccgtctacgctccctttacacccagtaaatccggataacgcttgccccctacgtattaccgcggctgctggcacgtagttagccggggcttcttagtcaggtaccgtcattttcttccctgctgatagagctttacataccgaaatacttcttcactcacgcggcgtcgctgcatcaggctttcgcccattgtgcaatattccccactgctgcctcccgtaggagtttgggccgtgtctcagtcccaatgtggccggtcaccctctcaggtcggctactgatcgtcgctttggtgggccgttaccccgccaactggctaatcagacgcggatccatctcacaccaccggagtttttcacacactgccatgcggcactgtgcgcttatgcggtattagcagtcatttctaactgttatcccccagtgtgaggcaggttatccacgcgttactcacccgtccgccactcagtcaatcaagattccatccgaaaacttcatcttaattgcttcgttcgacttgcatgtgttaggcacgccgccagcgttcatcctgagccaggatcaaactctcatgttcaaaagttgattccaggttttcagactgcttagcttggctagttatctttaaccttcattacttggttttgttctgaattttctcaaatcccaaggtctaaaccagaccttttgtttttagaattttcagggtttgtgtattattcagtcttcaattttaaaggtacgatggaagcaatgcttccgaccgcagaaggagggatttgaaccctcgcgccgctactaacgacctactccctttccaggggagccccttcaacctcttgggtacttctgcttggttgaatcttgattcatattcaatttatattcgcaggcaaatcattaaaactcgtctgcagcggagagggtgggattcgaacccacgcgcccttgcggacaaacggttttcaagaccgcctcgttatgaccacttcgatacctctccgaacgcgcttttccattttacagaagtttcgacgttttgtcaagtatttttttattttttcaaaattcttatttctgaattttgtgtttcgttggcgttttcagcgacaactcgattagtttatcatgtgattcgacagatgtcaacactttttttgacttttttccgcagcatttttttcgcgggctgagatttcataaatcaggaagtcccagcctgcattaccatttatttggacatgtcaattcctggaatacttctatatatccttatccacaacccaacgatctaactgtttcagaaattttctatcctccgaaaccaccttgactggttttttataatctatagccatcagtcctaacacggattttccatcagcaatctgattatccattgtatgtactccaatatctagtataactcgattttaataagtttacattattatcctgaaaaccaagggaaacgtgcgcccaaagcacggacacgtaagccaagaaatcagattactaccaatgcttaaattgtaaacttatttaaatcgagttatactagaggagatgcacatgccagatgcataaaatcccttaagtcattggatgtatacagcataatttcacgtaccatattgatacctcctttttcggacatagtataacatctgaggataaaatatataatatccaattatgattttatgtaattccattgcgttaaagcaacacgtaactcatccttttccgctgccgccttttcaaatgcttgtccactcatcacaatgtcgatagcctggcgcatagcccgagcccctgccgccgcaccacaaggatgcccctgaaccgctccccccgccgccaggaccacatcttttcccacttctctgatatatttttccaccatcccaggatgaactccccctcctatggacggcatggaggtcttaatatcatagaaaggaagcgtgagttgggccactgtctgcatatacttttgatgaagaagcggataccccccataaggtgtattaatcattacaatatcagctccggcaagacgcgcaagctttcctacagcaaggggcgatgccattccattcatggttccttcaaaacacattcctgtgcccgccgaatggcccagtatggggagagccgtatgctctgccacatacttaagcacactgtatcccatagccgcaaaattaatcataagtccatccgcaccggcttcctctgcacgttttacattgtcaatgatttcacccgcaccactggttatgttaacaaaatatttcacccgttcccctgtcttttcataggctgcctcggccgcttctctatatgctcttacgcgttcttccggcttgctgtaaacaggatttccgaatagctcatcatctttaataaagtccgcaccgccaagtgcagtctcataaaatatccttgccccttcttttggggtcagtcctgtacacggttttatcatattcagcaaaatcggccggtcatttattccggcaaaattctgtattcctttaatcccatactgtggtcccctgaatttacgggcaaactcctcggaaaactcaatatccaaaagttttgcctgggctgaggtggatgcatcattacctaaaagggccgtaatcagcagtggcaggtctgtgccaaaattcacagaaggataggcaatctgaatcagatattctctctggtcttcggtaatctgagtagccaactccagtgagggcacatcaaatacgttcaccaccttccccatatacttttcgcgaatctcctccgtaattccaggaatcggaatccatgttccaatggtctgccccactgccagggttgccgccttcttcaggatgtccacttccctcggcaaccttgtataataagttgctattacataattttgtttgtgcactgtctccgataatgtataaagtaaagaatccatcttttctcctttaatccacaacgtccatatgcctggtaaagcaaaagagccaggcatcctgtttcgatacctaggctctgttatcactctctgtttctgctatatacttatatcacgatttacgcgttctcatgaaaatacacatccaaagaataaggaatattctccgttctcttcttcagattctgagctaataaatgactgattcgctcgctgtcccgatgtttcaaagcatccaaataactctgatgctcctcaatcatcctttccctggattcccggccttccaagagtttctgaccgtagatcaacttaaagaatgatagattatcccacagcgattctatcatcgcacagattctgtccagctggctgattttatagattgaaaaatgatataatctattctgctgatacacatcaattgcatcaagctcatcctgcctgacaatacgaatatattctgcgtgaatctctttcaggttctggatgtctttatctgtaatcttctcacaggcatactttgcggctaccggctccaatgccgttctcgctatgtatatctgccgcacatcatcctttgtcaatgtcacaagccttgtccctgcatatggaacagactcagcaagccctttcttttcaagattggccaaagcttcccgaatcggcatcctgcttactcccagctgagacgccaattcctcggtattcagcttgtctcccattgacagcttaccgctcataatccattccatcagcttgtccaaggccaagtccggaagcttgttatgttgaagcattcccctgtccagatcattcattgtaatacgcatattagatttcatatagctctcacctaagtaatatttacaagccaagcttcgaaacggtcacttttaaaatcgccacttgcgcggtttcttcaattaattctgctgtatgctctgcattaattgcatcttttccgactgccactaagccatgatccacaagtaaaaatccgggcaaatctgagttctctctatatatttcttccaccattgggaaatactctttctttaccatcgccgccgggacatctaacgttggtaaatccgcgctcatcttgagccgggcgtgccatgtagttctctttaatgcctttcccgtggacgcccatgcaatcgaatacggtgagtgtgtatgtacaacagcattcaccttgggacaaattctatatagcaagccgtgaagtaaagcctctcttgtaggttttccttccccttctactagatttccatcgaaatccgtgattacaaaaccttccggcgtactgtcgataaaagagctgccacttgccttcacaatcatcaaatctctcccaggcactctggcactcacattgccgccgcttccagtttgtatacctctagtatatgctcttttgcaggctatgacaagttcctctgcaatttttttaacatcttctgacattttccagaacgcctccctgccttaatattgtatttcatcacctatcgcaccacgctctttaagctcatccaccatatagtgggcggctttaatgccccaatcctttgtatccaagtttcccggtattgtaatgatttccacattgggattcctaatttgcttgtcaatattaaatagtatgttcttatttatcgttttatttttgtatataatttattggatttatttgtgaattgtatatagactacatgaaaatgcatttaaatcggtatgatataaaaaggagatacaagactatatttcatcctgtatcccctaaaccggatattcacagctacacaacggaatttcttagcacttcagccataaaaaggtcctcaggcgtcgtaatcttaatattggcataactacccattaccatatgcgccttcacccccatctgcgcctccaccaccatggcgtcatctgttatgccggtgcagtccgccttcatctggcgggcaaacgcctccacaatcaggggcacggaaaatacctgaggcgtctgtgcctgccacaccatgctgcggtccgggctggactcaatcatcccctcctggttcaccagcttgatggtatccttgacaggcatacccaccacgcaggcattataactgcacacagccctgtatgcccgctcaatgatttcgccggtaacaaaggggcgggccccgtcatggataaacacgtatccatcctgtctgtccctgcccgcggattccctctcctcttcttcccggtccatcagggtgcagagcgccttccatacgctctcgtacctctcgccgcccccagctcctatggcgctcaccttcttcagtccatacgcctccacgatctctgtcctcacatattccatatgtcctgcatctgtcatgagtatgatttcatctatcacaggagatgcttcaaacacctccagcgcataggctaccagcggcttaccgccgatttccatgtactgctttgccgttttcccgcccatgcggctgcctttccctgctgccaggaccacagccgtacaatatttcttttccattgcagacctcctccccagtccttcccggaccggagcgcgtttgctcattcatccccgccatctgtacgccctttagcgttcacccagcttcaaattgggaatggcattcaaatcccatccggatatattcccctttaaatactcatagtaggcagccgtcccgatcatggctgcattgtccgtgcagaaaataggagacggataatagaactgaagcccatccttctcacaggcctctgccacagcctttctcagcgcagagttggaggcaacgccgccggctatggccagcttcttatatccaaattcatgggctgccagtatggcgcggcttaccagagactccaccacggaattctggaatgaggccaccaggtcaggtacatggatttcttcccctgtcatgcgggcgtggttaatgtggttcagcacagctgacttcagcccgctgaaactgaaatcatagggagccccctccaccctgcccctggggaactggatggcgtggggattcccctcctttgcagtcttatcaatcttaggcccgccgggatatcccaggcccacagaccttgccaccttgtcaaatgcctctccggccgcatcgtccctggttctgccgataatctcaaattccccgtagtcctttacaatcaccaaatgcgtatggcctcccgacacaatcaggcacacaaagggcggttccaaatcctggttctcaataaaattggcggaaacatgcccttctatatgatgtactccaataagaggcttccctgccgcataagcaatggcctttgcctctgccacccccaccaaaagagcgcctaccagaccgggtccgtaggtcacaccgattgccgtgatatcctcaagagccacctgtgcttctgccagggctctctcaatcacataattgaccgcctttatatgctcccgggacgcaatctccggaaccacgcccccataaaccgtatgggtggcaatctgggatgaaatcacattggacagcacggtccttccgtttttcaccactgccgcggctgtctcgtcgcatgagctctcgattgccagtatcaaaacatcctctgatgcctgtcctatcatagtatcctctccacttccatgtatcctctggtaccctgtaccattctatcagtcctcatcaaactccagctccgccgtccaaccgtccctggcagcctttgcccttggaaaaatagatctgacttcctccatatactcctccggcctggtaagggaggggctgtaatgggtaagccacatctgtttcggattagcctgctttgcaagcgctgccgcttcataaaacgtcatatgcttatattccctggccttagccgctttttccttttccccgtacattccctcgcagataaagaggtctgccccggctgcatactctgcaatgaccggcaccggcctggtatcagtgcagtatgtcaccttaagtcctctgcggtccggtcccagcaccatatccggcgtcaaaagccgtccctcatgctctatctcttcgcccttttgcagcctgctccagaacttctggggaatctcctgggacctggccctctccacgtcaaaacgtcctgtgcgggggattgtgatggagtagccgtaacacagcacattgtggtttaccctgtaagcatcaatgacataagggcccatctgaatgtgttcccggttctccgtaagctccacaaaccgcagttcaaagggcagctccggcgcaatggtgcgaagcgcacccaccacccgttccagtcccttaggaccaatcagggtcagcggctccactcgttccgcattacccatggtaagcagaagtccgggaaggccgcttatatggtccgcgtgataatgtgtaaagcaaatgacatctatgggcttgggactccatcccttttccttcagggccacctgggtcccctcaccgcagtcaatgagcagattgctgcccgaacaccttgccatcatggatgtgagccagcggtacggaagaggcatcatgcctcctgttcctaacaaacatatatccaacatactgtaatcctcattctctcaataacttaactcacaaaatcatatcacactttcctcttaataatcaagtatcgccggaaaataacatggcaaacaccaacggcaggcacaaaaatggagctgccgcagcagcccccatatttatcttatataaatcctgtcccgcgaaaggttggataccaccagcttcataaccggcatgaagttttccccaaagctttccttgggaagcaccagagctgatgactcttctatataaaaggcaatgtccttcggggtggagacagccttctgtaccgtgttccagccatatgttctgacctgctcccccatcttctcctcgatgccgttttcatcaaatccgtactgtatctcggaatcatacctgggctgtcccatcatccgtcctgcctgaagcctgaggttaatgggcgtaaacataagaatcataacgccgaccgcaatatacacaaacgcctgatgcagctgtatggtctggtttctcaacaggaagcctccggtgataataaccgcaagacccaaaagattgaccaggaagccggatagccttgaatacgtattaaacagcagcaaatcatagataaactcagccttcatcctgaccttcacatataccttcattcaaatcatccctctcttaaatcaagcttttcctgcggcccatccctccggggagtaaatacccctcttattctttctcatccagccgtcaaaaaaggcagtgataaaggggcataggaacagcgttatgatggatgcagtggcgcactgggcagtagccatatccacatagggttccatggacgggtcagcctgggcaacggccgcaggcgtcatggccgagttcagcgcagtggtgcccactgccgcgcccatggcgttgcgttcctttttaggcagcagaaggttgaatacgaaaaagaacactacagccgttgccgtggatatcaggcccagcacaatacctgaggcgcctgccgtaaccagggttgacacatctgtcttggaaccaatagatatggtcatgaaaaatgtgacaataggctgggccgtcgcacaggcactgcgaaagcctttatccatatttccccagataaatccgatgagcaggggaatcaaagcagccaccagagccttaaacggaatggatgccagtcctgtggctcccagggccaccaaagtaaagaaggggccgtcattaagggacaggatagaaatagctcccgtatccgtggcattaccaaactgggatgacagtgatatgtacagcgaaccattggagttggtgatggctgcaatcaatacaaacggtgtcagacccagtatgcctgccggtccgcataaatttcccaccagaaggcccacggcaactcccaaaagaagcttgatgccggtcagggtaacgcccttatacagcggcatacctacctgacggatattgatggcggacccgcacacaataaggaacaatcccatcatggctgaattcccgtcatagaataaggctgttacatatcccccaatctgaaatgcctgggggaaaaatgtggctatgatgactgccagcaccagcggtatgatgaccagtcctccgggcagccttttcattttattcagtatgtcaaaatctttcctgttatcttccataaaaactctcattcctttcgcttcgcttaggcacaaaacagttatgaaatagcaagtttgtgcttccactattttatttttgatgttaaactctcctcagacagatacactacagagcacggaggaggaagtagaatcggttcctccatttgggatcaagtccgcataaaaacatgtgtcggctgtcttctcaagcacaaaccagtgacgccttgagctcgtaacctaatcattgtcaaagcaattccttaggtctttctttgctggacagccagtcaatgtctgtctattttacttaggagggctgttttatgttatctatcaaacactttgtctgctgtggcatggacgttcacaagaaatttgttgtcgctaccattgctctgacagactacaggggcgttacttcttatgttaaaaagcggttcgccaccttcaattccgatcttaattctttgaaaaaatggcttctttctttcaattgcactgagatctgcctcgaatccactggtaaatactggattccaatttttaatatcctggaggattcctgtcacgttgtcgttgctaaccccaagtatgtcagggctatcaaaggacagaaaaccgatgacaaagactccgcctggattgcggatctgtttaaatttgatattgttccttccagttatatcccctgtaaggaaattcgcatgcttcgggaattgttccgataccggcagaaactgattggccaccgcagcagtgagaaaaaccggttacagaatgctcttacggtttccaacattgcccttgcatccgtcctctcagatacctttggaaaatcagcgaccgccatcgttgactatatcctgacctgtgaggtatttgaccccgaatactgtaaatccctgcttcttaaaaaagcaaaggacaaggcagatgatgttgtaacctccataatcggttatgaactgcgccgtgaccaatccgttaagattaaggtctgcagaaagcatttcgatgaaatcaatgagtgcgtctccactctcgaagaaacgatttccgacctggctaaaccttaccataaatttatcgaattggctactacaattcctggaattacagagcagtctgccacctttatcattgctgaaatcggggtggatatggcggtattcaaatcctcaaaacgtttgtgctcctgggctgggctggctcctgaaaataacgaaagtgccggtaaaaagaagagcgtccatgtttcaagagccggggtgtacttaaagcctctgctggttcagtgtgcaaatgctgccatcaagagtaaaaacccttacttcagatacaaatatgaccgtataaaaaaacgtcgtggtcataaacgggcaatcattgccattgcacgcatggtgttgacttgcatttaccacatgttccaaaagcaggaggtatttaatcctgccgatacggattattccgctattcctgaagaaatgtaccggaaatttcaggaacagtatgacagaaatgccatcaaacgtttagagaaacgaggctatatgattactcctcctgctatggcctgataccctttattccataggatcctttggggcggcagtttactggtgctcttgttaagttacgattttttttgattttttctttcaacctaaacctccacctgatttatttcatttgatattgcggtctgccggtcacggcatcccccctgcatttccctggctgcctctctaaacaagcggtctacaatgtcaacagcaatggtgtcgtatcctgtcagtcctcccttcccaatgatgggaagcccctggtatgtccccaccatgcgtcccacatcggtctgggcaatcacgtaatccagcacctcaatacactccacccccagctggaagcagacattcaccatggtatcccctccggtggtgtataatccggcaatccgttcccggccagcgcgctccagcaccttctgcacaatggtccccagccctgcattaatccggttggcgctcatgccgtccgcatatccccttttggcgtcttcctctgccaggttcagaaccggcccgtgtagtgccgtctcaatcactacagccctgggcgctgacgctccttccatcagctccataatacgcctgacggctgactccgcttcctctgtggcctcccatgctccgtcaatcagcgggatggggtccacactgacctgtacatgacgctggtcctccagcaggattcccagctgccgctttgtcacaggtgtggcgcttccggctgcaaccagcacggttctgcctgtgccgtccagtgtcttttccggaacattgggccgttcttcctcagtcagccctctgcagtatgccagctttgccgtaaatgcccccgggtccactgccagtacattccaatccagcgaaatgcaggcatgggctatctcctggatatcctccagggttatggcgtccaccactatgatccggtttcctctctccctctgccatttaagggcgcgggttatctcctcccgccccaaaaggactgttttcagcgtgacaaggccggtctcctcccctgtctgcctgctcaatagctggggcacataactctcatgcaccggggtgcgcacatcctgggccaccggtgtctttgtcagggcaatgccgtcaatcaccgagaagccgcctaccacaatccgcctggactggggcatggaaggcaccaccactgccaccgcatcccctccaaccacatccatcatggccttgatttcagtgccgataccgcctctcaacgtggtgtcaatccgtttgctgaaatatctgacccccatcctttttaatgcctgggtggcggagcttaccttttcataggcttcctccgccggcagcgccctgctgttgctgctcaccagtatggcgtccagggtctcagcctccccttcccgctccgcggcctcctcgttgaaaaaaacggcagtccttgccttggacctggcaagcagcacgccggtggtggtggctccggtcaaatcatctgccactgctcctattaacggcatagtatattcccccttttttgttcccctggttattgatccgtttttttgtgcatgagcgccgcgtattcagccaccacctttgtggactcaatcaggctgatgcttcccgcaatccccttgccggcaatatcaaaggcagttccgtggtccaccgagcttctgataaaaggaagcccaaaggtgagggttacggatttttcaaagtccagggtcttgcaggcaatgtggccctggtcatggtacagagacaggatagcgtcgtatcttccggatttaccgatatggaatactgaatcagccggcacaggccccactgcgttgatcccctcagccctggccgcctccaccgccggaatcagttgttctatttcctctgttccaaaaagaccgttatcccctccgtgaggattcagggcagcaaccgcgataagcggctccatgatacccgtcttcctcagttccttgtcaatattctccacaaactccagcacccgttccttcgtggcatatccgcatgcatccaccagggacatgtggcggcttacaaaaaacaccctcagcttgtggcaggaaaacatggtaagagcatagggtgaatgtgtctcgtcctgatagatttccgtgtgtcccggctgctttacccctgccagcttaatggcccttttatgtatgggggcagtggacaccgcgtcaaccttgttgtccatgcccaattcaatggatttcataatccagtccacggacatcctgcctgccagctcctgaacctctccccaccggacggaatccgtatcgtaatctcctgtttccagcacatccacggtcccgtactgaaagagggcttccgatggatcctcaatcctgttataccttaactccttacccaaaatctttgcagccctgtccaggatagcaatgctgccaatgacgaagggcctgcagcactcatgaatttcctcatccaacatggttcccactacgatttccgggccgattcctgcagggtctcccatggtaatggctgttacaggtttgaatttttcgttcattttccttttcctttctttttatttttgatttactttcgttttattttttatctaacacaatcataaatggtaattaacattttttcaagcttttttgcatttttgctaattttaacaatttattctctgcttttttaacactatttcacaattatattttcttttttatttctttttgtatttcgttagaaaatatttaacattgtattcaggcacgggtatgcaaaaaccgcctcacagccataaaaccgtgaagcggtcgcccataccattttgtatattcacttttacgcctaaaccacgtctatataaacatgctgtttttcagcatcttccagatactccttttttatcccgtcatctgtaatgatagcgcttatctcgtccagtgaacataccaccatcacataccccccgccgaacttactgctgtcagccagcacatatgcctggtcggaagcagccagcaccgccttcttcacctgcatctgaggcgaaccgatggaggtaagccctacggaaaaattgattccatgagcgctgataaaagccttattggccctgaacccctttaatgtattgactgccacatcgcctacggtggatgccagctttcctcccacctgcccccctaaaaggaacagctccacatggctcagatgtgacagcacgcctgcgctggccagggaattggtgatgaccagaagatgtttggaggaatcatccctgatacattgggccagataatagcagacagaggaatcgtccaggataattgtgtcctggtcctcaatgtattcataggccttccatgcaatccggcgtttcctgtcgctgtttttaaacacattcccggcgtcaaagggcaccatgagctgtccgcccacttttaccgcgccgccgtgaatccgctttgcaaggcccttgtcctccagcttctttatatcactgcgaatggtcacctctgaacagtttaactccctgctcagctccgctacctttacgctgcctgtactgtccaggcgggcggcaatgtattccattctcttatttgacatgactaacctctcttttcatacacgcctccgctatgccgtcctacaccagatggaggggaatatccttctctgcgatgagctcctgccattcctggctcagtccgtcatctgtcacgatttcatcaatctcttccagttcagcaaaatatcccggctttacctgaccgaatttgctgctgtccgccaccagtatcttctgcagggatgattccagagccgccttttttgtgaccacctcataattgtgcgcgcaggtcatgcccagcttttcatggacaccggaggcagaaacgaacatcttgctggcccttgtcctccttatcagccctattccttcaacgctctcaaacatcaggtcgttccggtggaaatatccgccggcaaatatcagggaaagcttctcattgccctgaagctgggacaggatatggtaattatagcagagtaccgtaagctgcatctgttccggtatatatttggacaatacgccggtggtggtccccgaatccagaatcaggatatccccctcctcaatcatacccgccgcaaaccgggcgattctgtcctttttatcaaaattgcggatctgctccgaagagtacagatattcgtcgtgttcccgcgctgccggctcagaagcctgattttcgtaaaacagacggttttctttcagataatcaatatcacggcggatggtcatctccgagacctgaaaacggtccgccagctccttgattgataatacgggagattccttcagcgtatctaaaagcgcgtaaatcctgagatccctttttcccataagttatgtttcccctcctgtcgcaatcctgctgcggcccaagggtgcacagcgttacgaatctgactgtaaaatattataattgtattttcagaaaatgtccagatgttcctgaccacacaaaaaatgttatataatgttataaaaatgttatttttacattttatttcacatttttttgataatttatcttgatttttacattctaaaatgctaatatatgctcataataacattaattaacactttcatcaatatggaggccaaaatatgagaacaattgtaattgggtgcgacaatgctgctgtacatttaaaaagtgaactcatggactttatggagaaaaagggatataccgtggagaatatgggatgcgacagcactgaggattctacctattatccctatgtggcagagaaggtgtgccaggagatcataaacagcggttatcagaagcacggtgtgctgatctgcggcacaggattgggcatggccatgactgccaacaaattcaagggcatccgcgccggcgtctgccatgatatcttctcggcggaacgattaaagctgagcaatgacggcaatgtgatctgcatgggcgagcgggtgattggaaccgagctggcaaagcggattctggaaaaatggctggaactggaattcgtggactgtgcatccacatccaaggtggaggccatcaaagaaatcgaaggagaaaatctcaaatagcggaggcggcttgatgaaaaaactgaatcggttgtatcttggcacaaacacaaagatgtacaaaaccattgcggacacagcttcatttctgacgcagctccgccagctgacagaggacctggcagacagccctcttaccctgtttgtcatcccttcttttacctccctggagtccgctaacaggattacgtccagatcccacatacgactgggggcccagaacatgtgctgggaggaccagggacagttcaccggtgaaatttcacctgtcatgcttaaggaagtgggggtaagcgtagtggaaatcggccactcggaacgccgccacgttttcagggaggatgactttgaccaggaaaaaaagacggcaaaggcagcccagtccggtttcactcccctgctgtgtataggagagaccctgattcagagggaatacggtctaagcggagagaccctgagcacccagttaaaggtgggacttcattctatcaccggagaacaggcaaaacatctctggattgcctacgaacccgtatgggccatcggcgtaaacggtatccccgcggacagtggttatgtggctgagcgccatgcgggcatacggcggattctgtgcgcacgctttggcgaggaacagggaagccgcatccccattctctatggcggcagcgtgaattcccaaaacgcacaggaactgattcaacttccagatgtagacggcctctttatcgggcgcagcgcctgggacgcctcacagttcaaccgcatcatacgccaggtcatgcctttatacatgaataaatagcaggagggaaatcacggatgcacaatctgcttgtggcccagtccggcggccccacatccgcaatcaacgccaccctgtccggagtcatcacagaagccatgattcagggcggtattgaccggatatatgggggactcaatggcattgagggcattttacaggaaaaaataatagatttgctggattatatcaataacacaatggacctggacaaactggcccaaaccccggccgctgccctgggttcctgccgcttcaagctggccgggccggaagatgatgccgcccaataccgggttctgattgatattttccggaaatatgaaatctcctatttcatttacataggcgggaatgactccatggacacagtggataagctggccagatactgccgttcccaaaagattgaagatataaaaatcatcggagcgccaaagaccatcgacaatgatctgatggagattgaccactgccctggttttgcctcggcagccaaatatattgccaccaccttcgcggagctggagagggatgtggctgtctatgattccttcggagtcaccatcgtggaaatcatggggcggaacgcaggctggctcactgccgcctcatccctttccagggtaaacggcaaccgcggacctgactttatttacctctgcgaagttcccttttccatcagccgttttctggacgacatacgaagccgtcagtctgaaaacagaaatctgctggttgctgtcagcgagggcgtccgggatgaaaatgggacttatctgtctgaacagactcccggcaacagtcccgaccgattcggccacaaggatattgcgggaaccggaggcgtcctggctcatattgtccggaatgaactgggatgcaagacccgttccctggagctcaatctcatgcagcgctgcgccgcccatctggccagccgcacggatttaaacgaatcccggcttctgggaacaaaagcggttcagtgcgcagtccggggccagaccggaaaaatggcaaccctcctgcgtatgccctcaaaggaccgttaccggattcagtttgccgccgcggacgtgtctctggttgccaaccgcgaaaggacagtcccccggcagtggattaaccggtcgggcaacgacattacccgggaaatgacggattacctgacgccccttatcgagggagaggttccggtgctgtatcgaaaccgctttcctgaatatttcaccatatcccccgcatgagatccggggatacatattaaggagaaccgctttggcagttctccttatcccatcctacagaaattcaatctgttcttccctgtccacaggtatcttgaagccggaaaccagttcatcataacattcttcacacaaatcaaaatgatggacctgtccgtccttctcagaaaaataatcccatgcatggtcgatactaatacatccttcccggatgattccctgctgcaccaccagcttctttccgcagcaattgcacattattgcttccagctgtccatttttattgtaccttttcatatgaaccctcgcctttctctgtcatcgtatcctttcattcattcccttatcttccccttaaagaaaaaaggagaggaatgtctggttcctctccattatatacataaaatattcacattttaagtggtaattctttcatattgtccgattccacatgatgacggcatcctcggcaggattgtggtaatatcccttcctgacagcctcctgcctaaaaccataggaatcatacagttttctggctcccaggttgctttcccggacctccagggcaatggcccggacccctctggccctggcaaaagccaccatggcatccataagttcccgcgcaattccctgacgcctgtaattgggatataccccaatccgctgtatctccccctcgtccgccagaatccgcacaaccgcatatcccaggatggctccgtggtccgcatagacaaaatacgtatccagcctgctgtccaggcccatacgtatcagattctcagaccagctctccgaaaagcatacctgctccaaatcagctacctgctcaatatcctggcctgtcatggggcgcaccccgcgaatcagctccattttcccgctcctttctgttgccgcagcagttcagaccatgtatctgctgccgttaataatctcccgggagctttgcggcagctccgcgggcagactgctctgcctctctctggcgttcagcctggggctttctcagataatccggcgtgaactccgccgctgtcaccacctgtacgccatggcagccctctgcatccaaaatcgcgctcatccccagggcagccacggaggcagccctctgccggttcatctgggccggtgcaaaggcatggggcacggtgagcatttccctgataatatccttatatacaggcacaccgtctcccaggaatatgacccgctctcctttttcattgagaagtcccgccagctcccgcatatccatgggctgctgctccatcaccacctccaggccgtccctggtatgatagagccccgtatagacctggctgcgttttgcatccatgataggacagatcagtccctctgccccccacatattatatgccatggcatccacggtgggaacatggaccaagggctttttaagagccagccccagcccctttgccgtggcagcgcctatgcgcagcccggtaaaggaccccgggccgccggccactgctatggcgtcaatggtatccatatccagttccagaagctttacaatctcatccagcatagggagcagggtctgtgaatgagtctttttaaaatccactgtatactctgctgtcaatatgtcatctgtcaccagggccacactggccaccagggatgaactctctattcccagtactctcatcctctatcctccacgctaatccgcctgtaatcaaatcccttttccaaatccttttcaatggtcacccaggtcaccctctcaggcagtatctcctcaatcaggccgggccactcgatgaggcagacgccgtctccgaagaaacagtcctcatagccgatttcgtccatctcgctcacatcaccgatacggtacacgtcaaaatggtacagcggaagccgtccgtcctcatactgctgcaaaatcgtaaaggtgggactgttcaccggcccctctatgcccaggccggccgcaaatccctgcgtaaacacagtctttcccacgcccaaatcaccgctcaggcagacaatctgtccaggccctgcttcccctcccatctttcttcccagctcatatgtttcttccggtttccgcgtctcgattaccatttcctacctcgtttcatacttactttacgcccttcatggtcagtgaaatcctcttcttggccaaatccacgctcaaaattttcacatccacaacatctcccacactgacagcctccagcggatgtttgatgtacttgtctgtcatctgggagatatgtaccaggccgtcctgatgaacgcctatatccacaaaggcgccaaaatcaatgacgttgcgcacggttccctttaacaccattcccggctccaaatccttcatctccaggatatcgcttcttagaatgggccttggcatctcatccctgggatccctggcaggcttttccagctctcctgcaatatcccgcagggttatctctcctatgcccagctcctgcgctgtcctcttataatcctttatcctccggctgattcccaccagacctccccgggacagctcctcaggcttataacccagcttttccagaagcttcccggctgcatcatagctctccggatggacgctggtaccgtccagaggattctcaccccctgtaatacgcataaagccggcgcactgctcaaatgcctttggccccagcttggctacctttaacagctgctttctgctcttaaatgccccgttctcttccctgtaggccacaatattcttagccagtgtcttattgatgccggacacatattccagcagggaggccgaggctgtgttcagatccacgcccaccttgttcacgcagccctccaccacgccttccagcgcctcacccagacgcttctggttcatatcatgctggtactgacccacgccgatggacttggggtcaattttcaccagctcagacagcgggtcctggagacgtctggcaatggataccgcgctcctctggcccacgtcaaaggcagggaattcctcggtggccagcctgctggcagagtacacggacgctcctgcctcatttacaatcacatactggacctgttctctgatttccttcagcaaatccacgataatctgctccgactccctggacgctgtgccgtttcccacggatatgagggaaatattgtattttttaatgaaagccttcagtatctttttggattcctccaccttgttctgaggagctgtagggtaaataaccactgtatccagcacctttcccgtgctgtccaccacggccagcttacatccggtgcggaaggccggatcccagcccaaaaccacccgtcccacaatgggaggctgcatcagaagctgttccaggttttttccaaataccttgatggcgccctcctctgctctttccgtcaaatcgtttctgatttcccgctctatggaggggccgatgaggcggccatagctgtcggctgccacttccttaaggatgggcgtggtatatgggttgtcccggacaatggtctgcttttccaaataccccagaatctgctcctcaggagccaggaccttcacggtcagcatcttttcattctcgccccggttcagggccaggatgcggtggccggcagccttcttcacaggctcctcataattataatacatctcatagacagactgcgccttctcatccttggcagaggactggatgacacccttgttcatggttatgttcctgatataggtacggaaggccgcgttatctgaaatgcgctccgccagtatatccctggctccctgtatggcctcctggacgctggccactcctttttcctccgacacaaagccggcagccgccttttcaacaggctcacctgtcatctgcatgctgataaggtccgccagaggctccagccccttttccttggcaatcatggcccttgtccggcgtttgggcttgtagggacggtaaaggtcctccaccgccaccagggtctgggcctcctttatcttaagctccagctccggggtcagcttctcctgctccgcaatagaggcaataacctggctcttgcggtcttccaggttgcgcaggtattttaaccgctcatccagattgcgcagtacctcgtcgtttaaggagccggttgcctccttccggtatctggcaatgaacggaatcgtattcccctcatcaatgagtttgacggctgcttccgcctgatggcgtccgatattcagctcttccgccagttttttaataatatccatggtaaacctcgcatatctgtaatctaactaactgttatattatagtgcatcccaaccgcttatgcaagttctggcagaaagttccccgtatatggaaagcttcttcatctggacagtgccggtaattcgtgataaaatagctaggatagcagtcaccatatttcggcgcagcacaacccgctgggcctgaccaaagaaaggttcttattcagaatgatgaatgatactcataataaccagaaatcgtcttcaaacaatcagaaaaaaaacttcacgtcctccgagcgccttgccacctgttccatgatagcaggcatcatcggaatcgtgtgcagccttttctatctgcccatgtccctggcctataaccagacagccatgcctaccggccttgtctgcggcgttatcggcatcatccttgccctcatggcccggaacgccgacataagtcccaggaagtcctttaacgcaagggccattgcagggctggtattaagcgccatagccatctcccttacatttttctttttctacgctctggcctgctactatgaggcgctcagcgatccggtgaccggacctcagattaatgagttcatcaaccggctccaggaacagctgaaccagcagttgcagctgcccaagaccactggcttcctttggttctgatgccggttttgacgccggcgctatcccggtccgcttccggctccggctatattcatacgggtcagcgcggccacaggggaagcaggtccacgcctcttaccaccagcatatagttcttgtacacccagttcaccagcgcaatagctgcgccggtgtaaaccagcaatttttcatgccccagataatatctggggtttttggccgccctggacaccgcaaagcttaccagttcagccgtcagcaccactgccatataggcaaccaggggatggtaccggatactcaggagcagattgccggcgagcagcgcccgaaacgctctggtgccgccgcagccgggacagtaaagtcccgttaaaagatgaaacaggcagggaaatccctgccttgcaatttcaccgataatccggcttatgaccgatgccatatgctacagcaccgcacgtatcatctgcttgataccgtattcagaccgctcctgttccctggagtcataggaaacagccactttcctgaattcaccctctgccatctgggcggtgaggaacgcgaattcatccattccgtaaagctcgattacctccacctggccgaaggcgttctttacatcctgctccttattgcggtaggaaccggccgccctgacaaaatacctgaactgtgcctggtccatggattcgatagcctgtttttcgtctgtccagcccatgggcacgttctttttgagattctgagccgcctcaatgatatcagccaccaccgcgcttcccgttggaagctttccggcgccgctgccatagaacatggaggtacccagcatatttcccttcaccaggatgccgttgaatacatcattcacagagtacaggggactggtcttgttaatcatcaccggcgccacataggccaaaaccctgccgtcttttattcggctggttccaaacagcttcaccgatgtccccatcttctccgcatatttaaagtcgatatccgtgatccgcgtgatgccctcggtgtagatatcctcataattcacttctttccctgttgccatggctgtaagaatggcaatcttgcggcaggtatcatggccttccacatccgcctcaggattgcgctccgcatatcccagattctgggcttccttcagggcattttcaaaggattccccctctttgtccatcttggtcaggataaagttggtggttccgtttaatatacccgtgatttcctcgatgcgctcacccatgagacagcggtaaagagggcggataatagggataccgccgcccacgctggcctcaaagaagaaattcacatgcttcttcctggcaatggccagaagctctgtgccgtgagccgccaccagcgccttattggaggtgaccacatgcttgcccgccatgaggcaggccttcacgaagggataggcaggattcagtccgcccatggtctccaccacaatcttcacttcctcgtcctgctcaatcaccttgaaatcgtggacgatcttatctgccaccggactgtccgggaactcccttaaatccaggacatactttaactccacttcctgtcctgcctggcttgctattacatccctgttcttgtcaagtatctcggccacgccggaaccaatggtaccataccccataactgctgtcttaatcataatcttccgctccctgtgttttattctcctctgatattgaaaggcccgagccggccgtcactccctggcaagtattttgacgtaatggataccgtccagtacttccagttcctctatcatgctggatacattgcctgtattctcccttacctcaacgctcagcgtaagcgttgccacgccgttgaccggaatgctctggtgaatggtcagtatattggccctgtacaccgctaccacgtgaagcaggtcgctgagaagtccctgttcatcgtccatctgcaccaccagggtaatggttttccccttggtgttgtcatagaagggaaatatgtcatccttgtacttataaaaggaactccggctgattcccaccttatccgtggcttcctgcaccgtaatggcccgttctgtctccagcagcttctttgcctccacaaccttcaaaagaacctcaggcacggctttctgtttcaccacaaagtatttgcttttgtcttccattgttcaatcctttcgtaggcccgcgtgtatgtccgtattggaaatacatctgtactcacgaggaagatattaacatatttttattttaaatgcaactgtttttatctaattcttcacgctaatttttttcacgatacacagaggaaacgcggccaatgcgcaaaggaccggaagtttccggtcccctgcgcattggttctattcgtatgcctcatgtcttaatgatctgtaaccccgcctgtctttactcgtcttcccttacattcttatccgggcatcccagactcatccagcgaagataggcactgataaagttatcaattgccccgtctaacacagcgtccacgttaccgctttcctcgcctgtacggtggtctttgaccatggtatagggctgcagcacataggaacgaatctggcttccccatccgatatccttcacatccccgcggatgcctgccgccttggccgcctgctcctcctgctttaccataaggagctttgccttcagcatctgcatggccttctccttgttctggaactgggaacgctcattctggcatgtcaccacgattcccgtgggaaaatgggtgattcggatggctgaggacgtcttgttgatgtgctgtccgccggcgccgctggaccggtaggtgtccacgcggatatcgtcgggattcacctcaatatctatgtcctcctcaatgttgggcatgacgtcgcaggacacaaaggatgtctggcgcttgcccgcggagttaaacggagatatacgcaccagtcggtgcactccgtgctcagaacgcagatatccgtatgcattctcaccgtcaatctgcacggtgacagatttaattcccgcttcctcgccgtccaggaaatccagcacatgggccttaaagcccttgctctcagcccagcggcagtacatgcggtacagaatgctgcaccagtcacaggactcggttccgcctgcccctgcgttcaggcgcaggatggcgttattggaatcatactctccggagagcaggagcttcatccgcatattctccaatgtttccttaaactgttccagcatctcctcaatctcaggaatcagagaggaatcattttcctcgtatcccatctgaatcattacctggatatcctcatactgctgttccaatgcccggtaggtatccacctcatccttcaggttcttggactctctgaccatcctggtggactgctccggatcgtcccagaagccaggctcctccatggacttatctaattccgcgattcttctgaccttgttgtccaggtcaaagtgaatccctcacttccactaatggcttgtcatacgtcgataacgtatacttaaaattatctaactctaccacagcttcacccactttcaatctatattttgtgagcccctgctcagggctgtttcatggttatatgcagtcattttcataaaggccggtgttcagatgatatcacaccggccctggtatttcgtcgattatttaattcttccgtggcactgtttgtacttcttgccggaaccgcacgggcatgggtcgttagggtatatcttctgctccacacgcttcttgggcgcgctcggggcagacgcatccttgttcgtgccggtcaccttggcagcgggttcacgctccaccttctgctccacgcggatatggaacaggatacggattgtctcctcctggatggaagccatcatggactcgtacatctcataaccctgcatcttgtattcaactaccggatccctctggccgtatgcctggaggccgatgccctcacgcagcgcgtccatgtcatccagatgcgccatccacttgttgtcaattaccttcagcagaaccacgcgctcaatctcacgaatctgctccggctccgggaactcggcttcctttgtctcgtaaagcttgatggcctcttccttcagattgtgcttaagctcattcttcttcatggacttcttctgttcgtcggtaagagttaccggcttcaggggaatgaccggaagaaggaggttgttcagttcctgtaaatcccacttatccggggtctggtcatcggatacagagatatccaccgcgttctccacagtgtccgtaatcatcttgagtacaaggtcgcgcatgttgtcgccgtccagcaccttgcggcgctccgcgtagataacctcgcgctgctcattgttgacctcgtcgaacttaaggagctgctcacggataccgtagttgttgctctctatcttcatctgtgccttctcaatggcattggacagcatcttatgctcaatctgctctccctccggcacacccatggcctcaaacatggccataagacggtctgaaccaaagagccttaaaaggtcatcctccagggacaggtagaacctggactcacccgggtcaccctgacgtccggaacgtccgcgcagctggttgtcaatacggcgtgactcgtgacgctccgtaccgatgatcttaaggccgcccagtgccttggtttcctcgtccagcttaatatccgtaccacggcccgccatgttggtggcaatggtaacagagccgtggatacctgcgtctgctacgatttcagcctccagctcatggaacttggcattcaatactttatggggaattccctttttagtcagcatcttgctcagtagctcggaagtctcaatggcaatggtgcccaccaggacaggctgtcccttctcgtgtgctctctccacctcgtccacaaccgccttgtatttttctttctttgtcttatatacggcgtcctccaggtccttacgaatcataggcttgttggtagggatgacgataacgtccatggcatagatgttgcggaactctttttcctctgtctgggcagtacccgtcatacctgccttcttcgtatacttgttgaagaagttctggaatgttacggtagccagggtgcgggactcccggcgcacatttacgtgctccttagcctcgattgcctgatgaagtccgtcggaataacggcggccgggcataatacggcctgtgaattcatctacaatcaggacctcgtcatcctttacaacataatccttatccctgaacatcaggttattggcgcgcagagccaggataatgttatgctggatctccaggttctcaggatctgccaggttttcaatatggaagtactcctccactttcttgacgccctgttctgtcaggtttactaccttatccttttcatccacaacgaaatcgcctgtctcctcaatctcctcgcccatgatggcgtcgatcttggagaattccttggatacggtacctctctccaactggcgggccagtacatcgcacacctcatacagcttggtggacttgccgctctgtccggaaatgataagaggcgtcctggcctcgtcaatcagcacggagtcaacctcatcgatgatacagtaatccaggtcgcgcagcaccagctgctccttataaatggacatgttatcgcgcaggtaatcgaatcccagctcattatttgtcacgtaagtaatgtcgcaggcatatgcctccttacgctgttcacttgtcatgtcgttcagtacaacgcccacggtcatgcccaggaatctgtgcacctgacccatccactcggcgtcacgctttgccagatagtcattgaccgttacgatctggacgccctttcccttcaatgcattcaggtatgcgggacaggtggataccagagtcttaccttcaccagtacgcatctcggcaatacggccctgatgcagtacgataccgccgatcagctgtacagggaaatgctccatattcagagttcttcttgccgcctcacggacagtggcaaacgcctccggcagaacgtcatccaacgttgcgccctctgcaagcctttctctaaagattctggtctggtcacgcagttcctcatcagacatggccatcatctcgggacgcagcgattcaatctttgtcacgattggccgtatcatcttcagttctctttcactgtgagtcccgaacaccttttcaatcaagttcatggtatactctcctaacttcttcctatataatagaaactaattttcaaccagcgcctgtagctgcagcatctgccttatcacctattatctgtctgctgattcctgtctattccctgcctttccacaatgcctgtcattgcggacctttggataaaatactacaaatactacgcctatgatacaatcttacttattgtagcacttgagaaagatttattcaacgggttaatgaaaaattaacattttgtccatatacttaacaattccacgttattttacatgatttacccattttcatcctgttcaccgttttatgaaacagaatctatgctctccttttttgaagcgattctcttcagacttatggtcaaccaagcagattgcacaaaaaatgtgttcgattttttacctgtccacattatccccagaagtttatacacattacccccaaagttatccacatcacagtttgtccattttaaggcaaaaaatagttatacaccaacttatccacattatccacaagtttataacttttcatttgctcttccccctcagactttacatttattttatttttgtacacttctgataaacttgaaaagtacgaaagaaaaaacaaggttttctcttgacatttcaaggagtcctctattaggaatgcaatagctctttaccgcatttgaaacaaaattttataaaaaattaagataaattgttaaacaattcttaggttatgattgtaattttgcaataaatatgatataatgtcactatcccaagaaaaggagttgatgtttatgcgttataccataacaggacgaaatattgaggtaactccaggtttgaaggctgccgttgaaaagaagattggcaagctggaacatttcttcactccggacaccgaagtaatcgtagcgctgagcgcacagaaagaccgacaaaaaattgaggtgactatcccagtcaaaggcaataccatccgcgcggaggaatccagctccgatatgtatgtatccattgatctggtagaggaaatcattgagcgccagatccgcagatatagaaagaaactcattgataagaaacaggccgccatctctttctcccaggcattcatagaggaagatgacgaagtacaggatgacgagattcagattgtcaagacaaagaaatttgccatcaagccagccattcccgaggaagcatgcctccagatggagatgctgggacataatttctacgtgttcctgaacgcagatacggaccaggtgaacgtagtctataagcgcaagaacggaacttacggactgattgagccggagttctaaaccacggattcaaaccgaatatttttcttataataagtacaagcccgcaaatctgcgggcttgcttttatatgtagaaataattcttttaatccaaaaacgtcactgccttacagggcgtcctgtaatttgccggcgtgatgcagatacccgtggtgggattgctggcgtggataacctgtccgccgccgatgtagatagccacatggttaatgtaatcgccgctggcatagaacagcagatctcccggcttggcatcgctgaccgatatggactttcctctggccgcctggtccctggagcttcttcctgtactgattccaaaatgggcgaatacgctctgggtaaatccggaacagtcggctccgcttgtcaggcttgtcccaccgtacacataggggttgcccaggaattgttttgcgtatgccaccactgcgttacgggtagcggaggccacctctgtggaggttccgccagaagatcccggacccttgctgtccacagtctcaggcgcctttgccgttgtgggcgctgccaccgtactgtccttgccgttctcaggattggcagcaatggtggtgacggcgtctgttccctttgtctcctcctttttgggagccgatgtggcaggagcttccgtggttttctgggcctttgtggtggctgccgtggtcttcttggccgcgtctgccttcttggcatcctccagagccttcagggccttgtccgcatcttccttgcgtttggcctcctctgccgccttagccttctcctcttccaccgacacagccttgttaaactccacactggtcttcatatactccttgaacacatagccttccaagtccgaatccacctggaccttcaggaaatccccttcctcgcccgtaaccacatagtgggcgccctctgacagcagtgtcagcgtctttccttccatgtcagggctctgtctcagacgcaggctgggagtgcccactatggtgccataggtggttcccacctgcttggccctggcttctgcctgctgtcctgtaacaaaataatctgcctttatgtagccggtaacggaaccggactgaatcttgtaccatttgccgccctctccgtccaccgtgtccaggatggcagccgcgcaatcattgttaatcttgccggtcacaccgctgctggtgttagcctctgtacggatgttgaccgtgccgtttatctttgacactgcaatgttatcatacgctgaggactttggtttggatacagtctcctggacagcctttgcctttgcggcgtcccctgacgcgctgccggactggccgctgcccttattgccgctgccctggccgctgccggaaccgctcttggcggagcctgcggctgtatttgactggacagacttgttttgcatatcggaataggatgaagccaactgcttttccggctctgtgttgcctgcataataattattcagcgcaacggatataccagccagagaagatcccgtctccagattcgtggacgcaaaggcgttcacagaaagcgcgcagctgcacaaaccgctgagcacgattactttcttccagttattcatctgcagcctgcctcccctaattctctaccagataccgctccacactggttatcgcgtttgccccgtccgcggcagccgtgataatctggcggagcggcttagtcctcacgtcacctgccgcaaatataccaggcgccgatgtcgcggcgtcctccccggccctgatatagccgtggtccatatccaccaagccctcaaaggccctgctctccggtgatattcccactgcaatgaacacgccctgcacttccagttcccttttctgtccgtcctttacattggtcagagaaagactctttaccattccgtccccattgatactgtcagccaccgtatcccagattacctccacattatccaaggacagcagattctcctgcaggctcttggctgcccgcagctcatttctcctgtgaatcagatataccttgctgcacatacgtgccaggaaaatggcatcctccacagccacatcaccgcctccgatgacagccgtgaccttattgcggaaaaacgctccgtcacaggtggcacagtaggacaccccggctcctgccagttcttcctcccccggcacccccagcttcctgtggacagctcctgtggcaagtataagggcccttgcctcataggtgttgccctgacacaccacgctcttgacggcgcccctgcctccatcctcgattttcaggacctcgtcctccacgaaccgggctcccagacggtccgcgtgttccctgaacttaagccccagatcgtatccgccgatgccgggaagtccgggatagttatccacctcatatgtggtcaggacctggcctccgctgaccatggccttctcaaccacaagcgtatccagctttgccctctgggcataaacagcggctgcaagacctgccggtccggagccgataataattaaatcataaatatgagacatagtttcaccttttccttataatcaatctaagccaatgttcttactattttaaacaatttgtaattattatatcacatataatttatttattacaattcaatttcttacaattatatcattggtatggtaaaatatgttataatccataacagaaaggatgtgtatcttatgccgcgtaaaaccgtactggtcaccggagcctccaggggcatcggcaaggccgtagcagttaagtttgcaaagaagggctataatgtagctatcagctgtatccgcagggaggaacagctgatgcggacccagaaggaaatcgaatccttccaggtcccctgcctggcatacaaaggagatatgggggacatggcatgctgtaaggaactgttccttaagattaagaagatgttcggaggtgtggacgtccttgtaaacaatgccggcatctcctatatcgggcttttgcaggacatgtccacggaggactgggagcgcatgctgcgcacgaacctgacatctgttttcaattgctgtaagctggcagtaccctatatgatttctcaaaagcagggaaaaatcgtcaatatatcatctgtctggggcgttgtgggcgcgtcctgtgagacagcctactcagccaccaagggcggcatcaacgccctgacaaaggccctggcaaaggagctggctcccagcaacatccaggtcaacgccattgcctgcggagccattgacacggagatgaaccagtggatggacgaggacgaccttatcgccctggtggacgaaattccatccggccgtctgggccgggctgaggaggtggctgatctggtttaccaccttggttacaaggaatcttaccttaccggacaggttatcggactggacgggggatggatttaggccggggaatttaagccggcggattcaggccgggaaattgaggccgggggcctgctatgcgtcccgaacctttccgaaacttttccgtatccttacgaatatattaactgtattgaccttggagccgctccatggtgtagaatctactcagaaaagcaatacactaatataaatcgcaaggaggcatgcttcttatgaaaaagaaatatttagcagtcgcagttctctccatggccctggccgcgggaagtgccatgacatcatttgccgcaggattcgttcacacctctcagggaacaaagtatcagtggggttccggagattactgtaccaataactgggtgaactacaaaaaccactggttcttctttggtgaggaccaactcatgcgtactggatggattcagagggacggcacctggtattacgccgcggatacaggagagctccagagcggaatcatgaagattaacggcaatgtctactacttcgacagcaacagctgtaagctaaagaccggagaacgcaccttcaatggtgagacccacacattcacggaaaacggaaccaccgacggcggtccatatgtttatacagagtggaacagcaacgggacacttagacgcggtaccaaattcggggtacggtaattggtaaattgcatatccacaatcggatagggatgcctgagccggaaggttcagccatccctgttctaatgatatgaaaaaacaaagagccaaaaagaccttccggaaaaatttttccgaaaggtcctgtaaactttttgcagggacatactggtgtaaaccagacgctgactccaaaattaacgcttggagaactgaggagcacgacgggctgctttgagaccgtacttctttctctctttcattcttgggtctcttgttaagaaaccggctttcttcagggctggtctgtaatcagcgtctacctgaaggagagctctggagatgccgtgacggattgctccggcctgtcctgttgtgcctccgccgcgaacgttaaccattacatcaaatttatcagtagtctcagtagctactaatggctggcgaacaataacctttaaagtctcaagaccaagatactcattgatatctcttttgttgatggtgatgttgccggtacctggtactaaatatactctggcgatggatttttttcttctgcctgttccgtaaaattttgcgttagccatgatactttcttcctccaatcctcattaaaatgttaaaacttctggtttctgtgctgcctgctcatggtctgggcctgcatatacatgaagcttgccaaacatacttcttcccagaggtccctttggaagcatacccttaactgctaactcgataaccttctcaggcttcttagccattaattcacgcagggttgtctctctcatgccgcctacgtaatcagagtgattataataaatcttctgatctaacttcttgccggtcactttaatcttctcagcgttcacaacgattacataatcgccgcaatccatatgaggtgtgaaaatcggcttgttctttcctcttaaaacctttgctatctctgaagacagacgtcctaatgtatatcctgtagcatcaactacataccattttctttcaattgtcgctggactagccataaaactcttcattggttaacctcctgttaatctcaaccttgttatacacctgacatccaacggatgcccgctatatgcctgataaatatgggaagtatttatcaatcaaagtgctcactccggggctttggatgagcattctttgctaatgtcacagttttatattatataataccaaacactccctgtcaaccactttacaaagaaaaatgccgaataatcgaagataatccggcatttacagctcatatttcatttctatcagggtaagccccctggcaggcgccgtgggccctgccgcccgccggtcctttgcctccagaatggagggcatatcctctgcctgtatgtggccggttcccacggccatcagagtcccggcaatgatacgcaccatgttatacagaaaaccgtttccggtcacgcgtatggtaatgatgtcatcgtcatttctcgttacttcaatcttataaacggtccttaccgtatccgttacctgggtgcggacgctgcagaagcttttaaaatcatgttcccctgccagcatattcgcagcagcctgcatcctgtccacatccagcttataatagcagaaatgggagtacagacgctccataggcatgttgattctccgatttaaaatcctgtattcatatgtcttgatgcaggtacatttcctgggatgccagtcagagggcacctcctcagatacctgaacccgaatgtcctccggaagtctctggttcagggccatgccaatcttatccggcggcatctggctttctgtgtcaaagacagccacatttccccttgcatggacgcctgaatctgttctgctggcgcctatgacctggatgggctccctcataagctgggtaagggcttcattgagaacagcttctatggtcactgcccccggctgtatctgccagccgtgatattgtgtgccgtcataggcaaccacaagccgtattcgtttcattggtcctaccttcctgtttatgcagagcaatactcattttagagataaaccctagacgctattatgaccacaaaatacagagtatatatcatataggcatcatggtccgcctggcggtactgaaggggtttcatctttgtgcggccgtcgccgccgcggtaacagcgggcttccatggccatggccaggtctgtggccctgcggaaagcggagataaacaggggcaccaggagaggcaccatggcctttgccttctgtatcagattgcctgtctcaaagtcagctcccctggccatctgggccttcatgattttatcggtttcctccaccagaatgggaataaatctcagggcaatggacatcatcatggcaacctcgtggatcggcaccctgaaccgcttcagaaagccaaggcccttctccagaccgtctgtcagctggttcggcgtggtggtcagcgtcatgacggatgaaccgatgaccagataaatgagcctcagacccataaaaaaggccatgcgcacgccctcaaaggttatcttgaaaatccagaactttaccagtatgcgcccgtctgtaagaaacaggttaaagctgacactgattaacagcagaatcatgatagccttcaggcccctgagtatgaaacgcaccggcaccttggtcagcttaatcacagccgccagcaccaccgtggcaatgacatacccccatatattgtctgcaacaaacaaggaggctatgaataccatagttccaaaaagctttgtcctggggtccagtctatgaactgccgagtccaccggatagtactggcccaacgtaatctctctaaacatttttatccctgctgctttctgtcagtttgttcctcagcgccagaatcgcctccctggcctctggcactgtggtaatatcattatcaatatcaatgccttttgccttcagatcatggaccagataggttatctggggcgccgccagtcccatggtttccagttccctgtaatggcggaatacctccttgggcgcaccgtcaaacaccttctgcccatggttcatcacaataagccggtccgcatacctggctacatcctccatgctgtgggaaaccagtatgatggtcatatggcgctcccggtgaagcctgtcaatctggtccagaatctcatctcttcccctggggtccagaccagccgttggctcgtcaagtataaggacctccggttccatggccagcacgccggcaatagccacccgccgtttctggccgccggacagctcgaagggagactgcttgtaatagaaagggtccaggcccacctgctccagggctttttttgccctggcttcagcctcctcactgctcagtccctgattcttaggtccaaagcatacgtctgtcagcacatccacttcaaagagctggtgctccggatactggaacaccaggcccaccttgctcctcagctgcttcatgtcatagccctggctgtagatattctccccattgtagtagagttcgcctgcgctggcttttatcagcccgtttaaatgctgtatcagggtggatttccccgatcctgtatgtccgatcagccctacgaattccccgtcctcaatctccagattcacgtcaaacagggcatgctgttcaaaggccgtgccgcccccatatacataattcaaatcaactgcttttattgacatcctctatctccttctccctatctcagaaggggtaccagctgttccaccagctcttccctgctaaggattccatctgcaaggggtatccctgcctccttaagctcccaggccagctctgtcacctgaggcacgtccagtccatggctcttcagctctttgaccctggagaatatctcccttggctgtccgtccatggcaatcctgccgtcgtccatgacgatgattctgtcagcttcaatggcctcctccatataatgggtaatcagcaggaccgtgatgccttctgtccggtttaactcatgtatggtccgtatgacctccctgcggccgttagggtccagcatggcagtgggctcgtccaaaataatacactccggcttcatggccatgacgcctgctatggccaccctctgcttctggcctccggaaagcttattgggggactggagccggtaggcggtcattccaactgctttcaggctcgcctccacacgcttccatatctcttctgtgggcacgcctatattctccggtccaaagcccacatcctcctccacgatattgccaatgatctggttatccggattctggaacaccatgccggcggtcttgcgcacatcccagatatgttcctcatccctggtatccatatctcccacccatacggttccctccgtgggcagcaggagaccgttgacatgtttggccagggtagacttgccggaaccattatggcccagcacagccacaaaatcacccttttttatatccacatccaccccgtcaatggcccgtttcacttcttctatgttttcttcctcatcgcgcctgatatactcatataccagttttgccgctttaacgattcccatatgcgtcctttcaaaacctttgttctgctacgtttctcaattttagttgatattactatagaagtcaagagcagcggcgcaataatcccattacagggccatggctgcggcaaaaaacagtgccagccgcaagaccaggcccggagaggaggatatccatatggcagaaaaatatcccctgagagtttttaagctccccggggattttctctgtggcaaaatgtatacagcgtattttctaccttatctgccgcctttccatatccggccagctgtgggtcactgcacccaggctccgtcatcccccacataatacccgtccggtgtggtggtgtcataatacatggctccgtcgtctccgcagtaataccatctgccgttccagtcaatccagcccgtcaccatgtagcccgcggcattgaagaaataccacctgtcatcaatatattgccagttattcaccgtatagctcttatccgcattgcaataccaccagcccaccgcatccctcagccatgcgcctttgtaatcggatgatgaggagccgtatgtccttctgccatcgctgatttcatccgcttcctcagatgagacataccatgagtcagattcctcccagcttcccttgtcagaggagttgtacacagccctgactttaaacatatagtcaccgctttttgttatataaccggaaaaatcataactggtgtccgaggttgtaagtacagaggtcactgaattatcgttacggtaaagccttacctcgtatttccttgcatccccgctgtcctcccatgaggccatgccgtcggattcatcccattccagtccgtagacatctaaatcatatccgctgtcactgccgtccagagaatccagagtaatgtatacaatcaaggtgctgctctttctggtaacagatgtaactttgccgtccgccccttttaagtccacatcatttttagacagaccggaagaaaagtaatagtcatcctctgcctccaccgtgaccttcagctttggtttatcgccatcgtcccatccatttttaggctcattggttatctctatatcgtccacatagtagtcgcctgaatcacaggtcacatccacatcgccggaactgtcacccgcctcaatattcgactctacatccagggatatactgtctatctctgtccttgtggatgccatggccgtcccgcacataaacatcaacagcgcccctgacatccaaatgactgcctgctgtttcagtctccccatatcacactctccctttcactgcaaaccataaactgtgcctctgcgtcaatgaatccaggctccgctgccgtctacctgaaagccgtccggtgtggtgactcctgctgccatggcgccatcctcatacatgtaataccatgtatcctgaatctggttccatcctgtaacagcatagccttccgggttaaaatagtaccatttccccatgatacgctcccaccggtctgcggctgcagtcccatcctgataggtaaaacgcctgccctcctgataatctccccaggttccgtcagtaatgcctggtgtattagccccggaggccagggaacttacaggttcgccatcctcaagataatcctgctggtttccgtttcccgcaatggcctggacctcaaaataatactgaatcccctcctttgtcataaaccgtgaaaaatcgtactcggtactgccctccacaagctggctcaccacagacccctgatcattatagagaacgacccggtaggtggtggcgtacttaacaggattccacctggcaagactggggtttgcactgtcccagccggcccaggcagtctcccccagctgtgccgctgcctggtacttaaatttcacctgatatacatttcccagatctgattcatagtcctctcccgtatactttttaacagaggacacctttgcctcattccttccatttgtcacataaagctccagactgtccctgcccagggttccggaacagcccagatacagggttccggtcacttcattgcccgggctccaattgagggagtccttagaccactccacatcggatgccagctccaccgcatcagaggagttctcagacacttccacgtccggctccaggggatgttccctttccttgtcattgtcgtccctgctggtgccgcccgtgtcatactggttggtaatctccagcctatatgtggttttagcctgagcactcatgctcaggccaaataccatcaaacaaacggcagcagttgtaaaacaaaatctgctttttttcatagcgtctcctttcaactatcctttctttatctatgaaaaatgccgtcatacctctttttcccacaaatcactcacaaacctctttaccctaatgctgccatactccattggcgtccaacttgaaaccgctgatggacgtgctaacggccttctgtccctgtcccggatagaagtagtaccaattatcctggaccttgtaccatccctctaccatggctccgctttcattcataaagtacgtctttccgtcaatggtaagccagctgttcttgaccatggcgccttccggtccgtcctggttgggattcatataataccatatgttattagactttacccagcccgtcttcatgtctccgttttcacccaggtagtaccatccgctgttggtctgtttccagcctgttatcatcttgccggtctcgtcgaacagataccatttatcattccatctcagccagccgtttttctggtagttgccgtcaggatatttgaaataccatgtgtcgccttccttgcgccatccaacgtccgtgtttcctccgccgggagtgctgccgtttccgttctcctgtccactgccgtcagaaacctcgtcctcagcgatatataagtctcctgcttctgtccattcgctctttttgccgcgcttcttttcctcctctgtgtgaggaacggttcttaccttaaaggaataatcgccttccttggtcatatagggataaaaattgtaggatgtccccttgtactcctccagctttttgacaacggatgaaccccggtataaatacacgtcataatatccggaaccgccgttttccggtttctcccacctggctctgccccgggtgctgccccattccgcgtcttccggcgggtcgtaggttcccttgattccgtttgccctgattaccaccttaaggtcacttccgcttttggaagcagacacaaaggttccgccgctgacactgacgctgcctgaactgtagctgctgcggaaacggtaatcataattgctgttgccggaactctccggctccagccatacggttatctttggcgtgtcgccaatggtcacttccttatcattggaccactctgccgactgtaccctgtatttgttcgatgaagtgtataccttgttcccgctgtcgctggaatccgttcccagactgtcaccatcattgatttcatcccctgaatccaggtctatatccaccttcaaagagatgttcgtgatatacttataatcagatgctgccagggactgaatgggcatcgctgtaaccagcgtaccggtggccaaggccagacataacaatcgcttcatgcttctcatgaaattcaacctcctccaaggattcccccttgcttcactttccttgtatcttcttttcctggttctattatagaccaggggacagttttgcgtcaacttacgatattcttgcgatattttcacgattatttcaggaacaacaagaaagtgccttcggcacctcaactcccctagcccctcattcatgaggggaattagggcttgttttttgcgtcattttattccataataatctcatgaatgtgattcagaagatgctcagagactattacgaaatcattgaatacgatataaaacccagacctgtcgtcatggaaaacattgataaggtcattaactgcggggatccttcttatggtggcgccatgtatggctgtccccattgcggtaacctcaagttcgttcctttccgctgccactccaagttttgcccctcctgcggcgctaagtattccaatgacaggtctaccgctatgtcttttaaattaatacagtgtacccatcgccatctcgtcttcaccattgacgaatccctccgccgctttttcctcgaagaccgcactctgcttaactgccttttcgaggctgtttctgatgtcatcaaagaatattttttctccctgaacaaatccaaaaactttgtccctgggtttatctgtgtccttcataccttcggtcgccctctcggttggaatccacacatccactgtctccttaccgaaggcgggttttctgatgatggtgtctggcgcaaggtcacatatttcaattattcctacctccgtaaatcctttcagactgttttgttaaataaactggaaaaacgcatcggtccctcttttaaaaagatgaaagccgccgtttaccatagggacagaaatggattctacgtttatgccaagcccaatctttgcgacccaaaatccattattaaatatgtcagccgttatcttggccgccctgtcattgctctttccaggattgattcctacgatggggagatggtgactttccattacaataagcatgaagacaactcttttgtaaaaaagactcttcccgccattgatttcattaagctgctcattctgcatatacctgaaaaaaacttcaagatgacccggtactatgggctttatgccagacaccgggagattgacaatcagctccataaagcagtcccaaaatccaaacacaggattctcctcgatttcaacacctggcgtaagcttttccttcttaccatggggtacgaccccctgcaatgcccaaactgcagacatgaaatggcctttctagagctgtaccataaacatgaacgggttcctctggatgaattatacaaaaggacaaggataaggcatggcttttatccccggtcccgctctgcttgactttctctcccatctgcttcatactacatttattacagatgggaggcggttgcaaatgaatcaaagatatgtggatgaactcagacaaaaatacatcaaaaatcctccagaaggaatgacacccaagctggtcagaaatatgaccgattccgatttattggatatgcattactttttaactgaagatgatgaccttgacgatgatgggttagaagaaggattctatatcaatcttttttaatcaccgtctattttctatgtcctgatttagcagtgttatcggtttacataactcgttttcagtaaggactttcctaatatacaagaaagtgccttcggcacctcaactcccctagcccctcattcatgaggggaattagggcttgttttttgcgtcattttattccataataatctcatgaatgtgattcagaagatgctcagagactattacgaaatcattgaatacgatataaaacccagacctgtcgtcatggaaaacattgataaggtcattaactgcggggatccttcttatggtggcgccatgtatggctgtccccattgcggtaacctcaagttcgttcctttccgctgccactccaagttttgcccctcctgcggcgctaagtattccaatgacaggtctaccgctatgtcttttaaattaatacagtgtacccatcgccatctcgtcttcaccattgacgaatccctccgccgctttttcctcgaagaccgcactctgcttaactgccttttcgaggctgtttctgatgtcatcaaagaatattttttctccctgaacaaatccaaaaactttgtccctgggtttatctgtgtccttcataccttcggtcgccctctcggttggaatccacacatccactgtctccttaccgaaggcgggttttctgatgatggtgtctggcgcaaggtcacatatttcaattattcctacctccgtaaatcctttcagactgttttgttaaataaactggaaaaacgcatcggtccctcttttaaaaagatgaaagccgccgtttaccatagggacagaaatggattctacgtttatgccaagcccaatctttgcgacccaaaatccattattaaatatgtcagccgttatcttggccgccctgtcattgctctttccaggattgattcctacgatggggagatggtgactttccattacaataagcatgaagacaactcttttgtaaaaaagactcttcccgccattgatttcattaagctgctcattctgcatatacctgaaaaaaacttcaagatgacccggtactatgggctttatgccagacaccgggagattgacaatcagctccataaagcagtcccaaaatccaaacacaggattctcctcgatttcaacacctggcgtaagcttttccttcttaccatggggtacgaccccctgcaatgcccaaactgcagacatgaaatggtctttctagagctgtaccataaacatgaacgggttcctctggatgaattatacaaaaggacaaggataaggcatggcctttatccccggtcccgctctgcttgactttctctcccatctgcttcatactacatttattacagatgggaggcagttgcaaatgaatcaaagatatgtggatgaactcagacaaaaatacatcaaaaatcctccagaaggaatgacacccaaactggtcagaaatatgaccgattctgatttattggatatgcattactttttaactgaagatgacgacctcgacgatgatggatgggaagaagggttctatatcgacctgttctaaatcaccgtctgttttctataccctcctttggcagaatcattagtttacataactttatttcagcaaggactttggtaagtaggtaagccccttacagggcttacccctctcagaaccggacatgcagctttcccgcatccggctccctgcaaagctaatacatctacagttatccgtatatactgacataaatacgtggccgcacaagcgggaactgtctcattagttccttatatccttccttcgtatagctccttctctgacttcttctgttcagccagtagaataacctaaaccataccacattattgaatgagttcaggtgttactgacctcctgatatgacgctgaccagatttgttcatttttcagcaggctgctctaactcatgtcagtcattgcggtggcttctgggtggatttctccacccttaaaaccatcgttttgatagagagtgctcctgcataggcttttcagtcaaatggaagcacgccttgatctttgacaacttcatactgctttgcatgcggcgatttgaacctgcgcagtttactgctgacgttatccatatgctcctgaagatcttcaagctgtccgctgatgtcatccatggcgatcctgatatccccatggagcagttctatggaattgagggcttcctccagttcgtcccggatgtccatgtattcctccagcagatccaatacgccggactggcgcatgcggtcagcaaaggtctctgccgggcgatgttctttgttctgaaccatcaggcctcacctcccagcatctcatgttcgaggacaaaccttacctgatgttcgtccgtgagacgctttccctgctggctggcgtacatcaggcagccgttacagatccggttgatgcgccttgggatccccgtggactcgcggaagatctcgtccatggccttatcggtaaagatatcctgcctgcctccggcatacgcaaggtgggaacggatatatctttccgtctgcgcacggtcaagatggggcaggatgcagcttaaatcaatccgctgcctgacggccgcataccgctggagccggagtttatcccacagctccgtctgcccgacgagcacgagtgccatagggctcatagaatcgaatttataattcagcaggaagcggaattcctcaatggtctctttttccagaaggtgtgcttcatccaggatgcagacgactttcctgccctgcacgccgcggatgatctccacctccttctgaagctgcctcttggcatcgccgcggtagaactttgattccacgcccagctggtcgagcatgcctttgtagaaccatcttggggtcagtttggagtccgacaggtagaggaagatatattcctctttggggagcgtctccacaaaacggcgcaccagcgttgacttgccgcacccggcatccgccgtcaccacggcgaacagctggcggtctgccacataagacaggcgcccaagggtgtccgccatcgccggtgactcatacagcatccccgacgggatatcgcgcacgaaagggagacgctgcatttcgtaaaaagctttatacattgctgccaccatccttcctgtactgtccgaaagagatggcatctgccatgtgctttttggatgctgcgctcttcttttccagcgcctccagcatacgggaattatccggctccgtttcctgcatggaaatcggcagggggtcttttttatcacaaaacggcctcatttcgagcggctttgcggtaaacggttcaatccctttatggcggatcgtgatggtttccggcgaagcagggtcataggaaatctccacccggaaaccgataagggacggttttgtctcatatttgcggccctgaaagctgatacagccgcccttgtcaacaaggcgttcttcatgatggaggaacgcttccgccactacggatgtatccaggaactttaaaggccggcagtcccggttccactcctggagaggggtgatcccttctggtgggacgggcatgccaaggctctcataatactcccggatgccctcgtgcggctgcttatggtagtattcctccaggtagtttttccagtgccggttaagctcttccagtgttttgaccttatggatccgggcctccctgagaaaagcatcggccacctgatggaatttttctattttcccctttgattttccgctgcggacttttgcgtgccgaaccgtaatcccaagtctggcaagggagaatttcagctgttttgccacatactgcgaaccgttgtcaaagtatacggcatcacaagccccggccttcaagaggacgttccggaaggtatcctccacgatgctttcctcctggttgtcataaaaccgggaatggaccaggtatctggagtggtcatcgatggcggaggacagatatgtctgcaccatcgccccgtttttccctatggggagcttacacccatacttgatatcagcctgcagcatcatcatcctgttgggcttgcagaaacgtttggacgagctttcgcgtgcgcttgcgtatgtctgcatctgtctcgtgccgaaaccggctttataaaggtgacgctgcagggtagggcgcttgagtacgcccggctccgcccagccctcctgctccaggatgaagatgatctgctccacgctccgcctgggtacttccttcctcagttggattgcctgctccacaatcttccggtaattatccggcagcctcccggagacaaccgcctgagccggcacgacgggtttgagaccctcgaagcctttttcttcataggcggcaaggtaccggaagatggtacgctcggataagcctgactttgaggctgcttcttcccgcagctggctgcgtttggcgggatccaggctctcatcaagcagtggcgcgatcaaggtgtagcgtgagagcgcctcgttatccctccagtttaaatcttttttgattgtctgcatggtatgcacctcctttttggacagcataccgcaaaaagcgctgacagccaaaacaaagtgggtgcatataagatgtcctcagacggataccaggaaaccgcctgagttatagaccatgcgcaggacagcgggaagccacctgtcacaggatttcctaattgtttccaaaatggccgcgccggccagtccgggattccttaagaggctcatagcctgccgacagtaaccttctgtccgggagaagtttgccataagccagtggtgccaccgccgtatggtttcatcacaaggataatcctcgttcatggtatcctccggcatgatatcaccatccagcacggcagcgataaggtcggagccataatgcttataagggacgagcttatcagggagaagactgtgaagcctccggcagccctcattgtcacaccgtctccgctcaatcatcagccacaccacctgtccgccatccagcttcatgattcgtggtttccagtcacggtggctgacaggggaccggcatatggggcatatacaattttcgttacaatggatagtaattacgccatcccccttgtcagattccgtgtactctgatacaataatcatggttttatcatgagtctcagaggacacaacttagcgggagggtcttctgggactttctctttctgtagaatgttcattgacattatacagagcaagtctctgacattcaagcagagcagtatggatgacaaattagcttagcaacaacattcaggcttcttgaattgtcagtaattccgtaataatgataataaccagtcagtacttcatttagtttctttactatcctgtttatctccagaaacctcatgtctcttatcatggcgtttatttccctgcttttctttgcaagctttttcttactggttttcctctttactctgaactttcccgtcctgccatgcgaacagtaatgcgtgaatcccaggaatgtgaacgtctccggcctcccttttccccggtctttccggttactttctgcgaatcggccagattcaatcaaccttgtcttgctttcctccaattctagtccaaagtacttcattctgcgctttaagtgttcataaaatatttctgcatctgatttatattggaagcatcccacaaaatcatccgcatagactaccagccccgcatatcctctcatcactggctgtactttctccctgaaccaccatatcagcacatagtgcatatatatattggctatgaccggggagcagtccgagccttggcctgccccttcttctgtctcctcatatctgaaatctctcatgattcccgctttcagcatccgtcttaccagtctgataatggtcgggtcttttatccgcgattctatgaactttactatccattcatggtctaaatggtcgaaaaaccctttaatgtctgcgtccagcacccaattcgtcttttccctttccagcatcccattcagtctccttaatgccatgtggcagttccttcctgggcggaatcccatcatttcttcgtagaaatggggctcgaacactgcttccagtattcgccttagcgcttcctgtactaacttatcctcatagcaggatatactgagcgggcgggtctttccattttcttttggtatttccacccgttttgccggtttgggcttgtatgccttcttcttcattttcctgattaattcatctaagttttcttccaaatttacttcgtagtcctctttggtaattccatcaattcctaccgctttctttccatccatctccttgtggcattctttcagtaactctttattaatcagatgccctatggacgtaaataccatttccggatgttcgcttgacaactgtgatattctcgccaatttcgtttccataatttctcctgtctctgcgtacagattatgtttcctctttgatatgactttgcatggctgacctgcgaggacaggtctctctcgacttccaccgcttttttttgctgtgtactattcggccatccgacttctgccggccatttacggttctcctttctaccgttgttccgtataccgggcttacgcaacctgcccggagcctggcagacctccccagttgacttaaaatccttgattacatgaccagccttaaaaccccggggaagcagctgcattctcgctcttaacgactacagctgtgttgctttcagtgtataggagcacttctgccttcccaatttcattttaatatcgaagctatatacggctatgccctgcaatcccgctgtctacgcttagcaggcaacatcgctgctgtccacccaagactcgcttgatgcggtatagcttgtaccttacaccgtgggactctcacccactaaatttcaagcccttagctgggcgcaccctataatacaaaaaactgcagacacgtttaccatatctgcagccttcttaatgattcaaatataattatactaactcaatcagaacttccatagcgccatcgcccttacgctggccaatcttaacgattctggtgtaaccaccattacggcctacgtactttggagcaacgtcgtcaaaaatctttgctaccaggtcaatagacttggtattcttcttctttcctgctgctgcagccggaacttcagtcactccgtagagaacctttaacatctgtcttctggcatgcagtctggaaggcatatctttcttgatttccttctctacttcatcgtatacggtaactttcttgccgtctacaacttccttaactctcttgccgtctttgtccttgcgggcaaccttagcggtaacctttacagtctcgaagttatccttctccttaactgccatggcaatcagaccttctgcaaccttgcggatttcctttgcgcgggtttcagttgtcctgatgtgtccatgatataacagtgctgttacctggcttctgattaaagcttttctctgatcggaagttcttcctaattttctatatcctgccattgtattttcctccattattgcggaacaccttcaccatgcttctttggacttactggcgttggcgtttttgcccacttattctatttggctctctcagtcatgcttctttggacttactgaccgggagtaaagctccctcactgcgttcggtctgtgcgggaaacgcaaactccgcttcgctgcgttcggtcgcttagttgtcgtcgcttggattcagctgtaagcctaattcctttaacttggccagtacttcctctagggacttgcggcctaagttacgaaccttcatcatgtcctcagaggtcctgttgcacagttcttccactgtgttgatgccggctctcttcagacagttgtaggaacgaacggaaagctccagttcgtcgatattcatctcaagcactttctctttctcattgtcttccttctctaccatgatctcagcggtcttggcattctcggaaaggtcaatgaacaggttcaggtgctcgcttaataccttagcggccaggctgacagcctcgtcgggagccagggtgccgttggtgtaaatctcaagtgtaagcttatcgtagtccgtctgctgtcccacacgtgtattggctaccgccatgttcacgcgctccacaggagtgtagatggaatcaaccgctatgaccccgattggtaaatcgtcgttcttattcttatcggcgctgatatagccgcggcccttggtgatggtaagttccatatagaacttgctgtccgtaccgccgcttaaggtggcgataatctgatccggattcatgatctcgatatcagcatccgcctggatgtcagctgcagtaattacaccttcgccttcaaattcaatgtatgcaaccttgggctcatcggtatcgctgttgttcttaatcgctaagcttttgatgttcataataatttcagtcacatcttccttaactccgggaatggaactgaactcatgcaaaacgccatcgatttttacctgactcactgcggctccgggtaaagaagaaagcatgattcttcttaaggaattgcccagcgtagtgccgtaacctctctcaagtggttcaactacaaacttgccgtatctcttgtcttctgaaatctctgcgatttcaatgtttggtttttcaaaatcgaacactaatagcccctcctttttgggtttctatcaaatctcgagggaaataaagcactgcaaagcagtgcactgcccaaacacagcccaaggcgtaagttcgggtttttcatcctgcaaagtacgcctgccccataaaggacaggcataccttgtacaatttataatcaattgtaggattacttggagtacaactcgacgataagcatttcgtttaccggaacatcaatctcatccctggtcggcatttccttaacggtaccgcgcaggttctcctggtctacatccagccaggccggaaccatacgtccgccggtcacttccaggatgtctttgtatctctgtgcggatttgtatttctccttcacttcaatgacatcaccagccttaacgcggtaggatggaatattcactggcttgccgttaaccagaatgtgcttatggtcaacaatctgtcttgcttccttacgtgtacggcccagacccatgcggaacagcacgttgtccagtctgcactctaacaggatcatcaggttagtacctaccataccgttcatcttggatgccttagcatagtaattacggaaaggcttctctaatacgccgtaaatgaatttagctttctgcttttctcttaactgcatgccgtattcacttaactttttgtttgttctcttggattctctgttggactttttatcaattcctaaatagatcggatccagaccaagggatctacatcttttaagaacaggaactctatctactgccactttaattacctcctaattaaaatcaatcagactcttctacgttttggcggacggcatccgttatgtggaaccggtgtcacgtccttaatgctggttacttccaatccacatgcctgaagggcacggattgctgcttcacgtcctgaaccaggaccctttaccataacgtctacggattttaagccatgtacgagagctgccttagtagcagtttctgccgccatctgggctgcatatggagtagattttcttgaacctctaaatccaagaccaccggcactagcccatgaaagagcgttaccctgcgcatcagttaatgtaacaattgtgttattaaaagatgactggatatgtgcctgtccgcgttcaacgtttttctttacacgcttttttgtcacttttttagctgtagtggacacttttttagccattttaaactaacctactttctcattttcttgaattcgctcttcctgcttttaaaacatgtaaatcgaattcggttacaatgttgctaatgatgttcttcttccgctgatcgaagaacaaagttcacactaaattcgtgaattacctcattaagtgcttactttttcttgtttgctactgtcttcctcggacccttgcaagttctggcattggtctttgtcttctggccacgaaccggcaggctctttctatgacggattcctctgtagcatccaatttcctgaagtctcttgatgttcatagcaatctctctacgaagatcaccttcaacagtctgagtctcagcaatgatgttagccagcttttttacctcatcatcggttaaatccttaacacgagtgtctgggttaacgccagctgccgttaagatgcggttggagcttgctctaccgataccgtagatgtaagtaagaccgatctcaacacgtttttctcttggtaagtcaacacctgaaatacgagccatgtgtgtagtacacctcctaattttaattaaccttgtctctgtttatgctttggattttcacaaattactctgatactgccttttctctttatgatcttgcatttttcgcagatcggctttacggatgatctaaccttcacagtaattctcctttctatagaccaacaaagttgctaaagcattatatcaaacatttaccattaatgcaagcacttttttatctattgtgttttatgttattttccgggacaggcggtgtatgatatcactgtgcccgcagaaaactgaactctgtcttacttctgtcaccaaacagccggcttaccttatttatctctccaaatgattcttcccttggataaatcatatggcgacagctcaatggttactttatctcccggcaggatgcggatataattcatacgaagctttccgctgatatgtgccagtacctgatggccgttctccagttcaacctggaacatggcgttgggtaatttctcaattacggttccctcaatttcaattacgtctgcttttgacattctattttacctcctactgcctgcggctgcggatgaagcctgttatgtcctcatccctcaccgccgcgccttctgtaagcttcttccttaaggtttcatcgtgctcatccatgagctgcaagtgtttcctgttcttgcgtttctgtttacttaaagggtgtttcccgccgtctgacaaataaacatattccccttggacactgattatgatatacagttcatttttgtcgtgacctgctaagctctttaccaggccggcttccttaaactctaccatagggccacctcaaactacagcgataaaatctcaggttcgccatccgtaatcaggatggtgttctcataatgggatgccagagagccgtcctctgtcacaacggtccagccgtcatcctcccatactacatcatagcgccctgcagtaatcataggttcaattgcgagtgtcattccggctgccagcctgatgcctttacggcgctgggcgaaattaggaatctcgggtgcttcatgcatctccgtaccgattccgtgacctaccaggtcccggaccactccgaagccaaagctttctgcatattcctgaatggctttggaaatatcattgagatgattgccagctttcgcgtactttataccttcaaaaaagctctgctgcgtcacctctaccagtttcctggcctccccgctcacttctccaatcatatgggttctggctgcatcggactgatatcccttccatataacgcctgtatccaggctgacgatatctccttcttccagatagcggtgcttatccggaatgccgtgaaccacctcatcgttaatggatatacacacagatgccggaaaaccctgataattcagaaaagatggcacacatccatgacttcttatcatatcttcacacatccggtcgatttctttggtagacatacccggtgccagggtcttgccaagctcctcatgaatcttggcaagaatgcgccctgcttcccgcattaattcaatttcccgttctgatttaatcgttaccattctctatgctcctaaaatcctgacgatggcctggaatacttcttccatatccaatgtgccatctacctcggctaaaacgcctgcctttttataatactctatgagaggctgggtctggtcatgatagacatcaagacgcttcttaacagtttccggtttatcgtcatctctaagtaccagatgctggccgcatacatcacagattccttccattttaggaggattgtatacgatgtgatatgttgccccgcaggaaaggcacgcgcggcgtccggacatacggtttatgatgttctcatcaggaacatccacgttgactgcatagtcaatggcctcgcccatgtcgcccagggcctttgtaaggctctcagcctgtgggatagtccttggaaatccgtccagtacgtatccgtttttgcagtcctcctcatggatgcggtctaacagcatgccgatggtaatttcatccggcacaaggccgcctgcatccatataagacttagctttcatccccagctccgtgccgttttttatgttggcccggaaaatgtccccggtagagatatggggaatctgatattttgctgcaatcttttttgcctgagtgcccttgccggcaccaggtgcgcctaacatgataatcttcataaacccagtcctcctcgttatgagcacttagcggccgtattttggccgcttacgtgcgatacatgtcacctccacttggtgaggtcttccacgagcctagtggagtggctcgttatgagcacttagcgtctgtcttttagacgcttacgtgcgatacatgccactgacacttagcgatgtttctcacgagcttagtgcagcggcgcattataagctataaatacaacaaatccgcccctgtggaataccacaaaggcagattgattgattcaactgtggttgttaatcgttcaaaaatcccttataataacgcacaagcatctgagattctactgctttgattgtctcaagcacaacgcccacgataatgatcagtgacgttccggaaaatgagattcggctgacattgagtaaaccggacgcaagaatcggaacaaccgcaataactatgaggccgcatgcaccaataaaaacaatataattcaatatcttattcaaataatcgctggttggctttccaggacggatgcccgggataaagccgccctgcttcttcatgttattggccacttccaacgggttaaaggtaatggacgtatagaagtaagcgaacataatcagcaatgcaatataaatcaccagaccgatggagtatataggatactcaggcctgcaccatgaacccgaattgagcaccatcagaatcttactgccgatggagttgggatcaatcgtaaagaactgagaaatcaccaccgggaaggacatgatggaagaagcaaagattaccggcataacgcctgcggtatttatcttcagtgggatgttggaagtctgtccgccaaccatcttacggccaaccatcttcttggaatactggaccggaattctcctctcggcatcgttcagcacgataacgaaaactaccatagccaggattatcagggcaatcatcacaacgctgaaaatcatctttgtaaccgtctgtccgaagataaaacggtaataaagggtctttatatcatccggcacacttgacaggatgttgaacaacagtacgattgagataccgtttccaacacccttttccgtaatctgctcgccgatccacatgagcagggcgctgcccgttgtcatggtaacgatggcgatgatgatgttccatgcgttataatctatcagaagtccctgacgtccgaagccgatggccatggcacttgattcaatcagtgccaggcctacggtggtatagcgggtgtattcctgaatcttctttcttccgtcctcgccatccttctgcagctcttccagttttggaatcgcaatggtcagaagctggatgatgatggaagatgtgatgtatggcgtaatgctcagggcaaagatggacatggatgaaaatgaaccacctgtcatggcattaaagaagccaaacacatccgttgtctgtttcgcaaaccaattcgcgaagaacgatgtctcgattcccggaatcggcagctggctgccaaaacggatgactaccagcatcatgaaggtatagagaatcttagtgcgaagctcttttaccttgaatgcatttctgatcgttttaaacattagatcacctcgcaggttccacctaaagcttcgattttagattttgcaccttcactgaatgcattaaccttaacggtcagctttttggttaattctccatttccaaggatctttacaccatctcttggattcttaacgatgccggccttgattaaggtctcaaccgtaacctcagcatcattatcgaacctttccagagcgcttacgttaataccaacaatggtcttagaattcatattagtgaaaccacgctttggcagacgtctgtataaaggcatctgtccgccttcaaagccaggccttgtagctccggaacgagctttctgacccttatggcccttacctgcggttttaccattacctgaaccatggccacggccttttctaaaattatcgctatgctttgaacctgcagcaggctgtaaatttgacaattccatgactgcacctccttactctatatgattagacttcttcaacttttactaaatgccgcactgctgcgaccatgcctctgacagcgccattatctggcatctcaaccgtcttgtgcatcttggtcagtccaagagccttaaccgttgctttctgctttggaacagcaccgataggggacttgactaatgtgatttttaacttctctgccatgtctttctcctcctattagcctacgatttcttccacagatttgccgcgcagtcttgcgaattcttccggagtctttaaggaagtaaggcctgcaagagttgcaaggactacatttgtcttgttgttggatcctaaagattttgtacggatgttcttgattcccgccatctccagtacggaacgtgccggaccgccggcgataacaccagtaccttcaggagctctctttaacagaacagctgcacttccgaatttaccgataaaatcatgtgggatactcttattctcatctacaggaatctctaccagattcttaattgcggcttctttacctttgcggatggcctccggaacctcgccggcctttcctaaacctgcgccaacgtggccgttgccatcgcctactactaccagagcggaaaatctcatggtacgtccacctttaacagtcttggatactctcttgattgccactaccttgtcattcagctccatctgactggcgtcaataattgtacgcttcatgcttgttctcctctctattagaaatccagaccagcctcgcgggctgcatctgctaatgcctgaactttgccctgatatataaagccgcctctatcgaaaacaacttccttgatacctttttcaagggctctctttgcaatgactgtacctacatatgctgcagctgccttatcgttggtcttctccagttcagcatttacttctttctcaactgtggaagcagcaaccaaggtgttaccaaccgtatcgtcgataatttgagcatacatatgattattacttctaaacactgccagacgcggtctctctgctgtgccagcaaaacggttacgcattctgttgtgtttctttacgcgaatttcgcttcttgactgtttgttaaccatttttacactctccttaattatttcttaccagtcttaccaactttacgtctgataacctcgtcagcatacttgatacccttgcccttgtacggctcaggtcttctcttgtctctgatttcagcagcgtattggccaactttttctttactgatacctttaacgataatcttgttctgaccttccataacggtctcgatgccctctggatcttccatctctaccggatgggagtaacccaggttcaaggtgagcttcttgccctgcttagcggccctgtaaccaacgccgttaacttcaagaaccttctcatacccctctgtaacaccatgaatcatgttgttaaccagggttctggtcagaccatgtaaagatttcatcttctttaaatcgtttggtctgcttacgataatctgatcatccttctgctcgatggtcatttctactgggagctctctctctaatgttccctttggaccttttacagtcactttgtttccttctgcgattgtaacagtaactcctgccggaaccgcaactggcattctaccgatacgtgacatgcctttacctcctacttaaattctcggaaggaactatgcgttccttctgttttcagtttcctctatctcatccttaccaaacaaatgccaatacttcgccgccaacgcctaactgacgtgcttctttatctgtaatcacgccctggttggtggagatgatagcggtaccaagtccgcccagtaccttgggaagctcttccttgttagcgtatacacgcagacccggcttggagattctcttgataccggaaatgattttctcgttcttgtctttgccgtactttaaggtgattctgatggtctggaaaccgccgtcctctaccatgtcgtactttgcaacatacccctcttttaccaggatgtcagcgatggctattttcatcttggatgaaggtacgtctactgtatcatgttttgcagtgtttgcattacgaattcttgtaagcatatctgcaatcggatcgctcattgtcattttaaaatgcctccttctctataaatattctcctgttcctcactgcctttcatgaggaagatactcctccctacgttcggagtatcggctttcgcactaagttcgtgaaatacctcactaagtgcttcatgcctaccagctagctttcttaacgccaggaatctgacccttgtatgctaactcgcggaaacagatacggcagataccgtactttcttaaataagcatgtggacggccacagattctgcagcggttgtactctctggtggagaatttagccggacgctgctgtttaatcttcattgaagtcttagccatgaaagtttcctcctaactattttgcaaacggcatattgaataatgtcaaaagttcacgagcttcttcgtcagtcttagcggtggtaacgaagatgatatccatacctcttaccttgtcaactttgtcgtactcaatctcagggaagatcagctgctctttgataccgagcgcatagtttcccctgccatcaaatgcgttagggttaacacctctaaagtcacgtacacggggcagtgccaggtttaccagacggtcaaggaattcatacattctctcgccgcgcagcgttaccttgcagccgattgccatgccttcacggagcttaaagttagcaatggacttctttgccttggtggttatagccttctgtccggagatgatttccaaatcccttacagcagaatccagaaccttggcattttccttagcttcgcctacgcccatgttgataacaatcttatcaagcttcggcacctgcataacgttcttatatccaaattttttcatcagagcgtctaccatttcgttctgatactgttcttttaatctagccaacgttttttcctcctctcctgaattagtcgattactttgccggttgtctttgctacgcgaaccttcttgccgtctttttcttcaaatccgactctggttgccttgccgtctactaccagcattacattggagatatcaataggagcttcctggttaacgatgccgccctgtggtttgcccggagcctgctttgtgtgcttggtaaccatgttgcagccctgaaccagaactttgttcttctttgtatcaacagagataacttttccctgcttatctttatctttacctgcgattacgactactaagtcgtccttcttaatcttattcacagtaacacctccttataatacttcgggagctaaggagacaatcttcatgaactgtttgtctcttaattctcttgctacaggcccaaagatacgagttcctcttggagtcttgtcatccttaataattactgctgcgttctcatcaaatctgatgtaagaaccgtctttacggcgtgcgcccttaacggtacgtaccactacagcctttacaacatcgcccttctttacaacaccgcctggtgttgcatctttaacggaagcaacgatgatatcaccgatacttgcatatctcctggttgaaccacctaatacacggatgcagagaagttcttttgcaccggtattgtcggcaaccttaagtcttgtttcctgctgaaccatacctgttactccttcctcatctcattatctggctttctcgataatctcaacaagtctccatctcttatccttggacagtggtcttgtttccattacttttactgtatcaccgatggtgcactcattcttttcatcatgagctttcaacttcacggtcttcttaacgatcttaccgattacaggatgttttacatggtcctcgatagcaactacgattgtcttatccatcttgttgctgaccactttaccggtacgggtctttctcaaatttctttccacggtagtttaatctcctttccgatttccgggtatgttcactcaactaaactcgaaaatacctcgttaagtttcgtgaacgacgttcgcactaagctcgaaaatgcctcgccaagcgctcacagtcatgcgttagccttctcagtgataacagtctggatcctggcaatgttcttgcgaacttccttaatcctggatgtgttatccagctgattggttgcattctggaatcttaaattgaacagttccttcttcgcagctactaactcttcattcagctcatttgctgacttattctttaactcttctacaaatttattagttttcactgttatcaccgccttctaaatctgctttagaaacaatcttacacttgcatggcagcttgtgcatagcaagacgcagagcttctctagctgtttcctctggtacaccagcgatttcgaataatacacggcctggctttacaactgctacccagtactccagagcgcctttaccggaacccatacgggtttctgctggctttgctgttacaggtttatccgggaaaatcttaatccagactttaccgccacgcttgatgtaacgggtcatggccacacgggcagcttcaatctggtttgatttgatccaacatggttcagtggagactaaaccgtactcgccgttagaaatcgtgttgcctcttaatgccttgccggccatggaaccacggaactgcttacgacgcttaactctcttaggcattaacattatttatcgctcccttccttgtttcctttagtaggaagaacttcgcccttgtagatccataccttaacgccaatcttgccgtaggttgtatctgcttctgcgaaaccatagtcaatatctgctcttaatgtctgaagcgggatggtaccttcgctgtagaattcagtacgtgccatatcagctccgccaaggcggcctgcaactgcggtcttgatacccttaacgccggccttcatggttcttcccatggtggacttcattgcacggcggaaggaaacacggttctccagctgtcccgcgatggactctgcaaccagctgagcatccctgtccggacgtttgatttccttgatgtcgatgaacagcttcttatcagtcagcttctgaacttccttcttcagcttctcgatttcagaaccacccttaccgataaccacgcctggcttagcggtgtagatgataatcttaactctgtcagatgcacgctcaatctcaattttggaaatgccggcactgaacagtttcttcttcaggaactttctcatattgtaatcttcaaccaggcagtcagcaaaatcagcttctgcataccacttggaatcccagtctttaataacaccgactcttaagccgtgtggattaactttctgtcccatatttgcctcctatctctcattcagaacaacagtgatgtggctcattctcttctcgatcctgtaagcacgtccctgagctctcggtctgactctcttcatggtcgggccctggttagcgtagcactcttcaacataaagtttcgctgggtccattccgttattgttctcagcatttgctgctgctgattccagtaacttcttgattaagctggaagcgtatctgggattgtaagttacaataccaagtgcggtctgtaaatctttgcctctgatggcatctaatacaaagcaagccttctggacagacactctcgcgtaagacagtgttgcgcttggtcttgtgtccttctgggcatttctttctctcttgacttgggatctatgtccttttgccattagtaaaacctcctttcaatttaccgtgaattactttctcacgccggacttcttctcgtctttaccgtgacctctgtaggttctggttgctacgaattcgcccagcttatgtcctaccatatcttcggttacatataccggaacgtgtttcctgccgtcatgaactgcaattgtgtgaccaaccatctgcgggaagattgtagaacggcgggaccaggtcttgattacctgcttctgtcctgctgcattcatagcgtctactttctttaacagatgtgcatctgcaaatggtccttttttcagtgaacgagccatgtgttcttaacctcctttaactatttgatggttctgccatcacgtcttcttacgatcaacttgttagactgcttgtttttctttctggtcttcagacccagagccggcttgccccatggtgtgcacggacccggacggccgataccgcacttgccttcaccaccaccgtgtggatggtcgttggggttcattacggaaccgcggactgtaggtctgatacccatgttgcgcttcctgccagctttaccaatgttgatcagggagtgttcgccattgcccacaacaccgattgttgcgcggcagatgattggaaccattctcatttcgcctgaaggtaaacgtaaggtggcgtacttgccttccttagccatcagctgtgctgaattaccggctgaacggactaactggccgcccttgccaggatataactcaatgttgtgtacctgagtaccaaccgggatgtgatacagcggcatgcagtttccaagctttgcctctgctgtatcgccgctcataaccttcattccgtcggttaagccctgtggcgccaggatatatgccttctcgccgtctgcatagcagatcagagcgatgttagctgttctgtttggatcgtactcgattccgataacagttgcgggaataccatccttgctgtttctcttaaagtcgatgattctgtattttcttctgctgccgccgcctctgtgacgaacagtgattttaccctgattgttacgaccagcgttcttgttcagggatactaccagagatttctccggagtgtcctttgtgatttccttgaaatcagaactggtcatatgtcttctggaaggtgtataagcattatacttcttaattcccatgacattttactccttttctttttcttttcacggcgcgtgactttggttggaatatctgggatatcccggatgccgtataagttctccgtccgggtgtgtccggcgggtgaatggtttgttggattaaggtgttcttaaccgcaacgggttccgctcgactaagcccgaaaagacctcgctaagtctcgggaacggcgttcttactaggttcaaaaaatctcaccaagtaatcacagcccctggaaaatctcaatctctttgctgtcttctgtcagctttacgattgctttcttggaagcagctgtcttgccgaaggtcattccccttctcttggtcttgccttcgcagttcatggtgttcacgccggcgaccttggtgcccgggaacattttctcaacagcctctttaatcatagacttgttagcgtctacatgtaccatgaaagtatactttctatcgcccatggcattcatgctcttctcagtgatgactggttttaaaatgacgtcataatacttgatatctgccattatgcgtacacctcctcgatggatgcaacagcagctttggtagccactactgtgttgtacttcagaatgtcgtatacgttgatggagccgacctgagaggtcttaacgtctgcaatgttccttgcagataatactgtattctgatcattgtcagccagaaccaccagtgccttggataccttcaggttatccataacattctggaacttcctggtcttaatctcgtcaaacttaagctcatctaccacgataaacttgttgtcctgaacacggctggtcagagcagacctgagagcggctctcttttccttcttgttcagtctgatggtgtaatctcttggtgtgggagcgaatacgataccgccgcccttccactgaggagacctggttgaaccctgtcttgcatgaccggttcctttctgtctccacggctttctgccgccgccggaaacctcagaacgtgtctttgctttctgtgttccctgacgtttatttgcaagctgtgcaacaactgcaagatgtaccagatgctcgttaacttctacaccgaacacggcatcgttcagttctaatgtgccaacttctttaccttccatattgtaaacagatacgtttgccatttgtgtgttcctcctttcctataaaagcttacctttcaaccttaacggtttctttaattgttaccaggctcttctttggtcctggcaccgcgcccttaaccagaatcaggttattgtcaacatcaaccttgacaacctccagattctgaacggtaatctgcttgctgcccatgtggcctggcattcccttgcccttgaatacgcggcctggtgttgtagcggaaccgttggaaccctgatggcgatggaacttggaaccatgtgccataggtcctctgtgctgtccatatctcttgatggcgccctggaagcctttacccttggaaatagcggttgcgtcaatcttatcgcctgctgcgaagatgtcagccttaatctcatcttttacggaatactcttcagcattctcaaacttgaattctcttacatatctcttgtaagaaacgccagccttatcaaaatggcctttctgtggcttgctgaccagtttgtccctcttgtcaacaaaaccaacctgcactgccttgtaaccatcgttctcagctgtcttaacctgtgttaccacacagggtcctgcctgaagtacggttaccggaactaaagcaccattctcattgaagatctgggtcattccgacttttgttgctaaaatcgctttcttcattgtcttacctcctgtttcatgatctacagcggaatgctttcgcattcatcctagaacagcctaatatacgtggaacactatgaaccgcctggcggtatgttgattcctcaacaggaaatgcagtgttgcttctatatttaaacccttcaggatataaacattttttcttgaaaacaaattgccctgcggccattctattttgttttcatcttgatgtcgatgtacacaccagccggcatttccagtctggacagcgcatcaactgttttctggcttggagctgtgatgtcgatgagtctcttgtgagttctctgctcgaactgctctctggaatctttgtacttatgaaccgcacgcagaatagttactacctctttcttggttggtaacggcaccggtccgctcacctgtgatcctgtcttctttacagtctcgatgatttttccggcggactgatctaccaactgatgatcataagcctttaaagtgattctcattacttgacttgccataaaaaaagtcgcctccttttcgcactttcaaaccaagtacgacaagcggtgactgtacacgtttccgtgtgtgtcctaacggaactccacactgattctgccatctaacattgcagtttctttaattggtacagtgacttgtcgccagtttcctaacttgacattcgctccacggaaaacctgcctcactttgtgggcagcaacctctcgcttcaacgctatcatgccacagcctttgtataatagcacacattccaaataaatgcaagtattttttcaattttcttttacggcctttgttgggagttatgttggttttaattaattcttttcgcagcttttcccggagcattctcactcaggcagaccgcggtctcatcatgcaaaaaaggaaagacctcccatttaatatagaagtctttccttatatcaatcatttcattcgcataccggccgtcacgccaggctgtttactctgtgcagtacggctctgtgggctcctgcgcgtaagaattaacgtcactgtcatcgtctgcctttgtcagctcaccggagccgttggttgtaaacttaacgccgtcgctgttctttacattgctgcccttcataaccttaccggaagcgttgaccacataattcctgccctctacccggtagcatacatacttctgaccgtccgttgccttctgaagttttcccttataatataagtagttatccttaaccccgttgacgccccgtccattgtccaggaaatagaaatcgctcttattgccgtcgtcctcggtcactttcatcttccccttctggacacagctcttgttcttatcgccaaagtagaacgcggtccagtcatcctcgccggaaccggtataaaccttcttaagcccatacaccggattgcccaggtggttgaacaggtatgatttaccgttcagcttcacaatgtcgctggtggtaaggcgttcggaatcagctgccctcggtttgccgctgttgttaaagtagaaccactccacggcttcctcataaccgctcagttcctcaggcggttcaatggaataccagccaatcttggccttgccgtcagaaccaaagtacataaagtcctggatagagtcattggttgaggactttacgttcttccaacccgtctgcatggccccgtcctcgtcaaagcagtaataggttccgtctatcttacgggccgtataatcgccgtccgagctgtccggcgcgtatttcttgccgttggaggaaaaatagtaccagtagcggccgtcatcatctgtcacgctgtcgattccaggcgtcaccttgtctctgttgtcgtcatcgtcatccggcggatacagcttctgccagcctgtcctcataacgccgtcagaaccggtataatacatatcgtccagaatccagccaatctccatacggccgtcaccgttaaagtgataccacttattatcaatctttttccaggcatccgtgattaccttgccgctgctgctgaaataataccactcatactctccctggtccccggtaagcttcagccacttgtcagtgagcatgatgccgttgctgtccatataataatcagactcaacccacgcattggtggccatgacaccctcgccgttgagatagcgccactggttgtccgccccttttttccatgtattatatattttattcccgttggagtcatagtagacccaggtgctccccgattgagcccaaccctctgctgccagggcagatatcgtagccgtaccaaagcacagcactgccgccagggcccacactgccaccatctttttcttcatatgctcaactcctcttcccatctgcattcacgcatatcagcccgtattccgccagggctgataatcctatggtatattgtatcaaggctccctcaattattcaacctaatttatctttcaattctattacaatttagctaaaccgtttctatttttccgaaaatgtaccgaatacttgacggagccgcagcacttagactatactcattattatcattattatatatggaagaaacgaggttaaataaatatatgtggcttgcagatgagtggaaggattatgaagtgatagactgttcaaagggagaaaaactggagcgctggggcgattacctcctggtgcgccctgacccacaggtcatctgggacactcccaggaaccataagggctggaaaaagatgaacggccgctatcaccgcagcagcaagggcgggggccagtgggaattcttccatcttcctgaacagtggtccattggatataaggggcttacattcaatctaaagcccttcagttttaaacacaccggcctgtttcccgaacaggctgccaattgggactggtttagcgccagaattcgaggggcagggcgcccggtcaaggtcctgaacctgtttgcatataccggcggagctaccctggccgcggctaaggcaggcgccaatgtcactcatgtggacgcctccaagggcatggtggcctgggccaaggaaaacgcccaggcctcgggcctgtccgaagcccccatacgctggattgtggatgactgtgtgaaattcgtggagcgggaaatccgcaggggaaaccgctacgatgcggtcatcatggatcctccctcctatggccgggggccgaaaggggaaatctggaaaatagaggatgccattcatcctctggtcaagctgtgcgcgcagctcctggcagacaagcccttgttctttctgattaactcctacaccaccggactggctcccgcagtcctttcctacatgataagcgtggaaatcatgccccgctttggaggaacagtatgcgccgaggaggtgggccttcccgtcacccaaaccggcctggtgctgccctgcggggcatccgggcgctgggaggcatagagcggtgaatcgagtaggaggaaggcgattatttcgccttccgacctctcacaccaccgtacgtaccgttcggtatacggcggttcaatcaacttaacatgtaacagccttttcggcgtagtagtcttccatggatacaagaccaaacttagctagtctctctttactgatacaaatgtggagattccagcttctgcacactctggcatatcctttggcatatgaaatgccatgtgccgcatttggcggcagaccaagtttgataagattcttttccctgttctttggcgttttccagtgtttccatatgcacatgcgcagtcgataccgaatctgtccgtccatttttgcgcacagccttttcatgcttccgattttgaaataatttatccaccctcggataagccggttgagtttcccaattttataaccattgcccactccccagctcctgcttgtatatttcttcatctgcgccttgaactttgctgccgctttcgggtgtggtctggctttgtaccctttggcaaatgagtcatagtaaaatccaaaccccagatacttaatgccctttggtttatcaaccctgctcttttccgcgttcactttcagtccaagcttttcctctataaaccgagccacgctcttcattacccgctctgccgcctgtctgctcccgaccattataataaggtcatctgcataccggacgaaatccagcctccttgcttccagttctttgtccagctcatttaacatgatatttgctaacagcggcgagatatttccaccctgcggtgtgccgactaccgtatcttcatactcatcatcaatcattacgccgctgaccagaatctttcttaccaccgatatgacatctccgtcctttattgtccgtccgaaaatcgtcatcagcttgtcatggtctactgtgtcaaagaatttcgctaggtcgatatccactatccagttgtgtccgtcattcatcatttccaatgctttaaggactgcctgctgtgcacaccgcttgggtctgaatccatagctgtggtcgtgaaactgctcctcaaatatcggggtaagcacctgtgccaccgcctgctgtacaaagcggtctactgctgttggcactccaagatttcttgtaccaccatcgggtttgggtatctccaccctgcggactggcttcggcttatacttcctcgtccgcaactgttccttaatgttttcgccgttttccgaaagatatgcgccaagttcttcaacggtcatcccgtccacgcctgccgctcctttattccttacgacttgcagatacgccgcatttagattatccctgcttaatatctgctccatgagactgcttgtgtccatgcgttgtttcctttctgccccttttgcctttgccgcctttgaagtcatcgacaggcgtatgctccggctacgaagtggaacgtacttcaactgattgattgttcagcccttcgctccgtccccattacaggaacttcctcactactatggcttctgctgacttctcacaattcgttgttactacggctaatgagaccgcctgtgagacctccccagttaaggtgcgtgttcttttcctccatgtacctgccgcatttactcgtacttccggcaaccttttggacttcagtgccttttgccaccttatccgtatttccgagccttatatgcggttcctgtccgtcaggtcagaggtttgcttacagcttctttcagattccgtctcacggcggacacccttgctgttcggctatgtgcttcgttgttgcctacgcgcacttgggactttcacccattagaaaacgcccatgctgggcaaacaaaagtcccgcatcaggattcactgatgcagggcttttttcttgcttggctcgtatttctttcttttttgttttacataatcccgtacttatcaaaggaggcttttgcggccataccgttcttaatggcctcggccaccattttctctccggcagccttctcaatgaccctgacaaccacttcctcctcaatctccttcgggatgaccagaacaccgtccaaatccccaaatatagctccaccctgacatgggcattgtccagcacggcagcgctggcgccgcagtatgtcaggataatgaatacatacctggaaagctcctttgtccacgccagagggagattgaacacaaagcggaacagcatctggagaaaacacaccacgcagcacctcctgtaggagcaaagtgctctttagccgttttgagcatgtccccgttattggtataagaaaaccgcggcagttcccccagtccggcctcgtgataaattgcctggagatgaaggataccattggcggagccgcccatggtcagaaggtgcataactgcgttctcaaatgcgtgctctgttaggatatcccttgtggtaattcccttttgaaccaattccacaattttctccccggtctcaaccccctttgccatgcgggctgccaggactgccggaatgatgctgcttcccatcagagacatgcccaggctctctgataatgcgctcatggtattagcagttcccagcatggcacaggagccactgtggagaactccatgggcgttcctcctgccttgataattccctcctttacgctctcacacagttgtttcaatacaaaatgtcccggcgtcgcattggtatagctgtttgcaatagcaatgatgggtttgccctgcccatacaaatcgagtaggaggaaggcgattatttcgccttccgacctctcacaccaccgtacgtaccgttcggtatacggcggttcaatcaacttaacatgtaacagccttttcggcgtagtagtcttccatggatacaagaccaaacttagctagtctctctttactgatacaaatgtggagattccagcttctgcacactctggcatatcctttggcatatgaaatgccatgtgccgcatttggcggcagaccaagtttgataagattcttttccctgttctttggcgttttccagtgtttccatatgcacatgcgcagtcgataccgaatctgtccgtccatttttgcgcacagccttttcatgcttccgattttgaaataatttatccaccctcggataagccggttgagtttcccaattttataaccattgcccactccccagctcctgcttgtatatttcttcatctgcgccttgaactttgctgccgctttcgggtgtggtctggctttgtaccctttggcaaatgagtcatagtaaaatccaaaccccagatacttaatgccctttggtttatcaaccctgctcttttccgcgttcactttcagtccaagcttttcctctataaaccgagccacgctcttcattacccgctctgccgcctgtctgctcccgaccattataataaggtcatctgcataccggacgaaatccagcctccttgcttccagttctttgtccagctcatttaacatgatatttgctaacagcggcgagatatttccaccctgcggtgtgccgactaccgtatcttcatactcatcatcaatcattacgccgctgaccagaatctttcttaccaccgatatgacatctccgtcctttattgtccgtccgaaaatcgtcatcagcttgtcatggtctactgtgtcaaagaatttcgctaggtcgatatccactatccagttgtgtccgtcattcatcatttccaatgctttaaggactgcctgctgtgcacaccgcttgggtctgaatccatagctgtggtcgtgaaactgctcctcaaatatcggggtaagcacctgtgccaccgcctgctgtacaaagcggtctactgctgttggcactccaagatttcttgtaccaccatcgggtttgggtatctccaccctgcggactggcttcggcttatacttcctcgtccgcaactgttccttaatgttttcgccgttttccgaaagatatgcgccaagttcttcaacggtcatcccgtccacgcctgccgctcctttattccttacgacttgcagatacgccgcatttagattatccctgcttaatatctgctccatgagactgcttgtgtccatgcgttgtttcctttctgccccttttgcctttgccgcctttgaagtcatcgacaggcgtatgctccggctacgaagtggaacgtacttcaactgattgattgttcagcccttcgctccgtccccattacaggaacttcctcactactatggcttctgctgacttctcacaattcgttgttactacggctaatgagaccgcctgtgagacctccccagttaaggtgcgtgttcttttcctccatgtacctgccgcatttactcgtacttccggcaaccttttggacttcagtgccttttgccaccttatccgtatttccgagccttatatgcggttcctgtccgtcaggtcagaggtttgcttacagcttctttcagattccgtctcacggcggacacccttgctgttcggctatgtgcttcgttgttgcctacgcgcacttgggactttcacccattagaaaacgcccatgctgggcaaacaaaactgccgatgcagtttcctctaagatactgcatcggcaggactgacttgttcctctgtctgccgggacttcggcactatttataattctactccagcagccgtcccacatccagctttccccacccctgctggttatgcggcaggcccaggtccagggcgcgttccctgatacgaagcttcacatccttgttgctcatatccgggtacttctccagcagcagggctatggcgcccgacactaggggcgtggacatgctggtacctgattttgaaaaatatttgccgggctcattgcagcagctgatgatgcatgagcccggcgctaccaaatccggcttgcagacacaagccagtgtgggacctcttccggagtaatccaccatgcggcttcccatgacatccacttccttgtggtcgtccgagcagcccactgttatgaccttgcggctgataccgggagttgtgatggtcatccggcccggtccatgatttccggctgccaccaccaccacaaggccgtcatcccaggccgcattcaccccccgcaccagaattgagttctctgtcatgtccctgcgcgacaaggaccctacggagatgttcacaatgcggatattgtatctgtccctgttctcccggatccatttaagtcctgtcagtacgtccgtggcatagccgtttcccttctggtccagcaccttcactgatatcagactgcatcccggcgccactcctctgtattttccgtcggaggagatgccgctgcccccaatcattgcagctatatgggtgccatggccattgtcgtcatagggcgatgtgcggtggtttacaaagtcagcaaaggctgtcactctatccttaaaatcctcatggaggtaaattccggtgtcaagtactgccacacccactcctctacccgtaatccccatggaatatacttcttcacaattaatgtcttctctcgcctgattcacatcacgattttctccttttttattaggatattctataatgaaggaatctgtgccacggcaccgtgtgccgcggtcaggcaggcagaactgtcaggcggtttatccgcctgacagaaccagaaaaaattctctttaaaatgaaggcggaacctgcttctgccgatccacgtcaattacaccgtaggtattgattctcagcttcggaattaccggaaggcttacaaatgccagtgtcatgaatgcatctatatcgctgctgattcccagctccctcgtacacgacttcagagcctgcagccgctcctccacctcctgcacggataaacggctcataactccgccaatgggaagggcaagctcgcctaatacccggccctctgccgccacggccagtccgcctccattctttctcaccgcgttggcggccaataccatatcccagtcattggtgcccaccacaatcaggttatgggaatcatgggcaacgctggtggccacagcccccttcttaagaccatatccgcctacaaagcccagccctttgtgcccggtgtgaagatggcgttcaaacacagccgctttcacgatatcctgttccaggctgacgccgggtgccagtcccggagtatcctgccagggcaccagacgctcctctgtgagaagttcatggggcttgaactgtataacacgctccatggttcccttttgctccagcaccaggtcctccagggtaatctcatccatgcggaaggagtcaaatacgcttgggaacgcagcttccaggtcactggccgtttttcccgcagagcccatatccttcccggctcccaggcatactccctctcttgccgtcaggacgccgttcttgtatacagccgccacccgaaactccttcaaatccttaagcactgccaaatccgccctcagcccaggcatgacagctcccctgtccttcagcccaaaatactgcgccgcattaaaagtccccatcttaatggcccgtatggggtccgctcccagagccactgccctgcggatgatataatcaatgtgccccatggaaatcaggtcgcctggatgcttgtcatctgtcaccagcatacatctctcataatagggggcctcaaacaggggcataagcgcttccaggttcctggcagccgtgccctcccgtatcataatccactgtccccttccaagcttttccagagcttcccctgcatccgaacactcgtggtcagaccacacgccggagcacacataagcattcagctcattccctcccaggaaaggcgcgtggccgtctataaccttgccgcggctacctgcctccttaagcttctccatcagatcctcccggccggcaaccactcccactgaattcatcacctctgccagacccaaaaccctggaattctcataatacggctttatatcctccggccccagcacggctccggactcgtccagtccagtggagggtacgcaggagggcatgacaaaaaatgtatccagggacagtccctccgtggcttttaacatgtagtccacaccctggcatcctgccacgttgccaatctcatggggatccgtgatcacggttgtggtgccgtggggaaggacagccttttcaaactccggcggcgacaccatggagctttcaatatgtatatgcccgtcaataaagccgggacagatatacctccccgtcatgtccgcgttgataagtccgtcatattcccctatgccggctatgcagccgtcctcaatggctatgtccccaacctctgtgcgctccgtaaatacattgacgattgttcccccttttaatacaagggatgcctttctccttccggcagcaacgtccatcatttttttaagatcattgtattgtctcacacaaatacctccttctgtctattctttatcccccaatatatttgatatcataatactataatctatgtaaaagtacaatattctgatattattaaatttttatgtaaattattactactttttcattcatttagatattctgcaaaatttttacattctaccactaaaacgcttgtatttccgctttatcgtgctataatagtctcatggaagtatagctcagctgggatgagcgttcgcctcacacgcgaaaggtcatgggttcgagccccattacttccattttttatacccattttcagtttacgattccatttcatttttctttcatccccagaagcctgttttttccagtcttctgttttttcccctgctgccttatttgttcccatggctttgtccgggaggtgggaattattaattttaagattttcttaataatctattcaaagaacattcaaacattccggaggattgcatgctatactaagtacataagaaatgcacgaatgtttaacaactatccttcaaccctttttgaaaatccgaaaatcctaaagaaaattgctccgtaccacctggtacggagctttttctatgtaatgcataaattttgactttctttaccaccgtctcctgtctccggctcttatctccggttcagtcctgccaggacttcccttaatttctccacatttccatcatcaaagcaatatccgtccatcccgcagcggcgggcgccttctatgttaagctccaggtcatccacaaaaaagcattcttcaggcttcagatggaaccgctcaaacagatggccgtatatctccttctggggcttcaggcacaggacatcggccgagaacaggataccgtcaaaacaatccaccgcgggcagcacgtccttataacagctcaaaaggcggacggatgcattggaacacagatagatgccatatcccatggacttaagccacctgaccacatcctccattccttccttcttatacatgttgaactcatgccagcggttaaaacacagggctgccagactgcgctcctcctctgtgtccagacgggcctgcatcttttttaaggccatatcctccggcataactcccatgtccagcagaatccactcaggcgatacgaatacggaagtgctgacctttttacgtgtttccgggtcctctatgaaatgcctgcatactccgtccgccgtgtagtccaccaggacatttcccatatcaaaaacaatgttcttaatcatcctatcctcctgctctcttttatatatattatggctttggaacctctgaagggaacattctaccatattcaaaaacccgggacaaggccccgggtttcatgtctcttaggcttccggtttttcaacctggataatggcagccttctgcataggaatacggcagtttttattgttaccgaattccacaatgactgtatcatctgtcatgtcgatgataacgccatagaatccgctgctggtgagaatggtatcaccgactgcaacgctttccagcaattccttttgtctttgcttctccttcttctgaggacggattgccatgaaatataacatacctcccagaagaacaatatagagaatccagaacatcggaccacttgtcattccatcttcctccttcacacctaccgccgcctcgccgcagtagtttcttattcatcagacgccgtaccggtggcacggctggaaccttccataccggcaagcttggccgctttatactcagcatagcggtgttcctcgatggcgtcgcgaatctctttcatcattgtattataaaaatacaaattatgcaaggtacataatctcattccaagcatttcttttgccttcagcagatgacggatataggccctgctgtatgaacggcaggcaggacagccgcatccctcttctatggggcgggaatccagctcgtatttctggttaaacagattcagcttaccctggttggtgtacacgtgaccgtgacgtccgttcctggatggatatacacagtcaaagaagtccacgccccggtccactgcttccaggatattagccggggtgcccacacccatcagatagaccggcttgtcctccggcagacagggcactgtcacgtccaggatatggtacatctcctcgtggctctctcccactgccagtccgcccaccgcatagccgtctaagtccatttcccgtatggtccttgcatgttccatacgtatctcctccaccacgccgccctggttgatgccgaacaacagctgctcccggttcaccgtgtccggcagggagttaaggcgctccatctcggttttgcagcgcgccagccagcgggtggtgcgctccactgaatgccggatgtagtcgtcgcttgcatggctgggagggcattcgtcaaacgccatggcaatggtggaacccagattggactgaatccgcatgctctcctcaggccccatgaatatcttgtggccgtcgatatgggagttaaagtaaaccccttcttccttaatcttgcgcaggcctgccagggaaaacacctggaacccgccggaatccgtaaggatggggcggtcccagttcatgaacctgtgaagcccgccaaattcctttatgagcttgtcgccggtgcgcacatggagatggtaggtattggacagctccacctgggtgccgatttcccggaggtcatccgttgaaacagctcccttgatggcgcccaccgttcccacattcatgaacacaggcgtctccactgtgccgtgtactgtttccatgcgggcgcgcttggcccgcccgtcctttgttatgacttgatatttcatataatagcctcaattactcctcatcgtctgccagggcagctttaatcatgatggcgcactcaatccgcttcttctgcatctcacagccaatgtcatacgccccgttgatggaaccgctgaaattatacgcattggcagcacagccgccgctgcagtagaacctggcaaagcagtccttacacttaggcttggcgtatacgttgcaggtcttgaactcgtccctgatgtccgtattcacaacgcctgtgtccacattgcccagaaggaatttctcattgcccacaaactgatggcagggatagaggtcaccccacggggtcactgccatatactcggtgccggaaccgcagcctgccatgcgcttggccacacatggtcctgcctttaagtccagcataaaatggaagaagttgaatccccttcccttctttttccgcttgatatactctaatgccaggcggtcgtattcttttaagatgaccgggatgtcctcctctctgatggcgtaatcctctgacgggtcagccaccaccggctccatggacatctgctcaaatcccaggtccgcatagtgaagcacgtcatccgcaaagtccagattgttcctggtaaatgtaccgcggacataatagttcatctgcttcctgctgtccgcaagcttccggaacttggggacaatcaggtcatagctgccgctgccgttacggaaggggcgcatcttatcgttgacatcctttcgtccgtccaggctcagcaccacattgctcatctcgcggttgcagaattccatcacctcgtcatttaacagaactccgtttgtggtcagggtgaaacggaatttcttgtggcgggcttcctcctgggaacggccgtatttcaccagccgctttaccacatcccagttcatcaggggctcaccgccaaagaaatccacctccaggtgttcccggttgccggaattggcaatgaggaagtccagcgccttctttcccacctcgtagctcatgagggcgcggcggccatggtactcgccttcctctgcaaagcagtaacggcaggccatattgcagtcatgggcaatgtgcaggcacagcgccttcacaaccgtcttcctctttttaaagtctaccacaaaatccctgtaaatatccttggtaagaagctgctccgcatcaatcagctgtccgatttcctccagagcctcctctatatcttcctggctgtatctgtccttcagacagacccttacctcctcctccacttctgaaggcagggcagccggcgcttccatctccggaatccgctgtgaaaccagctgcacggcatcgtagacaaccgggtccaccacatggacggatccgctgttgacatccaggacaatatgataaccattatttatatactgatgaatcacgaatctactctctctctttctaaggaccaggggccccaaatcctgtgcatggtaaagcccctataatcccatcgaccataggggcttacaaccaatttcctgtatgtatctcttctgaccggcgattagcggttagcgttctcgcagctctggtttcctactgtacaggatgtcttgcaggctgactggcaggaagtctggcactcgccgcatccgcccttcttcattgtgtcctttaaggtattggtattcaatgtcttaacgtgcttcatactacggcacctcctattcatttaatattattatttgtttgaacatataattctttgaaattataacacaggttaaagtcccttgcaacggtattttcaaaggtttgtcatattaaaggctcctccgggaatatactgcaacatagattctttcaaaaggagaacaatatatggaaaatggtattgtgaagcccatgctccgctccctgctcatctcctatgtgctgtcaggaatccttctggctgccctggcctttgccctctataaactgcgcctgaaagagggacaggtgaacctgatggtgtatgccgtgtatctgctgacctgcttatccggcggtttcctggcaggcaaacgcatccggcagcgccggttcttctgggggcttctgtcagggcttctgtacttcctggtactttttgcagtgtcctgggccatgaatatggggtcggccattgatatggaacgctccgtcactgtcatgggcatatgcgcactgggaggaaccataggggggatgctcagttaatgatcataagagagaatgcctgcttcctttcatggccatggaatccggtcattctctcttctcttccatcacgcggccctccccagggccttattttcttatttcttttttttcttcacacccgcctcttccaggctcttcacagcctgtgccaacacaaagacagcgcttcccaaaaacacgaacatatctcccagattgaacactactttcttaagggatttccattcaatggtgaaataatccaccacatatccgcgcatcacgcggtcgtacaggttgctgagggcgcctcccatcacaagggacaggcccagcttttccccggtcttgcccttatcctgcatcatggctgccagagctcctgccatggcggaaatcaccataagcggaatcccctttaccaattccggcctttccttcatgaatccaaagggaaaaccgctgttatggttcttatgaagctttattaatcctttggcagacggcagctcccttgggaacgtgtcgtcctcctggccctcaaccacgctcttgacccccaggtccagggcggccagcccgcctattatccagccgtaaatcatagattcgccttcctttccacccttttatttcattttactatggtttcacacctccgtccagtgaaaggtttctgaattcaagcatatactataacaaatatcctgcccgaggtgtgccatggcagactgcccatttaattccgccgacgagaatattgctgatttcatatacagaattggaagccagcagcagattggcggcaacccagccgatattccctgtatggattatgtgaacgaggaatacaatatcatctacactcctctggataccgtaccccccatttccctggcccaatacagctactatactgtacccggacttttttcccttctggacagctccagcatggaggcatccggcatactcaccgccttttccgcgcccgccctgggaaacagggggcgcgggacccttatcggtatcgtggataccggcattgactataccaaccccttattccgctatccggacggctccaccagaatcgcgggcctgtgggaccagagcatccccgcgggagcggatgtcattcctcccggcgtgccagactattatgaactcagcggcgcctcttatggcactgaatttactagggagcagatcaaccaggcccttacctccgacagcccccttgacctggtgccctccacggacaccaatggccacggcaccttcctggccggaattgccgccggcggctccctgccggaacaggacttcacgggcgcggctccggagtgcgagctcatagtggtcaaactgaagcaggccaaacgctacctgcgggaattctaccttgtcagcgagggcgccgatgcctaccaggaaaatgacatcatgatgggaataaaatacctgcgggtgaccgcgttccgcctgggccgccccctaatcatcctcatcgcccttggatccaatctgggaagccatgagggcacctcacccttaagcagcgttgtgcaggatgccagccgtttcctgggccgtgcagcggtcattgcggcaggcaatgagacaggccgggcccatcattatttcggcaccattccggccggacaggagtgggatgatgtggaaatccgggtgggaccggaagaatccagccgcggcttttccctggagctatgggcttccactgccgatacctattctgtgggcttcgtctcacccagcggtgagataatctcccgtatccctattatagccaggaacgagacctctatcccttttcttctggaaccaacggtcattacggtcaattaccggctcattgaatccggcgccggaaaacagctgatattcatgcgttttgaaaatcctgtgaccgggatatggagggtgcgggtttataatacccagtattttacaggtgagtttaacatatggctgccctccgagggactgatatcggatgaaaccgtatttatgcgtcccactcccgataccaccattaccatgcccggcaatacgggcgcgcccattacagtgggggcctacaaccatctgaacaacagtatctacatccactccagccgcgggttcaccacttccggtattgtaaaaccggagctggcagctccaggcgtcaatgtgatggggcctgctgtggggcgcagaatcaacggctccatccccatgaccacccgcagcggcacctcggtggctgccgcccacgtggccggcgctgtggccagcctctttggctggggaatcgtggaaagcaatcagattaccatgagccaggcatccgttaaatcttatttaatccgcggtgcaaaaagaaatccagcactccgctaccccaacgaagagtggggctacggagcactggatttatatgaaaccttccggcgtatcagggaataatccaacgttcagcagggtatgaataatcctcacaaaggtatgaatcaaccacgcatctgtatcaatggtccgccgctcttttccagatagggacgggtgacaaccacggagccgatattggggtctttgggaatctcatacataatatccagcatgaattcctccagaatggccctcagagccctggccccggtccctctcttgatggcttcaccggcaatccatttaagagcctcatcctcaaaaatcagccgtacctcatccatctccagcagccgttcatactgcttggtgatggcgttcttcggctccttcaggatgcggaccatcatgtcctccgtcagcccctgaagggtcactgtcacgggaagccttcccaggaactcgggaatcatcccaaaggtccgcagatcctcattggtcacctgtcccagaatatcgggatccttatcatatgtatccttcaaaatggaaccaaagcccatggtggttttcttcatcaggcgttccttaatgatctcctccagatcagggaatgcgccgccgcagatgaacaggatattatccgtattcaccgtagccatgggcgtcatggcgttcttctggttggaacctaccggcacctccacagtgcttccctccagcagcttgagaagctcctgctgtacggattcgccgctgacatctctggtattagtctgtttcttcttggcaatcttgtcaatctcatcaatgaatatgattcccttctgagcccgctccacatcgttatccgcagcagcaagaagcttggataccacgctctctatgtcgtcgccgatataccccgcctctgtcagagaggtggcgtcggcaatggccagcggcacgtccagaagtctggccagggtcttaaccagataggtcttgccgcttcccgtagggccaatcatcagtatgttggacttttcaatgacaatgctcttatctgttccggcatcctccacggccacgtctttagagggatggtccagaaatgcccttttataatggttatatacagccactgccatcaccttcttggctttttcctgaccgataacatattcatccagcttcgccttgatgacatggggcgccggtatgtccttcatggtcaggaccggctgttccttggcttttttcttgattttctgctttttgggaatttccactgcgggaggtgtcatattcagatcattgaggttcatgttcatgtagggcatattggggagttttgaaaaatccatgcctccctttgtcacggaatcaaatgccttctgcatacagtcatggcagagattcatgccgccgggcatggatatcatggggccggccttactctcgggccgccggcacatgtaacacaccttttcgtagcggtcctcttccttttgtttgtctttatcttcaccatggccggatgcctccacatcctggttatactctttctcgtccaagtaaattctcctctctgttaaagggcgtaccgggccgaatcatcgtcccgccgcttaacgtaaagtatataacaaaatgcttccccaaacaagaggaagcattttcatttcatattattttgtaaaatttaagttattgggcctgtgtttccgtattctcctggggcatggctttcagtgcaatggtaactgtcctttcctggtattccccgtccttctgggtctgtaccgtcagatcgatctgctcccccatctcgtagcaggccagaagctcctgtaaatccgtcatgtttcggacactctggccgtccaccttggtgatgatgtccttttccctcaggtctgactgggccgcggctccttcctccagtatcttgtatacatatacgcctcttggcattccgaaggccgccgcggactcttcatctacgctggttccctgtatgcccagataacctctcctggcctcctccaccggattcatggtcttgcggttcatgagctggttcatgatgtcctctgccttggatatgggaatagcatagccgattccctccacttcggtggaggaatacttggcggcattgataccgataacctcccccttcatattgagaagggcgcctccgctgttgcccggattgatggccgcatctgtctgcagaagctccctggtgctggtgtttgataccctgacctcccggttaagtgcgcttacataccccacggtcacggactggccataacccagcgcattgccgatggcaatgacgccctgtcccaccttcagttcatcggagttgcccagcctggccaccttaatcttactcttagtgtcatccttgatctgctccagaggcactgctataactgccaggtccgtctctgcgtccgttcccttaatggccgcgtctaccacctcactgtcaataaaggccaccttcagggaggtggaatcctccaccacatggttgttggtcacgatgagaagttccttatcgttctcgcctataatgattcccgaaccgctgctgggcacctcataggtctgggggccgcccctgaagaaccagccgtatccgtaattattgctctggtataccgccgtactggtgattgccaccaccgtgggcatggcctgttccacgatgtcggacacatccgccactgcttttccattattcctctggccctgctggtatccgccgtctccctgggaggcgctgccctgaccgttatcctggccgctgtcccggctttctgtccgggcctttggtatctcttccttcttttccggttcagccgacgctgcagcgctgttccccatgaatctggacgcggccacattgactcccaccatggtcgcccctgagacagtaccaaaaagaagggctcctgccgtgagcagggccgccttttttaaaatgccgccctttttcttctttggaggcatatcctccggctggggacggcgcccatatgggtccccgccatactgcctgttgtcatagctctggttatcataagacttccacccgtagttctggtcgttgtcgtacattgtaattcccctttctcacgtaatctcccgattctgtacatagtttaacagcgatttgtgataaatgtgtgaccattttattatataaggctaaaacgtgccggcaggaaatgataaatccccgccggcacgtttacagccttatattcccaatttttatatgagtaatccttacattaatttcccggcccaatgataacggaacccggtccctccggcacgtattcatcggacgaggcgcccggataagctgccgtactccccttggtgctgcccggataggccgcggatgtaccctggcttccgggatacgcagccgtggttcccctggtggctccgggataagcggcactggttcccctggcgggatcctggcccggataggtgattgcgcccggcccggttgtccggtcgccctctgatgtctcggctcccgggaacatgctgcctgagctgctctcccccggccttccgggatggacagtaccggagccgctgctttctcccggcagtccgaatataccgttatcatcctcaggcgggtccacttcattgccaaactcgtcggtctcaatctccaaatccgtttcgccgtcaatgatagactcatctgtctcggacgtgctgctctcagactcattttcttttgtctcttccgtggccttggtcgcctgcgtgggcttggggatataaccgccgtctgttcccacatggtcgattggcttgccctcattgtacatgcccgtatccgctgatatcttggcgctgattttctttaccatgtcactgggctggtaattttcatccccaaacaggaactgatgaagaagggttacattgctctccagtgtctgcggaataacacaggctcccttcttgcccatattggcgtcacttctggctgccgggaatcccatggtatccgctatggtatacttggtcagatttttggctgccggtataatgtcatcaatggtgacactggaaagaatctggggaaacactgcctccatgacattgttcaccaccgcaaaatcagatttcttaagcttctggaaacagaggtcaatgatctcccgctggcgctctgtcctggcaaagtccgtatccatcttacgaagccttgcgtacgcaaccgcctggacaccgtccagatggttaagacccgcctgtttcagctgataggaacctacccctgtggcctccacagtctcggtaatataggcattgatatagtaaaactccgccttgctcagctccacatccactccgcccagaatattgacggcatccaccactgccttccagttaaatgtggcaaaatcatctatctgaaggtccagatttctgttcagggcctccactgcctgtttaggacctcccaggaaataagcctggttaatcttattgtacagcccgttatcacttacactgagataagtatccctgaacacgctgacaagcttaatctcgccgctgccctggtcaatgttgcatatgatgataacatcggcattattgccttttccaaccgaattgtttcggctgtccacgccaaaaagggcaatggtccagtatccctccatctcctccacctttccttgggggatattagggttggtcacctgggccggtttaaactggcttggctgaatcaggctaatcttgttctgcgcatacctgtagagccctgttcccagaaggaatatgatttccagtatgataaatacaattatcatcttacggcggcgcttaaccgctgccgcggccgggtccgctgccgccgcttccctggccgccctgcggccgcctgctccgcccccgtttcttccaaaggacgaatccctgcccttaccggcgccagggtcttccgcccctgcataggaccggctgtatgtgcgtccgccagtgccgccagcgcccaaatttccggctgccggcctggctcctttaccttcgcctgtgtacctgggccgttctcccggcctgcttcctgaaattcccggccttccgtcaggccggtcccctgtgaatctgggacggtccacggacttgccggccgcgtataccggcctttctccggacgcgctgcccgtgcctgtatatcccgaacgcgcgccgttatttccgcctgcgcccgcatatccagggcgttccggcattttctcaccggcataggcactgcgggttccgatctttcctgacatgcctggggcgcgctccgcggctccctctccggcatagcggggacgctggccggaaccggcaccggatctgggcccggcactggacctggagccggctgccgggccttggcctaggctatccgacgccgccctgcctggcgccctgtcagcaaaaaccggtgttcttggcctggccccgccgcctgaacctgcgcggacctcctggccggctccatttatcccccgcctgctgcttccggcgcgcgcccccggcattgtatctgaatcagccccggcacccgcgcccagatcgcgctttctgctgcggcctcttaatctctcttcttcctcatcaaatccattgtcaaactcacgattcattcgtccatcctcattccatcacgtaaatcaggcgctaaacacatataagcagccccgctcctctgacccgcagactgtatccgggcacggctaaagcacaggagcattcttaacgcaaacgtcatgcatatcaatatgcatttttattaataaatcccttgaaaacagtgagaagcatgatcttaaagtcaaaacccaggctccagttctcaatgtaatacaggtcatgttcaatcctcttggttatcgatgtatccccgcggtagccgttgacctgggcccagcccgtaagccccgggcgcacctgatgcttaatcatataccgcggtatctcttccttgaatttttccacaaacagcggccgttccggcctgggccccaccagactcatgtcgcctatgagaacattaaaaaactggggcatctcgtcaatgcttgtcttgcgtatgaaacgtcccacaggcgttaccctggggtcatggggcgttgtccactggctgcgttccctgcctgggtcctggacctccatggagcggaacttgtacatcttaaagggacggttgtgcagccctatcctctcctggctgaaaagcacgggcccgggtgaagtgattttgattagcagagccgtgaccagcatgagaggcgaaaatacaatcagaccaaacagagcgccggcaaggtccactatccgcttcatggtggcattaaacaccccggtaaggggcacatgacggatatggattaccggaagtccctgaaggtcttccatatagggaatcgtcggtattatattattataatccggtatgaactttgtatgcacgcctgatttctcacaggcggccacaatctgttccagattagagtactctttaatgctcagggttatggctatttcgtccagcgtattggatgccaggaagtcctccagatgattggtgggtcccagtacctgtacctttttatatgcaaagccggcgggccggtgatcgtccaggattccctggacatggtatccccattccggattgacgctgaccctgtcgatgaacccttcggccgcccggctgtagccaatgaggagcacatgcttctgattatagccgttggtccgcagggagcgcaggaagatgcgtattgaaatccgctctgcttccagcaggatgatattggccgcaaagaatgccagaatcatctttgtggagaaatagctcaaatggcttacgaaccttcgcaggccaaaaagcacgaacgtaaagaccataaggccgatgacattggccttgcagatattcgccagctccgaacgccgcccctgaatccgtttgggcacatacagatggaaactggcatatagaatcaggtatatgggcacgataaaaatgagcgccataaaatatacctggggctttagcacgccttcgtctaagggcagcacctttccgctgatgacaatgaaccatgccagagcgtaggccaccacagtgaccagtatatccagcaggacatgcatgcggttcagccttttctggttatcttttatcattgtatttcaccttggtttctcagggaatcccttcttaccgtaaatatcgttgttattatacatgataagccgtcattattctataacatttctcttaatttcgaaaaagttcataatttagcaatccgccttgcggcaaactcataaacatagataaaggtccctgtaatcaattcccactcaatggccagataatttttaagccgttccctgctgtaaggcaccttccggcaccttttagcggttgccaggccttccctcacaccagccgcataatcccttccaaatccctttttcttaaaaaacatatacttaagtcccattcccaggagaatgggaagcaggttcaccgccagctgcaaaaggggcatgttcttataattcagataaatattatttctggcagccagctttaccttgaagggattgtacttggaaccgctggtgccgcttcccacatgatagacaatggccgtgggacagtaaatgttgtcatatcccgctattctggccctgtaacccacgtccaggtcctccaggtacgcaaaatgcatctcgtcaaagtatccgatctcttcaaacacctcacggcggtaaatggctgccccggcgcaggctgagaagatgcggcatgccctgttatattttgcacaggggcggcccacgcccctctggtatgcccaccccaaaaggctgtacatatccccggcatcgtccatcagctcctttcggcagagctgtatcatcttgcagctgacggaaaatatcttttgggagcgctcaatggccttgatcatttctcccacatagtgaaagtccggctccgtgtcattgttgagcagaatcacataaggagttgacgccgccttaatgcccacgttcaccgcgcccgaaaaccctgtgttctcaggcaggaaaatggccggaatcccctgctccttcagccactccacacttccgtccgtggaaccgttgtccaccaccaggatgtcaaaatcccggcaaatctgcatattaagggctttaaaacagggctccataaatttaagaccgttatagttcggtatgacgatggtcactttgctgtgcctgcctgccctgcgtcctgtttcattaccgcgtcctgtttcattaccgcgtcccgcttcataatcatttctatggtcactcatgtgctttcgtatcgtcctccggcgcaaactgttggtaaaccttaaggtcataaggctcacctattttttccttcagaaggtccctgagcgcaaaatttgatttgcgcagcgtcaggttggggttgtagcaggggtcgccattttgaatgatatccggccacttccgtatgaagatggccacctcccggttaaaacgggctatcttttcaggcgtatcctccagtcctctggacttggattcgtaatggtaaaagcatgaataaggcgcatacactaccagtttccccagggcgcgtactttcatgcagtaatcaatatcattaaaggccactgccagctccgggctcaaaccgcccacctggtcaaagacggatttctttgtcatgaggcaggctgctgtgacggcgctgtagtcctgggcgcacatggccctgtggaaatagctgttctccgccttgtgaaggccgataaatgtatggccggcaatgccgccaaagcctatgaccactccggcatgctgtatggtgtcatccccatagagaagcctggctcccgcaatgcccacatcctccctctggcagaatcccagcatttcttttatactgtcctcgtcaatcagctccgtatcattgttgagcagcagcaggtattcaccctttgcaaaggaagctccataattattgatggcagaatagttgaagccctgcttccaggtaaccacccggaaattgctgtgttccgcctgcatcttatcgtagtaggcaaaggtatccttctgggaactgttattttccacgacaatgaattccaggttccggtacgacgatttctccatcagggagcgcacgcacacatccagatcctggctgtggtccttattggggatgatgacagacaccagaggttctccctgtatctcaaacgtggtatggtaaatgccgtaatccacgcccttctccaccttcaccgccggaattcccatccgctcatagtgggccatgatagctctggagccggcctcaaaggcatacatcttgctctccgggttgctggccgtggaattctgatggcagcgccagtgatagaggaccttgggaatatggtatactctctttgccgcctccgtacaccggaaaatgaaatcataatcctgggcgccgtcaaactcctggcggaatccgcccacctgctttaacaaatcctgccttatgacgaacagatggcatatataattgacgctgttcagcaaatccgggttgaaatcaggtttgaaatgagggtcgaagagagcctttccatccatgtccagtttatcttcatcggaataaatgacctggcagtccggattttcattgattgccttcaccacctcataaaaagcattgggaggaagtgtatcgtcatggtcagccaggatgacaaagtctcccctggccatatccagggctgcattggtattgcctgagattccgcggttgctgcccagaatctcatagcgcacacgccggtcacggtccgcgtacttcttaagcacacgctccagtccctctcccctggggctaccgtccgcaacgcatatctcccagtttgtataggtctgttccatgatagagtccagcatttccctgagatagcgctccggggtcttataggcgggaatcacaacggacagcatgggctcaaagtcaaataaatgctttctctgctccgccagctcctcttccgttggtttggtcagctcataccactcgctgtaatcataatcattgtcaattccctgcagcttgtgctttgacttgaccacaagggccttaaggccatgttccttccaaaagtccatggccacatggactgtctccatgttcatcaggtccttaagcttctccatacgcttgtgggccacgctggcccgctttgcaatcagctcctcattatacttgatttttgcctggcgtccctcgcagcggatcagaaggtaataatccttcccccgctcatagggaaactggatctcaaatccaaattcccggtcaaggaccttcttaaaatatatctggctcacatcatccctgcgtgtatttacatgcttgaattttaccggctggcgcttctcatcctccacccggaaggtggccctgctgtcaggggatttacctatagcccatccgttaagggtaatggaattctcccggatgcgtaccacgtctatcttatatttcatgcttcattaccgccctttttctcttcctcgttaaaattaatacgctcttcctcaatgaccaggggccgcttcatcacccgctggttaatgctcatgatatactctcccagaaaaccgatgaagaacagctgtaccgaccccaaaaacagcattccgataagcatgggcgccatgcctgccgggaaacggtcccaccaaatcagcttcattaccaggtagaccagggcgatgagcatgctgacaacggcgcatatgctgccgaaaatcgtagccagacgcagacctgcctttgtataggaagtaacgctgagcatggcggcatcgtacagacgatagaggttattatgggtcttgcccgccctgcggcgcggctgctcatagggaatctccttgcggcggtatcccagctcagccacgattcccctgaggaaaggcgtggggtcatccagtttgcgtaagacctcaatgaactccctgtcatagagaccggaaccggtaaaatgctcaatctgctccacgtccgacaatttcttgatggtcttgtaatagcagcttctgagccagtacatcagccggttttccttgctgcttgtcttgatgccgatgacgattttatatcccttctcccactcgcggatatatttgggaatcatttccaccgggtcctggaaatccgccaccatctcgatgacgcaatctcccgtgacctggagcattccgtaatagggggaattgaactgaccgaaattccgggcattgagtatggccttgatgcgcgggttgtccgcacacaggccccggataatgtccctggtgccatccgtggaatcattatcaatgaataccagctcatagtcataccgtggcagctctttttccaggatttccgtcaccgccctgctgatagggcctacattttccgcttcattataacagggaatcaatacgctgattttcttcatatctctctatgcttcttctttctctatggtttcttcaatgccctggcggaaggtataccgttcctcccacctgccgcctgtgagtctcttaagtctgttgatgtcaggccggatggacagggcgccctccttagcctgcacaaaggtcccgtactccagcgttcccttaaatcccacaatttcatggatttcctccacaaaggatcgaaggggcctggtgtcctgactggctatgttgacaatagcgcttacgggaccgccggaaccgtcctttttccaatcctgcccttccattacagcctgcctgtataattcatatactgcctgtaccgcatcctcaatatacataaaattccacatatgcctgcacgcgctcagggagaccttcttatcctgccttaaatcccgcaccagggtggatatgatggaccatggatgatccccccagccgtacacgctgaaaaatctcaggtggtaatagtgaaggcccagacggccgcaaaggggcgctgccttttggtaaaactcccattttgcctttccgtattcattgatgggacggcagggcgcatcctcctccatgattccgtccacggccccgtattccactctggaccccgcgtccatgaacacccggcagcccaggcgtcccgccgcctccacacagtccagggagccggccacattgcgggcctggacttcgggcgagtctatctcctcccggttcacgcctccccaggccatatggaaaaagccgtccgcctgttccacctgtgggacgcattccagcacatgggccaggtcgcaggccactgtatgcagcccctcatgaaccggaagggcatccagatggagggagcccggacgcaccagggcgtacacatgggccccctgctccagaaacaccctggccagactgcttcctataaaaccggttgctccggtaattactatgcgcatattctcatccctcctaaaccatctccagatggttggaacgcatggccctgatttccacggatgtgccgaacttctgtcgtatgctggccgctatctcatccgtataaccgggcgccgtgattatgatggcatccaccggatgttcatgaaaatggtccggaccaacgatgggcagatgggaggcgggggcaaatttaccctgcttaaagggagcggaatctatgatataccttgccctttcccccagcttggtagtggctgcaagggtaaagccctggtggctggctccccagacagccaccttcttatcccaggcatccagatacttcatataggactccatctcccgcttcagattaacataacactccagcaggttctccgtatccatctgcggacgctttttcacaataacggaaagggtgtcccggttaatgacctcgcactcctccaccaggaaaccgttgcgctctaaaaggggggtaagggtctcaaaggtatagtaggccagatggtcccgtatcagctcataatagctgttgtggtccatgatatattcaaagcttgggactgtaatgagtcccatggcatcgtcctccaggttgcggtatatggcctggagcatggtgccggggtccggctggtgttccaggaaattaaaggacaggaatacgtcatacagtccacccgcaaaccgcgtatcctctgtctccgtaaacccttccgtcacatccagtccctgggcccttgccagctccaccagatggggatcatgctctatgccgtggacctccaccggaaattctgacaggacctttaagaattctccctggccgcatcccacttcgatgaacttctttccctccagatgatagctgtcaatgagatgcttatactggtatctgcgcagctccaccatggttttggaaaaacctccggcccgaatcacatcccggtagtagtccaccggctcacagtcaaactggaccagtccgcagcccatgcactggcataaatccagggtcagtccccggtcctcctttaccccctgggcatccggcaggtgctgggccgaggcaggcatattatctaacgtaagcagcggcgtctcccatagcggggcgccgcaggcgatgcatcgtttcatagacaattctccttatatattccaatcatttccctgattccatcctcaaacgaaatctcctgggcgaatccggcagcttccttaagcttcctgatatccggcaccagggataccactccctccgcattgggcggccgttttccatattcgcaggtgcccttttccccgcagagccggtgcatctgttcaacgaacgacttaagggtgcgggtgtcttctcctgccacattatacacgccggccggtactttggcaagcagaagccctgtcagggccctggccgcatccctcacatgaaggaagttccactgctgggtacaggccccaagctccatcctgcctcccttaagaaaggtatccaggcaggtggacaccagggaccaggggtggtctccgggaccgtaaacgctgaaaatcctggcatggatataatcaatgcccagggcctttgcatcttcccctgccctgcggcatacctccagcttgtcctttccgtattcagagacaggatgacacaaaatctcctcccccataatgccgtccacgatgccgtactcggcctgggacccgcaaaaaagaaacctggcgcatcccagacgggccgccgtgtggagggaatccagggcatacccgatgttccgggcctggacatgagggtcctggcggttggcgctcccggccccctcccagcccaggtgaagccacagttctgccatccctttgggggcagaatgggattttaaagcggaagaagggaccaatgcaggacatgattcaagcttcctgatatccttcagggcaaagggcagaaaggtgaggcattccccttttctgcctgattttccctccgcttccggcgcaagcatctcaagctggggcagccccggagagtccggccttaccacggcaaatacatgatggccgcctgccagcagttcttttgtaacagcccttccgataaaactggtagctcctgttacgattacacgcataaaatatactccttcttatcccggatatcctgtgacaggtccgtccgctgattgacagacaggatctatccctttatcctgggaataatcatattctcatccatctcctcatccggcaggaagggagacaggtcctccaggggcggcgacaccatggtgccgtcgggcagtctctttgcagaagacttgggttcaaaattctggtccatggacacgaatacctcacagataaccggcccctccgctgccagggttttctccaccgcctccccgagttcgctgttatgtctggccgacacataggggtagccgtaggccgccgccagcttatccagcgccgggaagctcaaatccccgctgtccacgccaattccaatcaggggctctccaaagaaattcttctgggtttggcggatggagtggtatcccccgttgttaatcacgaatatcttgattcccattctgtggtggataatagtctgcagctcctgaaggttcatctgcatgcttccgtccccggtcaccagaatcaggtcatccccgcttctgtccccgccctggctgtagcagcccttatccctggaagcggtccaggcgccgattgctgccggcagatcatatcccatggaggcaatggcggaattggtgataaaacgctggcccttcttaataatataggcatgtcctcctaccacacaggcggaaccattgcccaccaccgtcacctgcccctctctcaggcggctgctgacagcatggataaacgcgtacacattagccggttcctcatccgtatgggcaaagtgcttgggcagtataacaggatatttctctttccacatggcgcaggtccggctccatgtcatatccctgaggccctttcctccgtcaaatacctgtctgccgccgggacggctgacgctctcgggaaggctcccctcttcctctgccaaaatacggtccagaacccggttcagctgttccagaagatcctttgcatcggcatggacccgcatgtcgctgcggactgacggcttcttcagctcctcctcatctatatcattgacaatcacataagcctctctggcccatgtctcaaagttataccccacctgccggatgctcagacggcttcccacggagagcaccaggtcgctgttctgaacggcaaaattccccggcctgtcccccatattgcctgcgcggcccacgtacagagggtgggtatcatacatgatatcctcgctgtcccagcccgtaatcacaggaacgcccagcttttcagccacatccatgaatacatcatgggctcccgctatgcggatgccgttacccgcattgatgacaggacgctttgccgcccttatcttatctataatggtacaggcagtggaagcgtcaaccttttccggcagcacctggcggtgttctccctttcctgcctcgtcctccggtatcctatgtcccccgtcctttccggcccagccgtttcctccggcctcatagtcagccgcgtcaaagccggaaagctcctctgtctccacaaatgcgccctggacattcaggggaatatccagccagcagggacccggacgcccggaccgtgccagataaagggccttctccagacagtatcggacccgcatgggatcaatgaccatctctgaatactttgtcatacagtcaacggctttacatatgtcaaactcctggtcccccatggcgcggatgcccaccccggaccacctggccgtggtatcatagcgcacctgccctgacaataccagcatgggaatggaatccagccatccccccaccacgccggtaatggcattggttcctcccggaccggtggtgacgcagagcgccgcaatgcggttgtgaatcctggcataagcctcagcagccatggcgcacgcctgctcatggtggttatagatacagtgaagcccctcctgatgtcccaggccgtcatccagatgcatggctcctccccctgtcaccatgaaggcctggctgattccctcctccaccagcttgcctgctatataattggaaatcttcattttcataaattaaggtcccccttccggtctatcaactatggagagtatagcataaaacgccttaaaataatactatattttctcttacaatggattctgaaatggctgtaggggcccccctccagtgccttccataacttccagcaaccatcactatcaatacacattcatgtccgttataataaaccacgtaatgcaacaccggattttcggccacagacaaacacacatatcaaaaaggagagattcattattatgaaaaaacagatcaaagttctggctgtattatccactgccatgttcatggcagcagtaacccctaacttcatcggcaccgcttccactgcttacgcaaaaaacgtgggctggacagaggaaaacggcaactggtattactatgattcttacggcgaggcaatcaccgatacctggaagaagaatggcgatgactggtactacctggattcagacggaatccgcgccgcagacagacagattgatgagtattacgtaggagaagacggaaaacgcgtcagcatgaagtgggtttccgtggaaaatgaagatttctgggatgaggacgatgctcctgaattcctgtactactattatggaagggacggcaaggccctgacctccagatgggcttccatagacggaagctggtactatttcaacgaggacggcatcatgcagaccggctccatcaccgtagatggttacaactactatcttggcgaggacggcagcaggaagaccggctggattcttatggcagatgaaaccgatgatccggaatacgttgaatcatggtactacttcgacaatacgggcaagcgtattgaaaatgaagttgacaaaaagattgacggccagtactacacctttgtggacggccgcatgcagacaggctggtacaagcttcctgtccaggcagcagcagagtccggcgaggcccagacagcaaccccttccgaggcagcgccagcggctgagcagaccgcagccggctatcagtactacgatgaggacggaaagcgcgcttccggatggagaaccatcgaaggcgtggaaggcctcagcgaggaagctgaactttaccgtttctacttcaagaacggcaaaccgtaccatgcagaaaaaggccttgaactgttcaccattgactccggaaaatatgcttttaacacaaagggtgaaatgcagaccggcaagaaggtggtaaacctggaggacggaaacgtggctaacttctactttgatgaagagggcgtcatgaagaccggcaagcaggtcatcttcgatgaggacttaggcgagacacagaactggtatttccacacagacggctccagaaagggccagggcttccacggcatcaaggacaatgtgctgtatgtatacggcctgcgtcaggaagccgacaaggacctgcgctttgcgcctgtagagttaaatggcaatcagtatcttgtaaacagcaacggcgccgtacagaaggccacatcttcctccaaatcaaacgctatgcctgagcttggcagcggctacaaggatttcatggatgagaatgacaaagtatggaccgtaaacacagaaggtgtcatccagtctcagaacaccgcccagtaacacgcacacagcaaccataagaccgccccttcatccgttcgtttcaccggcggtccacggcagactaaccaattagtctgccgtttttttgtccaatctgacgaatttacaaaaatcgcggaaaaaagtgttatattttgcgatttgaaacgctatatatattaataagtattgatcaggagaggatattatgagagaacttgctgttttttattgccccaaatgcggacactatgcctactatcagacatcccgtcatcctcagtgcccaaaatgcggcgctcaggaagccatgtacatggtcaggatgcattacacggaattcatgcggatgtcctgtgatgagcgtgacgaatttctctccagggaaatcctgaagaccaatccgtccctaatcacccggctgaccgaaccccacaagcgctacaacagccgggaaatcattgctgaaatgaacaacgtaatcatgaacctggatatagagaacaagattctcagcgatacggtgaaatggatgcacgataccatatgggaactgatgcatgaaaaacgggaatccggccaggacaaaatctccgcctgcgggggctgccgggaccggcagccatcggagaaatccatggagggaacagtggaaacggaacaaaccgaggcagcttgcagtgaggccgctgccgccgatatgtcgcagaccaccgtgccggaaaagggacaggaagaatagctggctgcaaatccgaaaaagccaaatctgaaaaacatataaatttccaattttatatatcttttgtgcaaatagtgcgttataatagtatatataagagatgttttgtgcacatttatacttttaaggttggaaaggagtggaactatgagccataagattatcactatagcccgccagttcggcagcggaggccatgaagccgcccaaaggctgtcagagcagctggggattcctctctatgaccggaatctggtggagatggccgccgaacggatgggacattctcctgtaagcgttgaaaaggcagacgagtccgcactgtcctccttcctggccgtctatcagattcccaaggagcctaattccgtgaccgggtatggattgtctctgaatgacagcacttatgtcacccagaccattattatagaagccctggcccaaaagggtccctgcatcatcgtgggccgctgcggcgattacgtgcatcgcagctatcctgacctgatagacgtatttatctatgccgatatggaagaccgggtgcgccggattatggatcgctacagtttttcagagagggatgctgtcaacgccatcaagtccacggaccgccggcgcaaaaactattatgaaaactacaccaaacgcaaatggggcagcattgagtcccaccagatgctcttaaacatcagcaagcttggaatggacaagaccgtaagaatcatcaggggaatctacgaaactccctaagcctgttcccaacggtccataaaaggcaggcgtctgaaggtgttttatttccttcgggcgcctgccttgtatttgtacgtctgtttctctttttttattccccggacttatctcccggtcccatccctgtctttgaaatatacccctcatagcgcctcagcgcattctccttaaagggcgcgctgaccgtaaattccgaaccgtcaaacagagtcaccatgcgtacgctgaaggttgccacatatctgagatttacggcataggacttatgcagccgtatgaaaccagcctgctccatattgattttggaaaacaaattttctaaggtggaatagcaatgatatgtatggccggcagtcacaatctttacccgccggttatcaccttcaaaatagaggatgtcttttaaaggtattctgtaaacggtccggcttgatttgaattcaaagattccggcatcaccctctatcttttcgcaagctttataaaatacattctggaagtcctcgggcctgattggcttctttaaaaaatgaaagggctggaactggaataaatccagcgcatattcatccccgtaagccgacatatagacaatcatgctcgcatcattgcccagctcctcccgtatgaacctgcccagttcaattccgctcctgtccctcatcacaatgtccagaaaaatcaaatcataatgccgttccttaagtgcttcctcaaactccttaccggtgttgaatatctccacctccagcctgcgtccctctttccatcgtctgatatagtcctccagctggctgcacacctgaaagtcatcatcacatattgctatctgtatcatgcacctgtccccgtactgcaattttaatctctagtattttacacccccctggtattatttctgttaaaatgttgaaaaaaggcgattactcgttgaaatttgtcaaaaatcatcctcccagggtaatatcctgggccgcataccacttaagggcatcttccacatgttccctcctaaagtccggccagtagtcatccaccacatagaaatcagagtaaacggactgcacaggcagaaaaccagaaagacgccgccttcctccccaccgtataatcaggtcgattctggaaacctcagacgtcttaagccccggccctatggctccatccttatatcccaaatcccactcccagctgtaattcaccagaaagttaatcttcattccgccttttccaaaatcatgtctggcggtaaagggaagaagctcttggggaaacatgggggattttgtatttcccagcacaagcaggctggcgtcttcctttgccagctcctctaccgctgccacgcaggccctggtaaatgcctgtctctggaccgagggccgctttgtgttatctgccgtaaaaccataaaaggacatttcgccaatgcccagttcccggcacatacggtacagggacattccgggtgagattccgtgtacatacccctctgatttatccattccctggcctttggcccatctccggtttccatccgggatgattccgatgtgttttggcagtctcataccatctcctccgttcctgcttctatatggaaagtatggtcttaaatggaaaatctataccaaaggcagcggcagtgtgtcagtcctccatgattttcttcggcttatccgtaatcagattatccgccctggctttcctgtcagctgcatcaattccgcatcgtgaaacccaaggcgcatctggccgtcgtcagcagggcggacggctgacttcatctcccgctccgtaatccgttcctcccctgtcagccggccgcacagaagcggcgattccgggtcatgcatcctgcggttggcttccacctgagccggactgaaattcgcataacaatacctgcagaaatgggaacaggtgttgtaagcgccgatatccacgctcttgacacaaccgcattcctccctctgggcagggtccttccttaccgccaaaagccggcccagcaatccggcaatcagctggtcatctatgcattttcccttctgaatatggaatccggacaaatcccctgcctctgaacatgtccttatggtcatgccatgcctttctgcctccggacccatgaaggatgccagggatactatatcctcccctgtcattgtactgggctgaatctgttccatccggccttttattttccggtacatatccaggaaactgataacacaggtatgggtgtacccttccaggctgccgcacagccgggaaaaccattggaaatggtattccctggtataggacggactgagaagcaccggatcatacctccatatgacccgctcaggccccagcctgcaggacagctcaccaaaggtcctcaccagctcattcttatggggaagtcccggttccacatccgtcccatagggtgtcaaggtgaattggaaataataaggataccccagccggtccagaacagaaagcctctccatcatagggcccgggtcctttgtccagaacacaaagcagtccactgtatccggactcagaagaatcttgctgacctgcctgggattcatgggattctttacatacaggtacccttcctccagccgtctgaaaaaccagtctgaataaaacgcggggatatctgtccttctgctggcactgacgatcatggcggggcctcccttctttggcttacgtggcaatctgtgtagtctaatagtaagtgcctggtatgacagtgaactaaagtcctatgatccaaaagccactgttttgttgaccgtattgccttataggcattcgcagtcattcccaccaaatctttacaaattgattttttcttcgatttcatttgcaggcatgacaaagacctcctttccattgctacagtccgaatcgttgcattcctaacataaattcatccaacccccgcaatctttttactctgcggagcttgattttacacacatcacatatctgctctaatcccgcttccacaattatattcgatactcttatctcctttggtgatccaaattggaatataaaacctatcaggatttctgctaacattacaatcggatcatcatccggttctaacatttcaaatttgatgattgttcctgtatttgcatctcccaacaatgacaatgccggattcccgggacgttcatatttcttatccgcaacagatacacccagtactgatacatccgcctctaaaacggcatcacatttaggagctttcgcaaggtctgaaagcaattcctcatctgtgataagcaaattgccaaattgaaatgatgtaaatggtaaaggtgcctcaccaaaattccatgtctttttgtcttttccaaatgaaaatagaaacatattcccatgttcaaaatcaactttaatatcggtctcgttataataacgcaatgccaattctaaatcctgaagataagtgctcatccgaagcacctcagattcatccatattatatggataatatccaggctcaaaagacagaaagtaaagccactgatttttaccgcggtatgagtaacctaagtctttgataagctttctctgcttaccggttagttcctcgcgatttccccaatagcatgtaagatttttctgattaaacatggcatattccggtttcagattcatactctgctgcattggaagcatcagaaaactgttaagaccttcatagccctcataaacagctataccataacagtctccgccccgaccaagtatactataaaatacagtgtcctccttagcgccacttctgacagcaatcaaatccatatcccaaagcttttcccatggtttcaattcttttatacgggttgctacttcatacaactgtttccattgttctaacaacgcttcttttctcatgtgtctatctccttctgaatccgtactcctgtttcagtctttcaaatatctcaaaagctaccgggcatatggcgacagtgtccaacatgccaagcaagctacataaccgttccggctggtctgtatatggatacttcttgcagctatccggtttgcaatcccctaatttacagttgccatcttcctgtaaaaaatcacagggcatatgctttgtatgatatccaataccgcacgcttctttttccaaaaagaaatctatgaattgctcaactgtaatacccaaatattccgcatctttttcaacatcctcttccggaatactacccttatacattttacaacaattcctacacttattgcaatcataatcagcaaacaattctttatgcaatctcagaaattgtttatccagttcctcttcatccgcatgtcccttcaagaaactacggaatttgtaattctcatcttctcttttcttggcttccattcctatcttgtctggatgtatcataagacgcctcctatccttgcttttatcgtcggtttttccttattgaactggttgtaatattcagccccagatcctcatcctaccggaaagcttgatattggcgccttccagcatcttctggagactgttcagctccctggtacgttccccaacagggcttttgcggtaacgtacaagttcacgtagttcgcgctgatctttatcagggatatagcttggctggagcaatccgtgctgcagaagatcagcaatccattccgcatcctttacatcagttttccgacccggaacagctttcatatggctggcatttaccaccattgcattcaggtcagacgcttcctgccctttctgtaattgaagagctttctgaaattcaatgctgctatttttgcatcaaagaagaactttccacgctatttgccacggggcagcttctccagatggtagtttttgcggacattcgacggaaccgtttctactccgttcctgaatcgggcatagtttttaaatgtttcataaaagaacagctcctgggtttaggccctgcaggacatcgaagccgctgtatgcaccatctgccaccataacagtcttttcttcctgcacatccatccgctcaagatgttcacggataaacaggctgtcgctgtggatgttctgttcataaacctttgcccaggatttttccaatgctttttgttccctggatgttaaaacggaaaaactgtctgtaagagacagctgttggtaagtgttttccttgaatgacatagagaataccttctttcgtaagctatctctattatacagcaaatgcgtgtattatgcttgtgcatactacaaaatatatgaacttttcaaggtgctatagttgggcttttgaccccaacatcataataggtctccttatgataatagattttaccatagaagacctattgcctgatagctatttacagaaaaactttcatactctcggattcaactattcttacccgtattattttatctccttgctctgctccttggcccagtggtccaccacaataccgggagcatacacaaacatcatgtgcagttcctcttcccctgtgttatacagagaatgttttagattacttggaataaaaatacagtcgccttcctttaccggctgcttctcgccgtctacctccatctccccatgccctttaagaatcgtgtaggactccacagtctcatggtcgtgctccggtattccgccgcctctatgcaccaccacatagccctggcagaatttgctgccctccatggcgccattctggcccaggattaccctggtgcgtctgccggccggaaattcggttccctctatgtcccatatatttactttttccattttattcctccagattgtctggagcgtgactgaaaaccgctttcagacacactctaagaaatcagattcttcacagactcccgttcaatgagcctgcctttaaaataagtctggctcttatgcgcacaggtctgcgtcttaatctgctccatcagctgttcaaatatgattcctgccgtatctgccagggaatgacgcagcgtcgtcagagggggatccagatatttcacctgaggaatatcatcaaacccaaccacggatatatcatccggtatccttaacccgcttttggtaattcccctgtacaagccgtaagccataaaatcattgaacatgaatacgcctgtgggccgttccctatggcgcattaattcaagggttttatagtaggcgtcgtcctcggattccacatcgcggacaatatacttttcgtagtcttctatcccgcactccccaagggctttgagggcccctgacagacgttcccggttatattgacgttccttatcattaatataaagggcaatctttctgtgtccattgtctgtcaggcacttcaccgcctggtaggctgcatcagcattgtcaatattaatacagggggcatccacatcaaaggtacggtttacaatcaccatgggaatctcccctatgtatggtttcacatgttctacatcctctgtggatgcaatatacagtatgccgtctacaaacagatatttaagggttttaaaatattccttctcctttttcacatctcccagtgcatcacacagaatcagggaatatcctgcctttgtagcgcatgcctccatatattttactacctccggataatatggattcatgatatccggtatgatgaggccaatcagcctgctgcctccttttttcaggctcctggccgccagattgggcttataattcaaatcactgacagctttcatcactttctcttttgtctctggctctacaaatgccacccctgacagtgctctggatactgtgctgggagaaacccctgcatattttgcaacatcacgaattcctaccattggtattctcctttaaccgtcttttaccttataataccatcttcacggtaatctttccagacattttcaaaccagatttcctcgctgggaaggggtctgaccggtctccaggatacgcggcaggctttcctgtctgcctcataataaatctcctggagtacggttgtatccgtctccccagtcctgttcctgaaccgttcgtccaaatgcgggttaggtacttgtccctgggcattatataccagataggaacctctgctgatgcccactctggcgtcataatccttcagggcctctaaatacacaaactggcttataagaagatgcttcagtttatacaaatccttaagcacttccggtcccttaatcatgaccttctgctccagctgttccctctgtttcagattttcctcaagagctgtccgtatcccttcctctgatcggatgcatgccccatatttggtcatcctgattcccagtaaccttcgctgggcagccacatccgtgaaacagccttcagaaccatgcaggacgcgttctccaaaggcagtctcctcttccacctctttcgcatgaatgccgaagaactgttccctgccgcagggttctcccacatatcgcttcgcaatatactggctggcacgtatggcgcctacctgccccgcgttcagcgcgcttcctcccggccggtatatgccatgggagccattcacctcacctaccgtaaaaaggtgcctgatattgctctcccaccactggtttcctccaattcccccgttgttatgctgggcgcacacagctatttccagatactctaccgacaaatcaatgtgatggctgccgtaaacttcaatggccgacggattcatatgtttcagccgtttatagggcgtatccaaaagtgccctggaattttcaagatattccctggcctcacctgtcagataccggaatgagatatttcctccttccatcatcggggacgggttgtgcataaaatccagaaagacccgtctgccctttaggactgtctcctgataaacaagcaggtcgatgagagacgacccctgtcctccaacctttctggggtcgaagggccactgatacccctttaagaagattgcggtcagaagctgtccgggcgtatcaaaatagtcattcaggaattcccgttcatggcttccgtcctgctccgcggatatatagcggggcaggcactgctggaatgttcctgacagattccacctgtgctttacagatgcaattccgaactgggactccgtcagattctttgccacggctcccgcttccagcaatatccccattcctccggtctggctgacagggtatacactggcctgatacatccctgcttcccctccggtggcccatataatgttaactgccgaaaatacggcataccgttcatccgctgaggcggccttccgtttattcagggcaatgatgcctgctgcccacttttcgccgttcttctcctctgtaagcaggcgcacggcctgatagccgtcaaagaatgggattccccgttcctctgcctggcgttccagacattcggtcatgtatttggatgtcagcggccctgcggaaatacctctcttaaggggatcatgatccgtcttgtaccccacatattccccgctcttattaaaagggaaaggaactccaatatccaccaggtggtaaaatgccctgagagagccggcagcctcagccatggcaatatctccatccacacatcccccgtcaaacagggtctctgccattttccgtacactgtctggctcactgccgcactgagtcagtttataataggtctgtttgtctgaacccgtattcctggacgttcccatgtaccgtccctccgtaatcagagcaatatttttctgccccagcttatgaagagttacggctgcattaagaccggctgccccggttccgactataattgtattgtattgataaaaaggtatcctgttaatatccatatgctgaaaccatatcctataagcgttggatgtggaaccctccatccacatctatgtaattgcctgtcgtgtaacagaaatcgtcggagcaaaacgccctgaccgcctttgccacatcctccggaacaccccaccttgcaatgggaaacatcccctgcctgataagttccgtatacttttcttccacctggctggtcatatcggtacggatgactccgggccttatctcatatacaaatataccctcaggagccagtctgtccgcaaacagcttggtgagcatggagattcccgcctttgaaacacaatactctcctctgttaacggaagatacctgggatgagcaggatgaaatgttgataattgtcccacgcttgcctccatacacaggctgtttcatcatctgccgtgccgccgcctgtgtcatgaacatgtttccttttgtattggtccctattacatagtcaaagctctcctctgtcatctccagcaaatcagcccttactttcggcgccacccctgcattgttgacaagcacatggatttccccgaacttctctgctgcctcccggacaatacggatcctgtcctcagactttcctatgtcaccggcataccaggcataggagatgcccgcttccaggagtattttggtactttccgggtaaaaggattcatcgcgtgtagccatgacagcaacatgataaccgtttatccccagttcccgcgcaatggccaaaccaatacccctgcttgctcctgttacaagtgctgtcttcattttcattaccccctatttcataatcagttcaggcagcgtcatcgtcagcgccggaatgaatgtcacaagcagcaatgtaatgagcataggaatatataacggcagcatggcctttgaaactttctcaattttcatattgccaatggcacatcctgtaaacaatgctgttcctaccggcggcgtacacagtccgattcccagattcagcatcatcatgaccccaaactggatgggactcattccgaactttgtcacaaccggaagcagaatcggagccatgatgagtaccagaggcgccaaatccatgacgcatcccagcaagagcagaatcaggttgatcagaagcagtacaacaatcttattatcgctgatgccaaggagcaggtttgtggccagggtcggcacattcaggtatgccatcacccatccgaacgcgcctgccgcggctatgagcgcatataccatggaaagggttttaatggtatttcccagcacgacgggtatatccttaagatgtagctccctgtatatgaaaaatcctacaaacaaacagtaaatgcaggagactgccgctgattccgtggcagtgaaaaatcccgctgatacgccgccgatgatgatgaccattgcaagcatggcgaagaacgtatccttggtaaccctgagggcttccttaaaaggcagcttttttcctttgggataatgcttcttcttggaaatgatataacacatgaccataatgaaaactcccaacatgatgcccgggatatagcctgcgcagaacaggcttcccacagatactcctcctgccaccatggagtacagcaccatgttatggctgggcgggatgattaacccctgacaggagctggccacggtaactgctatggagaaatccttttcatatcccgcctcctccatcatgggtatttccagcgcacccagggatgacacatcggcaatggcagaaccggaaatgccgccaaacagcatggatgcgagtacatttacatgcgccaggcccccggttatctgccccacgcatacatttgcgaaggccagcaggcggctggatataccgcctgcagccataatttcccccataagaataaagaaagggattgccagcagtgaaaatgagttaagctgtttggacatctgctgcaccagagtcataacaggcacctggatatacagcatggtgaaggctgtggatataatcattgaaaaggtaatggggcatttaatcataataagcagcacaaaggttgtgagaaggattgcgatagctatatttggattcattctttttcctcctcctctctgttaaacttaccggcatcatcggttttcttgtattctttcaggcccataatgtccaggaccgtaaaatagataatggcaatgccgctgaccggaatcataatatacatcagcgatgacggccattttgttaccggaagccgtgaatccatggtggacagcaccattctgaccccatagaccgtgaaaaaagcacctaccagcagcgtaataatccggttcagcacatccattacattcctaatctttaccggaaacttatcataaaacagctccacgccaatatgcaggttcttttccgcaccaatagcaatgcccaggaacgccatccaaattgtaagcagcagcgccacctcctggttccagcggatattggtccgcagtatgttcctgcagaatacctgggcgcatatgattacaattacaactgccaggacccacctggcatagccatatataaccttgtaaaacagattgaaaatatcaattaataccttctttattcctttcagcatcttcagtctcctatatgccagtcctttactttcctgcttctacaatctggtcaatgatgtccttataggcgccttcagatttacggcaatcaccttatcaaacatctcctccggatattcaaatgcattcttccgaaactgcatacccgcattattacacaggatatccacatgaccggcatctttcaaaagacgtatccacacctcatccacatccgaagaaactgacaaatccactttgtaacaccggcactcccgccccagattttcaaccgcccttctggtatcttccaaatccccaatatccagtgcaatgatatctgctcctgctctggcaagtccggctgccattcctttaccgatgcctgttgcacagcctgtaatcactgcccttttacccgcaagagaaaacaatgaatccatatgaaatcttaacctcccctcctatgaaaacggtttcttgtgttgttatgtacatattaactcatgaaaacggtttcgtcaagagttaattgtagatttttgttcagttttaaaaacatttcagcaaaagacggaaagggctgtagatttacgcttccctttccgtctttcctataattcttattgatacattttaaaccggcctccccgttcaccccttctcccgtttcgccgccaacagccggtccagataaacagacttgaactgtttgctggccatggcctgcttaagaggcggcagctccaggatagcactgaacagagcggccatggccctgtggttggaaaaggcctggttatcaaacaccagatttgccagtgttcccttctcaatggcctgaagaacaaatctgtgggtgctgttcaccggagtaatgatctgctccggcctgcgctccatatgaatcgccttgacgccgcagttcctggcgcatacaccgcagccaagacaaatatccttatccaccgcggcacgcttttttccgttccctccatcctccatggaaatggccaataccggacagacctttgcgcactttccgcagccaacgcattggtccccggaaatatcaggaatataattcgtggtagccaccggctgcatggggctgaaccgcctggcagcctgaagggcctcacagcagcacccgcagcagttgcagataaaagccgggtgctcccgcacattttcccctatctgtaccagattgctggcataagagcgctccagtgcatccagtgcctcctccttggagataagtttacagtaatccccatgctgggccagggaacgcgccacattgtcaaaggtcaggcacacatcccagggagcgttaatctcgcaggggtggcctgcgtggaacattttatgacggcagtaacagagccccagaccgatatattctgcctcttccacgatgtgggtcgcccgctcgtaatccagaatgtggttcatcctgtcattggtcagaaccggctcctggacgaacacgcggcccagctttgtctccgtggcataaaacaagtccttgatgaaatcctcctccacattcatatactggtaatacaattcactgagatacttttggtcaatatctcctctggtcctcatcaaagcaaattcaatgaatccggccattggcgggggcatcacgaatttccgcacacccttgtcccaggagtccaccagcaatgccttgccgcacaggtggtccagcagcttttccgccttatactccgatgtgccccatatctttgccgccttttttatagtaaacgggcgaaccggcagcagcgccacccatttagcctccttttcagaatagagaacctgcagtatcttatacagtgtctcagaggccggggctccctgggtaaaccagttgatacggtctcccaggttccggtatgcgtcacgggttgtaagatgtcccattgtctttacctcctccttggattttcgtagattattcccgtttttttccctgacataccgcggtgcgcctgaacattcattcctgtcagctatgcctgggcatatccgggcatggaacaacctctttaccatctactttagcactgcaaaaaataatattcaacagaaagtacatcacatgcttcctctccacaaaatcctgtttttctttatcgctctataccattcatccgccgaaccgaacatatgttcttatttttcttgacaaagtcccccctcagtgatatctttaaaatacatcacatattccaatttccacatgagaggtggaaaaatatgcaatattatatacgcattgataaccggaatgtatatgtctcagaagagatttataaattatactgcaaaggagagaggaaggagcggtatttccgggaatcagatattcataacaagacattttattacaatgcactggatacagaagatttaaacggctgtgatctgtttcaggacacccgctccaagcctgtggatgagcaggcagaagaatccctggagcactcccttctccttgaggccatgaaggacctggagcccaaagagaaggatatcatacgccgtatttactgttacgaccagtccctgcgccagatttccagggaaaccggagttcctgtaaccacccttcattaccgccatggaaaaattctccgtaagctgcggagcctcatgggctgaaggaaaggtgctgcacagattctcacaggcattttggccaaagggccgcccgcgctgactttcaggtacctatacacatacctgttggctctggacggcccttcctatccgtttttatcagaacatacgttctgtttatcggatgaatcttgtaaccacctaataattgcttttacccggaacaaaggaggaatctggtttgaatattgttatatcaactgaacataatcagcttttcagacaactttacgcagccgcggactcggccatctccggccggcatctgagaggcatggagctatatgccttcagaagcctggcgccggaagaactcctcagggaagcggccggctctcccgggcagctgtggctcatgttctttgacagcgacagccggcctgactggacagatgtcctggacaggcttacaacatacagcagtcaaatcatggtctgcgtggtgagcagtgattacagcaccgcggcccgcctggtcaacagccgctccgtgcgcggcattgcaggttatatccatcctgtccatgacaatttagagcgctcctgcctgaatatcctgacctacctgaaccgccgtgtgaattccgcagacggatttctaatcgtgcacggcagcagacaggaagcccggcttcccctttccagtatttattatatagaaaccgtaaaagggactcatatgtgcaatatacactgctcagacggggtatatacgttccgttccggtataaaagaattgtcagaaaagctggggccgccttttcgtcaggtccgggcgtccaccattgccaatctgtcaaatgtccggtcctttgaaccaaatccgggcatcctttcctttacaggcggaatttcgtgctgctgctcccgcagctacaggcatgatttgtccgattatttccgcgggcatccaagccatgcgcgcgcggaaaggggaggcggatgatggaaaggcgacagtgaagagactgcccgaagcacattgaaagggcagagaatctcacctctgccctttctttccatacccttataaactttaattgtcatttctctgcggccacacgagtggccgtccttctgtcccctgtcaggataaaaataactgccgttccatcatccgccgtctggtaagtccctccggtacctttcctgccgctttgttccactttactgtctgcaacctacgtggttcctgttttcgtgtccggcggcggcaccgtccctcccgtatattcactgtcctcgtatgcggccagagcaggtgtttttccttctgttttgtcaggcgctatattttccagttccatacccgtttcattttccccccagattcttcccgcgataacggaattctccacggattcttcctccggaaaatgcagaacgccgtttttgtccacctgtaccataaaacgtgtaccaaaccttgccatctgtccattccggttaaagtaatacggctttcctttgataagctgaatacccttaaccattgcaaagtccggcccaaaatagtaccagttatctttataaaaataccagttatcccgcacggcatgccccgaaccgtcaaaccagaaccactgccctttgtcctgataccagtcattggacacataccgttccggttccagataaaaacggacccctccatcttccttgacccatcctgtgggatggggtgatgggaccggtgattcgcatacctgagctgaataatcaatatccttgagtttcagcacactgacccagggcgtgtcctgcgctcttgtctccaccgtaccataattgattcccttagcctcgatgcatttcccatttccaatatacaccccgatgtgtcctggtttccaaagggcccagcctgtcattgattcattcaatgtccctatgggtttcacctcccgggcagtctccctataattggcgcttcccctcaatatgccggtacaccatgtaatcaggccggaacaatccgtacaatgctttcccatgaaactgcgcgccttagttatgtactgggatgtgtagaccttgggattctccgctgccagctgttgcagcagcgcttccgtcaggatctgccccttcatgccgaacacatatggcgtgcccagctttcccttgcagaattcaatcagttccctgcttgtcttactcatgattcattttctcctctctctgttcacgaaccgttatcttctgtccccatgccgataaaatccgtatagtaaatattctgccgcacatccatcagcatgaagccgtaaagatacccgtccccggatgcaggcactgcctctaacagcatatcatccggttcctctatataaaattcagttcccatatagtagctgtccgtgtagtacctgtcctccatgatttggcctgaagcattaccagtattaccgggagcctcccccacatcctccatacgctcaaccagataaagcggagtcacccggtccccctcctttaactcataaatctgctttgcagcttcagaggtctggcctgtcggtgtcacggaaagaatctgcccgtcttcatgctcctcgtcaaaccctatccgcatggtgcacaactccccgttatagagcaccggggccatatattccgtgtatgcatccagattcatggtctcaatgagacaaagtacctgtcccttcatccccatatagctgtcctccggcgctgcccgcagggttccgtccacgccaatatccacatcactgtctgtacagagaaggtaataatattcatcatcccccgcaggacagaacacagccaaatacgctcctgtcacatcagaagcatcctcaggggctatgctgatttccacggtgccgtccttatgcgcactaatatttccccattccactccgctttcccgggccagatacgctgcatatccgtctgtcagccgcctgtaggcactgcagaatcccgtggtgtcatacgtttccagttcctcactcagatagggattggagccgcttggcaggtatatagtcagaccgcttggattcacgggatagcctttagcccactgttccgccacaagcctcctcatccgatccttcaatgtctgaaaggcattttcatccggatataccctctggcaggcattcaggaattccagcacatccaccagctccggagaaccgcccgcctgcctgctgccaaatgccagcattttcattctgtcccttcccagttctccgtacagctcttcccgcagtttctccggtatcccgtccacatattgatgaaatacctcatgaaatgccggatattccttcatatccaaaaggctcattgcaacaggcgcagtgcccgaggcatagcaggcaccatatgcctccaccatggaccggcccaccgcctctccccattccatatcaggcggcaggctgtctcccagagccgtcatccatctgtaatcatatccatgctggggttccagctccggagatgcaataacataatcggcatatccatccagacagccggcagtctccgcacttcccataagacaggcgtcaaacgccacaaagtcaaaggcactgtctgccataactgaatggcccaaagcctcccttatctcctccagtgagagcccatccccgtcaaaatggctgtcgcttccgtatcctcccaccggaccgcctccatgattccacagaatcaacccataatgattggccggataagaccggacaccgtagttgataaaatccgtcagtgtatccgcatcccccatattcctgatttccatggattccatggatgatattccatcccctgtcaggggaaatctggcatagggtacgccatccatttcatccagctcccaccgggtggaaccgcctgcctcaaccactacatggagggaaggtgattttccttcctgctccatcaccttcaatgcatccatcatttcccaaaggtccgctgtggcggcgccgtaatccccctccaggtcacttccgttcatataaaccatgattgtactgtccgccgcctctgccgcctctgcatattcctttacctggattccctgacgctcagagccgcttaccgtatagagagctgctcctgccagcaaggcgctgagggccgccgcgattcgcggcgcagtgaccctctttctattttgttccatctgccaatctccttttcattatcactacaaaatcattttgccgtttcgtatctttaccgcctcgcgtcttaccgctttacagcctgctgtcatacctgcccttgcggctcctgttcctcattacacgcacgttctcagaagtcctggccccaaattcctgccttgcctcgtccatatactggtgaatcaatccctcccgggatagattaatgtaattcttgccgctacggtccacagggaaactgcggtacatggcttcctcggtcttattcagcacgcgctccatactcccttccgccggggacagcgccttcttctgtttccgctcaccagtcttcttcttttgaagcttagcatacgccagcatctgtttcctctggctctcaaccgcggacatgctcttctttacctcatcatacaaaagctttgcctggtcgtaattgtgaataacatccttcagctcagacagctcctcatcccggaacaccccctccttctctttcagggtaatcttacgctttaatccgcccatggagccggacagcgccttcacatccccggcctgttcccccgtagtcagaataccgcccacacagtccagagcgttcatatactcctggttcatctggtcaaagtcagacatgggttcgcgaaactcccggatataagcttcctgcatggaacgcatcagccttgtggaagatttcatctgctccctggctcccgccaggcgcctgcactgttcttctatggtatatgtttcgtggctgtacctcctgaaattgctgcggaaagccccatcctcaatgtggtccaaatcatttttcatccgcccgttcatattgcctgataccgtgcctgccgcatcggatttcagcgcagagtggcccatttttgtctcataccggtaagtctttcccagggcaacaaactcaatggatgccctgaattcctgttcgcccatgtcagccttgccatacagctccagccggttgatatagaagaatgacaatgccccctgtatcacggcatttaccgctttcatgacaccctctccaaccttgccggccaactgcaccgcggctttggccacctgaagagcagctgttgccaccccgattgccacatatactccggccttggccacctcataggctcctatctcaattcccttggcaatggccacaaacgctttcttccaccacttggcattcctgatggatcgtttgcagtcctcaattttacggttcagggaatcaatctgcccatacagctcatttacatgggcctgggctctgtcaatctctctggcagcattcttaatcttatccctgagccggtcaatggctctgttgatgctctcctgtactgccttcagtttttccgccagcttggacgtatcaatcaccagacggaattcaaatccgccccggttaaaatcctggtaattcaccttcagatggatactcacatcaaaaaccgccagccagttaaaccgcacatcgatggatataagccccttgcagaagataattctggtctcaaaatacaggatggacagcagctcaatccttccgtccagatagaacgtcacatccttcttgcctgcggacaggaagaatacgatacccttctgttccttgcccataaactgtctcagcacactgtccgcgggcacaggaagggcttccccggactcctgcccggctttggagggacccaatttcaggaaacccagattaacctccggtatacgtccatacgccagcaccccatccccctcccggaaggaaaacagaacctcgaaccggaccttaaaaatctcaatgactccgcatacaaagattccccgttccaccgtgtagctgcccagcctggtattcacatccgcataataaaactgggccgtaagcttgatgccgcctgaaccgtctatgtaataatgacgcatccgccgctggtccaccaggtccaccccatccccaaagggagaagcctttacctgagccttgtccaataccaggctgttatcatggactctctggttaaatgcctctgccagccgggatccgttagcattcttaaccagttcccggtcaaaagcctgcatgtcctggaaaggaagccctaatatacggataaaatcaatgctgtcaaggccgtcaaaagaaagccccagcagatttctcaccaaaatgggaatggacaggtcgctgactgctgccgacagcaaatccagctttggaaccgatccggccacagtaagcatcacagccccaaacaggtgaatttcccgtatataaagattggcaaacatggcaaaggacggcccctggtcaaaccctatggccaggcaggtatcccctatggaaaacgggcctgccagatgaatgggctccctgacctccccaaaggcctccaccataaagcgggtcctggatatgccgcagtttacatgaaactccatatccggcacaaatacaaaccgaaaggtaccctgaagggccagtgacaaggcgctgcttctaagcccaactgccagacacatgttcctgctctccataaaactgtttttgcttgccggaattgccgccatacacaaaaatccgtcttcacctgctcccagaaaaagctgcgtctcctcaaggccgaacagctccctgactgccctctcaaacacgctgtctccattcagtttcaaatgggagtatgccagaaagctgcacctgtcaatctgagccggaaaagcctcggctcccggcgccccatccatcaaatctccgggactcagcccctttcccacacgtccgaagaaataaaactgctccatcccaaaaaagtctgctgctttcttcaccgcatccataagggaggatacctgcgcgtttcccctattactatctgctgaaaatgaaaaaagaatggctgcgcttcccctacctgctgctgctttaaaatacagccccggttctccataacccagggctgtgattccatgaatgcaggaaagagcggcacgcttattggaagcatggaccagaccggaggcgtatcctccgaatttggaagccatttcaccatccacagcctccaataatcccgcaggccccctctggtccatctgaagttctccgcaaaaagacaattcgctcttatcataccagacagccagcctggccggacaccccctgacggcgccctctacggctatgctgcacgacatctgcctctggttcattcctgccgctcctttcccgcaatctttccatgatgcattgtatattacgtttcttatgctacttggcggcctgactcttgtccggcagtgcagccacgcccaggtattcgtccacagtaatcagggccatcttgtccactaccttctttctgtccgtattccagacagaaatggaaaggttcgtcacatccacaatgggcttaatggtttccggtaccaggccttctgtcaccacctgcagctgaaacgcatactccaggacagaattctctccctttttacagatgtacagataagccatctgaagcttgattacaatatcttccagtttcatggatgtggagccgccctccttggcggcctcggtcatggctttctcaagctgggccgtatccacggcagtatcactgcctgtcacgcccctggccatcttcttgatatcgtcaatcagatcctttacggaaataccgctgtccggcgtctgttctgacggaatcaaaagaactgcatatcctccctcatttttttcatacatggcatgaagctgggtcccaatcagggaaaagtcaatacctattgaagcttttaatgtgttgttttccattctgctgctctccttttcttaattatttttgtatactatctatcatcaatacagccctccggatggctgcaaagccatcataccgttaaaatggtaccggctgcgtcttgacggcatcgtttggatgattaccggcatgaatggcgtattttctgcagtttacacgtccatttttccagttcccccagatgttcctgccccctccttccgcatacaatatacactctttctctgtaagctccattcccttaaccgcggcataggttctccataccaactggctgtaagaatctgaaatcatctgttcctcccctccaagagtactgttcctgtcacggcacagatccatctcatctgccagacgtataatccccgcgatacacagctgccgcataccatcggaaagcatgtttaacgtaagtaggtaataatcagtatctgcaaatttccatccacatttgataagataagttcaaatgatggaggtgataccaataaatacgaatgacaatgtaacctcaaaggctgacctttgggcagaccggttccatgcttttcaggaaagcggtttatcccgcaaagaatggtgtcagcagaatggaatcccacagtctacactgggttactggatccgaaagctccagtcagaagcagctgagacagaaagtgcttctgatccggtgtttgcaaagctcccttcggaacatgaactccatttcagtacagcagatacaggaaaacctcctgtgatgctctgtctcccggaaaatatccggattgaagttgctgcggactgtccagccagactgttgactgccctgcttcaggccttaaagaactatgcttgatttttacggaagtactacagtctatctggcatgtggctgcacggacctccggaagagctgcactggtttagcggccatcatcaaactgaaattccatctcgatccgtactcccgctgtatgttcgcgttctgcaatcgcaggcgcacattgctcaagatccttcagtgggacgggtcagggttttggatcctgatgaaacggctggaccgcgattccttccattggcctgacacaccggatgaactgcagaaagttacgctgaaagagatccattggctgtgcgatggtttatccctgaaccccagcggcgcatttgaagaacgtcacccgaagatcgtcatatgagcccggatcctgtcaattcgcaaaaagccgaaaatcactttgttttgggcggattttcctccgtcccggaatgcagtttcctataggaacggaatgctttttctggtatactttctggtagagatttcagaaagttgaggctgtgttatggatccgctttttacagaggaacaactgaacaagatgagcagggaggatatcatctccctgatgaaaaccatgcgggagcattatcagaaacaggaaacaaagatccagatcctcgaagaaaaaacaaaggaactggaattcctgaacgcgatgctttctgaccgtctgactcttgcgcagcggaaacagtttggcccatccagcgaaaaatatgcggatggctatacgcagctgaacctttttaacgaggcagagcaggaagcagagcctgatgcgccggagccggaaatggaggagatccatccgtcttcctataaaagaaagaaacgttccggcaaaaaggaggaagatctttccgcctttgagacaacggaagtaattgagtataagctgaccggcgcggaccgaaactgtccggactgcaataccaaatataaagtcgtgacaaaagagacggtgaagcgcctgaagtttgtgcctgcacggtttgaagtggcggaggaggtcacctatgtttacagctgcccaaaatgcggggccatgaaacgtccggaaaaggcgccttcccttctcaaaggcagtgtggcaacaccatccctggtggcaggcatcatgaacgcaaagtatgtgggcggcatgccccttgcgcgtcaggaacgggaattcgcccgttacgacctgaacctttccacaaagaccatggcgaattggatcatccagtgtgcggaccggtatctgcagccgctttatgaactgatgaaggaagaattcctccggagccggtacgctcatggggatgaaacccgtgttcaggtaatcgatgagccggaacagaaaggttccacccagaactggatgtgggtctatctcactgatgaatacagcggcgcaccccggatggtcctcttccaatacgaaagaacccgggcgggatatcatccggtggaattccttggggatcagtaccagggatatttcacctgcgatggataccaggcataccacagccttccggaaaggatcaccgtgacaggatgcatggcccatgcgaggcgcagatttgatgaatccctgaccgttttgaaaaaggactttaccaaagagcagctgaaggaaacaaccgcatatcaggcaatggcacggatcgggatgttctataagatcgaagagatgatccgtgacaagtcaccggaagaaaggtatgaagagcgtcaaaagcaggcaaagccgcttttagaggctttctttgagtggcttcataccctggaggatgctgtggacagatcttctaagatcggagaggcggtcctgtatacgctgaaccaggaaacctatctgaaaaggtatctggaagatggccatctgagtattgacaatctagctgcagagcgggcactgaaaaattttgccatagggagacgcaactggctgtttgccaaaagcatccgcggggcacaggccagtgcgactgtgtacagcatcacagaaactgcgcttctgaatggactgaagccatacaactatctcacatatgtgatggaaaagatgaaagaactcggtgcgtttccggcaaaggaagaaatgctggagcttctcccatggtcctccaatctgcctgatgattgccgcagcaaacttaaaaagtaaaaaacagatcttcccccggtaagtgctgggggatttcttattttgtcaagatacggattattacttacttactgtttaacggcatggacgggcggaaggacggcaccgttggacggtatgtttgggcggcactgttgggcggcagcggcatgcaaaaaaggacgttaagccacggaccattccatagcttaacgtcctttcctccaatcagtctctcaaaacccagtcaggccggattacatacctgcaaactgattctttaccttcatgattttctgctgttccgcctgctccgtctgataccatcccttggcggacatctgcttatagatgtcatcctgcatacacaagctgtcattcagcgcctggttaaaggtctgatgcacatcagccgtggaagactcgatggttccgtgaacatacaggtcgcatacccccttctcggtcagaagaaggttctccataatacacttgtcgtccattctctgcttcctccttatacgagattataaaaactgtcaaaaatctgctggtgcttctgttccatctgctgtacctgatttttaagggcaggatcctgcagattctggatggcttcctggcactgattcatcaaaaactgctcatggcctaatgcatcctcaatataatttaattcctttggactcataagatatcacctccatgattagtatgccgcctgcctactcaggatatgcataaatccgtatctatcccgaattggttcgatgtaacgggctcaatactaacagttcccatattattatcaaataaaacttgtaattttaccccaaaatacagtacaatagtaatagtaacatgtataccggcagtcaattttccggaaccaacaaggagggatatacaatggcaaaaaaatcactcattatcgcagccttggcagcgttcctctccatgggcactctgttctccgcctatgggcaggaaaaagcaatcacatccatacccttgacattttcctgggacacagccccaaagggcggcgaactggtaggcaatgtatatgcagtatccagcaccagtgaattcaaggtggaaggagccgtgtacgacaaaaaggatgaccagtgggactatggcgagaggcccgtcgtggaggtggagctctccgcaaaggacggatactacttttccagcaccaaacgcagcattttttcgctgaccggcttcggagcccagtttaaaaccgcagaaaaggacggagatggtagcgctttaatccttcaggtgtatctgcctgccatagacggcaatcttcctgttaccacatccgtcagctggaaccagaccaccgctgtgtgggataaggtaaacgggagcaaaaactacgaagtacgcctgtaccgggacaaaatactggtaaccacccaaaagacgtccgaatccacctatgacttcagttcctacatcaatgtagagggaaattacacattcaccgtacgggcattgggcacctacagctcccaggccggaccatggaccgacaactccgagcccctgaccatccgcaccgaagacacctggtttatcaccaacggaaaatgggataagacctcctccggatggcgctatgtatatccaaacaacgtctacccggtaaacagctggcgctgcatcagcgacaactggtattactttggacagaatgggtatatggaatctgattgttatgtaaaatcatccgaccaggatttgtattattggctgggaagcgacggaatctggaatactgagaaggataccgctgcgccggagtccggggcgcgggttgtgaaatagtgaacatataaaactggcaggtgcttgatgccatcagcggtgcaaaagcatctgccatcatctacagcatagcagaaacagcaaaggcaaacactctgaaaccatatgagtatttccatacttattgtcaataatacctgaacatatggaagataccaatacaagaaatcccccagtgatatactgaggaaaagtctgactattacttttttagtttgctgctgcaatcgtccggagaccgttgcactgactgttactggcctctgccccacgaatactttggagaacagccagctgcgtcttcctatagcaaaatatttaatgctgcgctcggcggccgtattaaattgcttccagggctttcttgactgcctttcgtatatcctctcctgccgtacgtattccttgtccaatatcaattctgagaatgccgcttaaatctgaaggtatatccagattccccttactcagcaatatgacccggccgcttttcctgcccattttacctataaaatatcccagctcgaaaattacattctgtctggcccgagcctgattctcatggttaaaatcatccggcgtcaacaatacgaatacaatatcagcctggtctgcctgttcttcaaacttttcaataatcgtcctgccgcaatccgggagttcagccagaatgaccggggctggaaagcccaatgtattctgcagataatctttaagctctatacgagccaacgtatcatgtccatggacaataaatatgtttgcatcacgttcatattcctgcgtctgtgtcggttttgaacgaaaattaccacttttccgatttcccgtcaactctgccatccttgtcgctccttccgtgtctccggcaacattaacacctttgtcgccacttatctggctgatgattttaatgttcaaagtaccacctcccatcaaggcatgtccgccaaattcattccgccgtctccacttttctgccatatcatttttatatcccggacattccccagtatacttcccagcccaaatgttaaaacagacggcgtaacgacccgtactacttttaacacagtatcttttagtcccaagagaaaactgcgggaaatctcttcatacttcagttccatctcagatagctgtgacttaagctgctctatggttctgtcactgacaaatgccctgaacacgtataatttgttaattgcttcttttccatatgtatcactgtccttcaccagtgagtatatcctgtcaatcacatttcgacacttatcatattgctgtgcctgcatcatggccgtcacagcgtgaaacagaacctcaaccaaaagcgtttcttcgtttgcccattccaaatcatgatatgcctgctcaaaaaatgccactgcatgctccggatgctccataaggacccagctgattcccatcagcctatgagcagcatattttaagtagggatcgctaaaagtgggtttatccacgatattgcatgccagctgagaatcatacgtcatgctctggtattgaccattcatcatattcaccgcgccataacacaaggtagcccgtacacaatctgcttcgcatccgtctatgatagagccccagtaggacaccttcctgaaacagtccatggattcctgatagttcttttcaaccagattattaacagcctcaaccaataatgcccgtacacccttcttactcggatcctgaatctgaacagcttttatcatatccacaaccatatcgaaaagtatatcttttcttatatccccggtgactgtctgcagggcaaccgtaaccaaaaactgattgggagccagcctttcatcatctgcatatccaaccagtggaagaatcatcccctgactggccatatcgctgcgccgtttttcaattacctctggtaaccgggccccagtcttcggtgcagctgttcccaacagtttgtccaaaatatcacggttatcctctgccgtgaatgctccccttacattcgttcccatcaatatctgaactggtgcgtctaaaatggttcccattatctactctcctcccctattcgtatcttatcccttataaaaaaaggtaaatcttagttacataatacacaatatatggataagctgccgaaaaacgttgaaatcaaaccgttttgtgatgaaaatagatacgcagaaaaagcgctgctgcagaattaatccagaagaaagaatccagaagaaagcaggctattacaggagctactggatgcggcaggacctgccgaagctgcgctttcggcatggaggcatgcaggcactatatcaccaccaagtatatgcgtaatagcagagtctctaatagagtaccttttcaatatcctcttttatcttcatctccaattgtttagcgtcttcttcggtatctgcgcagattgaaaaatataactttaactttggctctgtacccgaaggtctgaccaccatggatgcatttccttctaacataaacttcatcacgttagatttagggagctcaatttgattctcccttccatccctatatttaatcagggactctttataatcactgatggatatcactttcagtcctccaatttgacttggagccgcggttctgaatccactcatgattccatccatttttttaattccttccatgccttcaaaggtatagcagtgaagggtattgagacaatatccatattttgcatataattcatccagtacttcttttaatccttttccctggtttttataatatgccgccatttcactaatcaaaagggaagcgcctacaccatccttatccctgacatagctgccggacagatatccatagctttcttcaaatccaaatataaaccgttcttcctctcccttttcctccaaaagtcctatttgttccccaatatatttaaagccagtcagcacattcactgtatctaccccataatcagatgcaatccgctcagccatatcgatggtaactatggtcttcatcataagaggccggcagggcatactgccgccggcattccttcgtttgcaaatatactcaagcagcagcataccgatttcattggcgcttaacagcaaatatttacatccagactttacccccacaccgacccggtcacaatccgggtcggttgccagcagcaaatcacagttcaaacgctttgcatcgcgaattcccaattccatcgcctgctcaatttcaggattcggatagggacaagttggaaaacatccatccggcatttcttgttcctttacgacataaacattttgaaaaccattttccttcaacactctcttaacacaataccctccagctccattcaacggagtataaacaatagatatatcctttttcattcccgtttcgcataatgcctgttctgaaacagcctgaataaatgcatctactgtttctttgccaatataggcaaccaatccttctgcctgagccttctcaaatgacatccgagccacatctgcaaacatgtcaacccggcttatttccttctgaatctcctttgcagtcccagtggttatctggcatccgtcttttccatacaccttatagccattatattctgaaggattatggcttgccgtaataacaatgccgccattacagtgcagctgccgtattgcaaatgacagcgagggagtcggcattaattccggatatatgtgaactatgattttatttgcagcaaacacacctgctgcagttctggcgaaatattctgaatttaatcggctgtcatatgctatggagacatgaatttccccagaataattttttttcaaataactgcaatatccctgggtggctctggcaactgtataaacattcatacggttggtcccagctcccattatcccccttaagcctccggtcccaaattccaaatctttgtaaaaacgttcttcgatggcctttgcgtcctggctgattgcctccaattcttttgtaagttcaatatcttccagattctgattaagccagtatttgtatgtgtcccttgctctctctgtcaccttaccctgctccttaattcgtctatatatattcatcacggttacaaatctttaaattctctaataccctttttatatcccccgtactatccttttcacaaatcaaaatagcgtcttccgtatctaccacaactatgtccttaaggccaacagcagctatcagttttctgtctccctgaattatacaattatgagtatttactgtaatgacatttccatccactacatttccaaattcatttgattttttaatacgctcaattgccagccaggagcctacatcatcccatccaaatgcacctggtaatatatagatatcttttgcccgttccattatgccgtagtcaatggactgggattccattttattaaattcctgttccaacaccatctgctgctcatctgtaccgatagcagactgtatttgctccagtcttttgtacatagcaggcataaatttctttatatttttcaaaatggaggaaaccttccaaataaacatcccgctattccacaaatactcctccgtagccagatattctttcgctgcctccaggcttggcttttccacaaaccgttctactttatatgcgcggccctccatttcatgattattaaacttaatatacccatatcccgtttccggataatcaggcatgatgccaatggtaaccagattatctcccatttccgctatacggcaggcatctcttaatgtagatacaaacattttattaaatttaatcaaatgatcagaaggtaaaactaacatcagggcatctttatgctttttggcaatgtgcacagcccccagtccaatacaaggtgctgtattacggcttacaggctcacacagtatattttcctccggtatacctggaagctgctcaagtaccagcttcctatagtctttatttgttgcaatataaatatcctccatctttaccaatgaagctattctctcaacagtcagctgaatcatcgtcttaccatcatctgtaatggtcagaaactgttttggcatatttctccggcttctaggccaaaaacgttctccgcgccctccggccattattaacgctgttatattcatccctatttacctccaaacacaaacttccaaacatgccgaacagcatgccctcctcgcgtcgttcctgccgtccggcacagacaatacatgaatcaattggccttgatgtatataaaaaatcggttgttgccgctgtctgtacctctgacctatcactttgacggcttcttataacactaagttctttaacaccaccaattaagagcaaccctgcgcgactggcttctcgcgcaggactgaaccgcacatgcatatactgacatcaatttggggattggctacactaattcaccgataattctctggcacacatatctaatgcggaataaatgacagcatccatatcataatatttatattcacccaatcttccaccaatcaaaaccctcttttcctgatccgctagttttctgtactctgcatataatgccccattttttttatcattcactggataatatggttcatcaccacgtttccattcagaactgtattcacggctaataactgttttgggctgcgtccccatttcaaaccatttatgttctataatccgtgtccatggagtctcagcatccgtgtagttcactaccgcatttccctgaaagttaggtttatctagtatctctgtttcaaaacgaatagaacgatattctaatgttcctaactgaaatttatagtatgcatcaataggacctgtataaataactttcatcgcgatcttttcatacgcttccttattttccagataatctgtgcataatttaacttctacaccttccagcatattggcaaccattttagtatatccacctataggaattccctgaaataatgcattaaaataattattatcaaaagtaaatctcactggcagccgtttaataataaatgcaggaagttcagagcacggccttccccactgtttttcagtatagcccttcaccaatctttcataaatatccgtgccaaccaaactaatcgcctgttcttcgaggtttctcggctccttaattcccgccctctttttctgctcttcaattttagcttctgcctcttccggtttcacgactccccacattttattaaaagtatacatattaaaaggcagtgaatataattcaccattataatttgccactggtgaatttgtaaaacgattgaattccgcaaactgatttacgtattcccatatctgcttattatttgtatgaaaaatatgtgcaccatatttatgcacattaattttctcgatttcctcagtataaatatttccagcgatattaggtctcttatcaataactaaaacccttttccccttttttaatgcctcatgtgcaaatactgctccataaaggcccgcacctaccactaaatagtcatacatataatttctcctcttaaattagtgtctgctgattaagcctctatcggactcagccagcaagtattatcatcgaattgatgcccatgccgtagcagcgcttttctgcttttgttgtttctcctggcctgccaagggggcctgggatgctagtttaaaaaaacaccacctttatcctgtctttctcgccccatctttttgtaacagctagcaaatattataataaaccagaaaaaaggctgcctgcaattcattagcgaaaagctctccactattaaagccataactactattagctgccacttatcacagaatcgaatattttttccgccccaataaagaagccccaaaagaggaaagatgccatatgaaaaccacactgaaaataaactggaatgaatttcattgacacgtacaacatcaaagacccctggtgtgatttgattaacataatcgcccggaagaaaacgttcaaacattccttcaccagctccatacaggagatacttgggatgaagaaccagccgttcagcgcttcgatcatataataaatccgctaaatttccatgagaaaacttccatattttttgccgaattctatcaagtaatgtataatctgttaaagaaatatcgaagtctgctttaggccatatataatataatgccatcataataaaaacagcccctaaaagcaaactaatattccagagtgttttacattttgatttcttataatttttccaaatcaagcatcccgccaagagtactatcaatgttaaaagccctgtaaaaacccctgttgatttggaaaccccaattaagaaaactgcatccgcccaaaataaccagatatatttcttttgctgatttctcagatatattaaaactaaaatcaataacattgtgaaaataaaaaacgcaaattgattggggtcgttaaatgtacccataaacctggagccaccccagttttcatgaaaataacgacctttgcctaaaaaatagatgatagtctgaaccagaagattaatctggcagactataccaagtccaaaaaggaactgttctgaggccagcgtacggaatatccatatggccatagtaacatacatccaataaagagtaaaaagaaggaactgaccattttggttatagcagtaatagaatccattaattatgcatacagcaattataaatacataccatggaatgtcgattttatagaaaaatctttttctactgcaaattgtctggattattaaaaagacgcctgatgccgcaaggaacatatcaccaattcctatcgatccagaaggtaaaatataaaactgttttaaaaatgtaaaaatgtaaaaggatatcaccggaatataataaagtttcatatttatttgctcctaactgttccacagtaatcccacagtctcaaatctaactttttctttctatcctttctcttatatctctactggatatagatttcgtgtaaggaaaatatatacaatctacccccttctcttgtaattgtctttcagtttcattatacagtggtgtgtttttccagtcatccccatgaaataaaacattaaaatgaattttattccatacgataattttatccatactttcctgaggtatcactccatcaacacatttcaaggcagctacaattcttatcctgtcctcgaatggaataatgggggctcttcctttatattccgcaaccagcgcatccgtacttacccctaccacgagatattcacattgttgttttgccctttcgagaagattcaaatgtccaacatgaaacaaatcaaatgtccccgttgtatagcccactttatatttacacaaatatgaatcctcttttttattactttgcatctatcatgtcctcataaataaagtctgacacaattccatcaactccgatatctctcaacttatcaaaatatgaaatatcattcacgactgcggcataaacctgtaatccattttctttatatgcctttattgtgtctgtatcacagtaagcggtacctacattaacaatgtttatctgtttttctttacagatatttataatttcatcggcactgcgcggaagattttcatactgcctaatggcaagatgtttaaatgggtatatgtctttaacgatatcgaaatcatctgcccgatataaagacactacaatacgatttaaaacatctggattataatctgccgttttacatacactcaaatatgtttcttcaacatcctcttttgcatcacaaactatgtagatatctttccattctttcatctgttcaactacatcagcaaatgaaatcattgtatactgattatcgatttttgttttgcaaaactcttctttacttggcagtaaagaacgctcaacctgccccacatttatatcattataatagatatcttctttactaaatgaaaaataccctgataccccctcccattcatgacacaaaatcaattctccatcttttgaaaatcgaaggtccgcatcaaatagccgtgttcccctggcatatgcattttcaaatccttctttcgagtccaccccaccccccatgttatgcgcaataatatgatatttaataaatccgcttgatgctgcactattacccttcctgcaaatattataaaatacaagcaagcaaatacaccctatagaaataattaaaagcaacattaacaagcctctttttatttttatcatcgtctttaccaattcttgttctttaagcaatgaacttaaaatcaaataccaagcatttcctctgttaaatcatcaatcggatacttttcacagaactcatcatatttttcacaactttcttccttcatcaaacacactatattaacacgttcttcatatgctttggttgaaagattaagtagatattgagcgcaatctttttcagtatctaataagtggtactcctgaactagcccgattccagtacttgcaacttttgtacacacaattccaacaccataggacagagcttccaatgttttacacttcaatcctgaataaaacgtgtctggattcagatataaatcataagaggagtagaattcatctaaagaagatatccgcccaagtactgtaactgaactagaggtgtccttctcttttaacatatcgcagatacttcctgcaatatataaatgtatattatgggttccttctagttcagcaataatctttttaattgaaaaataattcggaggattcgatgaagcaatatagcctactgtcatcacatctttgtcttcaatgcctttatattttatttgatgtttatctggtataaatggaaatgtaataattttaacctcattatttacgattcttctaaagtacttgcaatcatcttcttgtatcgcaagaacaacatctgccctgcgcaaagctctggcttcctcttcttcagtacccacaccaaaccaaaaactccactctggatagcctgcattatgtaatgatttattatgattagcaaatttatcatgtgtgcataaaattttcttaaccgcaggagaaagcacgtcaaaagctttcgaataaaataaataattagccatacatgcggagtatttatagtgctcatttagtctaactatagactgtaagaaatccgcatcaacccagtcatcaatgtgatccgcatccatacggttttcagaataatttgaatgggaaaaataaggattgctcgcatgttgaaaaaaaacacgatcccatacattcctattaacattttgcggagcatattgttcccaatatataaacaaatgtaatttatatcccttctttttcattgtgatagctatttgttcaatataatgaatagctgcattgggcaggtaccatggcaccatgaccaaggctgtcttctccccacaaaccgggtccaactcaaaaataccgttatcaaaattcaggctttgcaattgattggaagcataagagctatatccgccttcattaattttattccatataaaagggcgatgaataaaactattaattttatcccatatccgaattcccgcttttgtatgataacaattacgtaatatatcttttacaatgtttctccagtattgagcatcagtaacacttaactttttttctctatccgccgttgttttatctaaacccattaaaaatggataaactacatcccaataatattgcctaaccgcactatcagaaaatcttgcattttcagctccaacgccgttcctttttccttcactataaaactcccttgcccgctcaataaactgctcctgcgattcttcggaaagcctgttataatgaaatataaaatcaaagtatgcatgtaaataaaacgcatctctaaaagaaccaaatttttcattcttcgcaagccactgcttaatcacttcataattcttaaactgaacatcccagttttttgctgatttactagacgaattagctgtcatcacccgataattgtataccggcttatcaatgcatataattgattctgccattgaatataccataaacttgaaaacaacatcctggtatgctgctccggaagattctaacaccttaatattgtactgctctaaaaattctcttttatacaatgccgcccatatggacgattccatgaccatcaaatcattgctatattgtggttcaactttaatttcagattcatagaatagaaatgggggatgtacaatacattctccaccatctgaatatagttttctaaatcctgcctttacaactgatgcctgatacttttctgctaccctgtacaataccgataacatatctggttcaatataatcatccgtttcaacaatagcaatatactttccagaagctttagccattcctgcattaacagcttttccatatcctccatttttttgatgaattgggtgaattctcttatcctgacttgcatacttatcaataatagcgccgcatgaatctggtgaaccatcatctacaggaataatctctatatcctgaaaatcctggttcattacactctccaggcactgcggtaaatattcctccaccttatatgtcggcataataactgatattaatggcataatagtctaccttcctttatatattgttaattctattttgcgtgtatcctctttaaatactcatcataaggtgtctccacatcaaaaataacttccccatgagtgttcggtatattctgtggtgtcatataatctccatagcgacttgacaaatactgatgatacccagccggcacaggcagctgcacatattcaaaatccatcataattgttttgtcataaatatgcttatcgcgaatccgcttttctgtatcaaatataaaatttagtggcgcaacctgattcgtcgaactcaatggcacctcacgaaacatcttatcaatataattccaacattttcttacagtaaggttttcctttaaatcctctggaacctcaaacttttccggccagctatacttttctccctgctctaacgcataaatgcactccttaatcactccgcattcatatctctgacgctcaagccgttctttatcgcttgatacactttctaatacaaacaagtcaatgaaaataccctgattaaattctttgtcttcttctcctaccagtatacctgtcgtaaagctattccttatctgtgcatgaccatgtatatattttttatcagtatatacattctgaaaaaaatatggtgtttggaaatatctaggagcgattgcgcacagtttatcataatcttcccgaaacatagcaaaatccatatcatcatcccatggaataaatcccttatgcctgactgctcccagcatagttcctgcatctgcaaaaattcttaaattattttctctgcacacagttattaagcgatttgccatatctaactcaatagcccagatatgctttctcatttctgaaacttcaaatccttttcgtatctccttttcaaaaaaggaggattcaggatacatattccatgtatggtccatctgcaaaaagccacgctcccttatcagcctggtctttatatcaagcaatataaagtcagtaacactatcatgtagaatctcattctccccccatatacgtgcctcaaaataatactgtccatccaacagcttatttgactctaatgtacaggttaacatgcccgaattagctgttaaaaccatcttatcgtattcgagtcttgtagaagtgcgataaatagggatgtgatcctttgacacaattccaaaagcaaagcttaaaggggtattggcaactttgcctgcatattgaaaacggattgtaatcttgtctcccgtttcaaaacatgcacttgaaactccttcaccatttaataattcaatgcttgtgtaacgaaccagccccgtcccttttctccttgcctctggtgagcaaaatatactcaatgatttgcagctatcatctgatagttcctctattctgttaatattctctttgacatccggcactccactcagactatttagatacgctctggcaaccgttcgtatttctccgcttgcttttacaatgcctttatccagccaaagcgcatgatcacagatttttcttaccgactccatagaatgagaaacatacagcaaggtagttcctgcgtctctcatatcggacatacgccgttcgcattttctttggaacgcataatctcctaccgcaagaacctcatcgcaaattaatatgtcgggctttacaaccgtcgcaatagaaaatcccaatcttgctgccataccagaagaaaagtttttaatcggcatatccagaaaatcctttagctctgcaaagtcgataatttcatcgaagtgtgtctccataaactgtttgtcatgtccaagtaccgcgccgttcagataaatattttctcttgccgtcaaatcaccgtcaaatccggcccccagctcaataagcggagctattgtcccattaacagtcaggctgcctctatatggttttaagattccgcatattaccttcagcaacgtagattttccggaaccgttcgttccgattattccccatgcctcacccttgttcacttcaaaagaaatatttttcaaagccaaaaattctttaaacatcaattcccttttaacgattttaacaaaatattcttttaaattgtctatgcgttctgatgccatattaaacctaactgtaacatcattcactgaaactacgatattctcactattatattgattcatcatcccaccaacctaaatatacaaaataaacttatcctgcgtttttagaaaaactatgcttcccaatattaaggaaatacccgcaacagtaaagccatagaatatcaatctaacatccggaaataatccatccaaaacaatcgtccgaaattgcgtaatatacgcatacattggattcacatgcttgataatccattgtatgttttctggtaattggttaatggggtaaaagatgggtgttaaatacatccatgctgtagtaacagcagagtaaatatgctgtatatcacgaaagaacactgtcccctgtgctaaaaaaaatcctacaccaacactgaaaacataaatttgtagtaatatagctggaatccacaacatattaatgttaaaatttactctgcaaacaatgaacacaataagcatggctcccagtgaaaacaaagtattaacaaagcagctgctcaccttagataaagtaaaaatatatttaggaacgtaagtcttctttaataatgccgcattccccgtaattgaccacatggcctgggtcgtagcatccgtcataaaactaaacatggtagaaccaataatcaaatataccggataattctttatatcaaaccgaaacatctggctaaatacaatgaccattatagacataatcattaacggattcaaaatactccaaatataccccaaaaaacttcttctgtatttcagcttaatatcctttataactaattgctccattaatggacgatatcgtttaaacgtttctagtctactgcctaacctcttcatctaattttctccctatttcaattaagcccaagatacttttcccatgctgcctgggtagtaatgtctcctatatgttcttgataattaaccgtcgtcttatcaaacgccctccataaaatcacaattgatttgacacacaaccacaacactcgaaatagttctttataccgtttatgtgtaagataaaccttaccgttctgcggttcataccaaactactgtcttttcgcggaaagtctcaaacggtgattctgaagtagcaatcacttttatatgttttcgtttcgctggcaaaatccatccatttaaagttagataatgccaaatagtcgctttcgccttaggcatcttaccttgtttcatagtatcagctcccatgtttctctgatactctctaatctgtttttcagcaagaataaactcccattttgtcaaatactttttcaaatcttccatcgaatacatttggcaggccatatgacgtatctctgtatttagcttttccggcttttggccataaagccatgcaggtcctcttaaaaagtcaagtatgcctctatataccaaatgtgcttctttataggtcaaacgaaccgctgctgctgacaatgattttaaaaccacctgcatagcgattctttttttacccttctccttatttatcgccaattcaatcaatgtatttctggtatcataataactattagcatcaatcgtgtactcgaatcccctgtgccaaactcccacaccatttaaaaacgtaatcccgtactttgcattgcgcagcccaaactcaatatcatctcgatgaataaataatggtatgggcatattatcacttctaaccacatttaaagaaaaacaacaacaccaccaccccgaatattgaccgtcatattcctttccagtgccagtgagatattcgtttgaggctgctttcagcgttctcaaatcaagattagcttctgtatttaccgtttttccctttttccaccactccccagcgcacaacaacaaatacggataatcttctcttaacaaagctccgccaatcgtgatatctttccaggtttgttttatagtagaaagaaaaccataaatccggacaagtaaatccggctctacgattgcatcatcgtccattaataaaatgtgtgtaaaatcctccaagtctttcttttttaggatttctatcatccctctggagaagccacctgctccgcctgcgtttatattaggtacaacagttactttatcgttacattcccgcactataagctggactgccttacaatcctgcaaagtttgtccattatcaataatatatataccgatatgatttgaaacatttaaattggaattactcaaaattttttcttttaattgcttcaggtttcttgcaacatactcttctcttctaaatgtacaaatgtcaacccctatattgacctttctaggggtgtaattcattgggtcagtaacataatatccatttatccctttttccgggctacttttatcttcatacaaagcaacccaaaaacatcccttattataatcgctataaggaaaatcaatcaaatattctttatatctttttggttcaagagccacttcctttacgtcaatcccatcatgtacaagaaccaacttttcatatccgcataggcggattgatatcttaagattttctatgtctgtgtatttctttcgcttttctacataaaacaaattaaaatatccattataatcgatgcgattaccttttttatggtaatacaactcagatatctcacagacctctttatctggcagcaaaatactctgtaattgaatcatagacgttcccatcctacatgtatggttaatggttacccctgaatactctcaagaaaattttcttctgacagcaaaactaattggataatacaaaaaatatctgctttttcgcaatatagctatagctttattaatattttcatcatatatattcgggtattttttcttcaatttatcgtcgaatgtctgcagctctttctttttccccctagtggcgggaaaactcagcataatcttgatttttcccgctactacccttgcaataattctttctatatacctcttcttttcatatgaacagggtatctctcttcctaattgtaagtaaaagtcaaatagtgatcgaagtactttatcataatttgtctcattctgctgcatcttttcaattccaacactctgaccctgtctgcctatccggtacatatacacaaattcatttacaaaactgattgttttaacatatggtattggatacgtaatatactccgtatctacataatagcaattttcatcaattaatatatgatgttttcttaaaatatctgttttaattgtcatattatgcattttcatgtaaagcttatctgcaatttcgtcaaaatcataattatgttcataaagcacccctataaatggctgactaatctctgctttcttcctaaacaggttcttatccccctgtccctgattaaacacccataaaaaccctgaatatattacatcagcgtccatccgttttaagctctgcaataattttctaaatgcatctgcttcaatccaatcatctgcgtctaccactttaaaatacttacctgtagcattctgaataccacaattgatacctgacccatggcccccattttcttttgtaatcacattaaaactatccggataacgttgaacatattccatcgctatatccagagacttatctttagaaccatcgttaataatcaaaatctcaacatccggcagtatatcttcataaataaaagcattcaggttatctctcaaatagttctccgcattgtatgtcggaactactacagttaatattttatcattcattatctttccatttatcccttcagtgctggatcttcccatttaccatcttcaaatccatctgttgactctcgcataaatagtacttttattgtcataagaattaattgtaaatcaagccaaatcgaatactttcttatataggttaaatcaagttttaatttatcataacttgtcgtacaataacgcccgtaaatctgagcatatcctgtcagaccagcttttacttttaacctatatgtaaattcaggaatgttttttgttatgacttttgccagttccggtctttctggccttgggccaactaaactcatatctccttttataatatttagaagctgtggcagttcatccaatctggttgcccttaagaatcgtccgacaggcagaactcttgcatccctctctccagcttttacaggtccgctcttgctttcagcattaactatcatggttctgaatttatatatagaaaatatctttccgccttttgtcagtcgcttttgtgtataaaataccggtccatgatccgtgccttttattaaagctgcgattaccacaaaaaaagggctactgaccactagcattaatgatgcaataacaatatccatcgctctttttacaaatgcctggtccaaagcaagtccatcaaaattccgtgataaatacaatggagaatcaaaaatattcagttcaactgaacttcttaaaagaatatcactaatcttaggaacagtataactccgaatgttatttgcataacacaatttcaccaactgattccggaatccggcagaaatatcaccgataataacaccatcatattcttccgccaagctgataatcttctcaataccatcatcaatagatatcttcatggctatttcatatttatcttcccttgtatcaatcctattcattaaatgaaacatcggattctttccataaaccagcaacagacgtctcctcggaaaaaggaacacgtacaattttttgaatgcaaatgcccatatcataactattgccaggtccaccactgtcataacaatgattgccgttggattatgcattttcttatcgaacaaaacaacctgtacataagaaaatagatttacacccaaaatagaaatcatgtgagaataaacaagattccagtatttaaatatccctaccttcagtccgccataaaggcgatggaggatgagcgacaacacaaggtactcccctgttacaagccaatttcctcgccgccagaaagcaatcgtcatattcttattgtaataattcatccaaacataataataaattgctaattcaagcaatacaattacagaagaacttaaaaactttacgattcttttatactgctcaaattggcgactatttactttctcttttttcataatgaatgattccttagtctcttatcataaaccatctttcggaattgatttggacacaagcttattattattcgtaaagctattataaatatatattgaggtaagccaatcatcttttgtctatacattctcgaccaaaaatgtagtaccgcctttgcataagatatcccacctcttcgcatatgcatattattaacacgcatatatagtatcgtatcagtcaaatttgcaaatacacacttgtttttaaacattcttacccataaatcataatcttcaaacatgtggcactgctgatatcctcccgccgcagctgcttttgatttacggaacataacgcagggatgattaattggattacgaaattttatatattcagcaatttccctgtctgtctccggtacaaactttaaggacactacctgctgcttagcctcttccgccgttaatgcacttccctcaaattccgccaccgttccacttaatacatctatttccggatgctgttgaacatatataatttgttttttacatcggtctggaaatgcaatatcatcactatccatgcgaacaatccactcgcagttgcaatagcgcattccttctgcaagggccattcctagtccaacattcttttccagccttaccagaattaatatatttgagaattcatccaatacctgctctaatgcatttgtcaatggaccatcacaaactaaaacaaactcttttgcttttaaagtctggttgactatactggtaattgctgcccgaagatactccggatattctttctgataaacagacatcaaaactgagtactctttatacatcgtgagagctcccatgcaaaattcatttttatacttctcatgattcctgccctataaatctcaatacagtatatcatttaaaatctataaccgcaactatcactgcaaataaaaaaatggaagaactggatatttcatcagaataattaacactaacagcctgtctctcatcacagactatagcttatgaagggattctttatttatatctcccgaagctgatactcccaccattaataatgtcatcattatgggcgctactatagggacacttatattaaccgttgcttgaaccccatagcatacaacagcaaatataattgccattattaccggctccttcttcgatgcccgtatcatttccataatggatgtaaacagtaaagacacataagctacaagcccaacaattcctatagtgataagatactgcaaatattcattatgagcactatcaaattttatattatatctgctaatcatctcctcataataattattaaccgtaataatcccaaatgtgtctggtccataaccaaatattttatgaatttcaggaaatttcgaataactttccattccaatcctccagatatatcctcttcgcgttccccaatcatcatttataacaagatatccactcaaagaaccatatttatccgtattacctgctatattcgcatcataaagaatataacagcccgctaaaacaactaaaacaattatacacagccaaatccaccttccaatattacttactctgtttagaacattttcctttttaatacaagcttttaatatatacagaataatacaaatcccccataatccaattacaaaatatggtaatctgtcatattcaacaataacattgaacaaaccgttaatctccaatacatgattagggaatttgtgactaatggtatcaataaactgaaactctgaaaataaaattgatactaataccatgtatttcttaaaaccgtccaaactattgaataggtataagggaagcaggccgaaaagtgccattaaagtcaaatatgcattatcactcatacctgtaatcaatgcaaacaatgatataatgacagtaaataaataccatattcttttatatttattcttttcgattgaaaacaaaacagcagcaatagctgaaataagagctacataagatgtataggtgttaatgttaccaatcgtggatacaaacatagggtattcatatggcgaaattccgtttttaaaacctattggatcatatctaaaaaaatgcccaatgcctatgatacaggcaatcattcccgtagccaaaaagacatcaagcagccactgtttaaatttcaagcaatgactgatgacaaaaaaacttacagtatataacagagtaaaaaacattcccataaatcttccttcatttccccagaatgattcataaaaataatcagattgaaatgtagaaattgtaacagaagtcaaaaaagcaagcatcgcccagtctgagcttcttaatgattttatactaaattttttctttagaactttataattttctttagagtagtaacgggaatctttatataaaaatataatggcagtaattaacataactatcgccatgagaataatcgtaccataataaaaaatatattttacagttagtatatcataataataattatgaaaaactagcggaagaactgcaattactaatatgaccgatacacaacttattatctgattcactcttctccaggatattaataaatcctgttcttctttcaacttcttatcttctgtctctattttcatatattaattcactctcctatattttttgaaggatattttacagtatatcattttaccctttattccgcaactttatgaataaacataactttacaatttcataaatactttggggagcatgattatggttacaaggagatgcctgaagctaagcgtaaagacctgcaacctccagatgacagcaatccggtcacctctgtgatatgccgccaagagattctctgacatcatacccgtatatcttaactcaagatccgttaacggcctcgtcataaaataaacctccaaactgagtaattttatcttacatcagtttgaaggtttacacaaactttgggccgcttccccatgggaatttttatgggagaaatttattcgttctcaacccacacgccatctttatctacatgatatccatccggcgtagtctgactggtaaccatgagagaatccccaccgaaataataccatttcccgtccgtattctgtttccaggcattggtgacatagcttccgtccgacaatttatatttccaagtgtctccgaattgctcccaaccttcctgagaggtattggatgcactgttttcgccaggcccgccgctcttttgattcacgattgtggaggcatttccatcccaaacgccgtcagcatttacataataaccatcaggagtttccttatcggttaccatatatcctcctatattgaagtaataccattttccgtctgcatctttgaaccaggtattcgcggcataattgcccgtgcccatgagatagcgccaacctttttcgtcctgtttccatcccggcatataattagtcttctcgccctttgcatttacgtagatcccgtcaggagtaacggtatctgccagcatgataccctcatcattcatataataggattcaccatcaaccctgagccatccgcctgccacaaaattgccgtccggtttacggtattttcgctgattgccctcggttatccatcctgaagttatggttccgtcatatgctcctgcatctgatccgtccacattaataagatattttctgacctcaggaggcagctcagaagcagaaactccgtttggcaaatgcacaacatcaacataacgctcattgcttgaataatttttattgttcgtaagcaaaacaatgcgggtggtcggttgtattccttcaggaagcgatgaccagttatccggtattgcccagacaccgcctgcattgaccaaatcaggaacctgtccccatgggcgtgaatacttgtttggctggaatgtataaccataatcgtagccacggttcaagatgacatcactttcgttaatggtattccctcctacaaggattgcaaatgactgtccatttccataatctaccggacgccatgtaaaaaggtaggccccgctgttttccattgttatagacggagccgtctctgccaatgttggaatcgtgcttgacagacctattaacattgcggcccccaatataaggattctttttcttatcataaatacctccaggaaaatctttctatgtattatattttgcggtaatatgtccttcatataaaaaagagaaagcgctatgactaatacaatagatcagtcacaacgccttcccccttaaagccagactacaccgacttattatttataattaatcttctacgtagataccaataatcttaccgcccttagctactacgtactggaagtcattgccatccttgttcttggacttgctgtcaatcactttaccagatgtatttaccaggaagtacttatcagtatccatacccttaccgtcgttgataatatacagttccttaatatcatcaaccttcttgttaagaccaagtttagaaatattctctttggtaacttctgtagatgttacgttactgccaagatccttaacaaaatcgtctgcatcatccagttttacgtaacccagagaatcagtatcatcaacagccttaaccacctgatacttctcatcagatccagctcttaagagcttaccagactgatagaacttatcatccttctctcctgtacgtccagcacccttgcttccgccggacttctcgaaatagaagctgaagttatcaccatcaatagaaacagtggccttgtttgttctcatagcgccatcatttccatcaccgaagtaatagcacttgtaaccaagcttattaagcttaggtgcgttctcatcgaatctgtcttcatcatcgaatggataggtatcgtcatcatcagcaatcacgctcaggccactgccagtatcattgataaacttaagtccatcaaccatacggccatcattacggaacgcatacttcttgcccttgatggtcttgaactcgcctgcatacaggttgccgcttccgtctgcatagtaccaagcatcttcatcatcattatacttatcgtagttcagatactcagctgctactaccttgaaccagcccttgcttacacgggaaccatcctcaacgctgttgaagtatctccactgctcagcatacttagcagatacactgttggtagctgatgtgctgtagccgtctcttgtaccactcttagaagccgcctcaacatccagagaccactctgctgtcatagcgccatactggtcgaactcatatttcttgccgttgatggtcttgctcttctggagatcgccatctttagcctgaaccttcttaccatttgactggaagtagaaccaacggctctgatcctcatcatcgttgaatacaggagcaatctcattatcattagttgcttcatcgtatgtgatatccatctgcagccagccaacagtcatagcaccatcatcttcgccgccgaagtagtaggtaccttccttaaagccgtcgccgtctgtatcatctacgcgctctgcattgtcctcagaaacccaaccgtacagcatcttgccttcgtcatcaaaagcatacttcttgccgttaattgttttcagagcaaccttagcattgtcgccattctttaaagccttaccatttgcctggaagtaataccagtaatgatccggctcattgtcctgtcctgcatcttcgttgtcgatagctacccactggttagctgccataacaccgttgatgtctacataataatagttgtcgccgtcctcaatcagctgatcgatagccatttcgccatcgctgtttaaccaataccagttgttaccggatttcttccactgatcagttgctctctcgccgtctctgttgtaatatacccaagtaccgtcttcctcagcccatcctgtagctgcgaaagaagtcatggatgcaccaatagcgagcagtgctgctgttgataatacagcaactaactttgtctgctttctcataattaatgcactctcctttttctttttgaaatactttttgaaattccttttttgcattacgagttgattatacttcggataaggaaaattatcaatagtttttttgcattttttgcattttctacaaaattatgtaatatcgacaattccatccgtcgaaagctaaccagctccatcacacgcacttagtatattataaattccgcaaaaataccataacttttacctgtgcattttcttacataattattacaaagatgttatacaacccgcaaattgcacttatatatgtacatgtcctcatatttcagcaaaaaacagaattaatacattatgattttgttatctttatatcccataataacttacgagcatcattacccgggaattattccagggatgatgctcgtttatataactccagatatactgttccgtcaaatcataattatgataatcctgatttactatctcaatacaacctcataagccccggccatgcccttgcactgtatcaactcataatattcctctatcatcggaatcatctcagaaagatcggtatgccaataatcctgacgcttcataatttcttctacagaggcctttttcatgaactgcattatctcatctccatcattagccttatccgtacggtagaaggctattaatgctgccatagaaaacgtaagcgcctttgggtaacgaccaaacttttctttatactccaatatagtaggaagaactctaacctggaacttgcttactgaatttaatgcaatgctcagcagctgatgcttgataaatggattagagaaacgctccagaacagccgcaccgaatttgcgattatcctctgtgtctccaattgtaggaatgatttcttcaaatatacacttcttaaggaatgcagacaccttctcatccttcatgcattctccaactgtctcaagtccgtacagatacgcccccaataccatggaagtgtgtcctccattcagaatgcgcaccttcctttttttatacggatgaacatcgtctgtccagacaatattatagccggccttctggaatggaagttcgtcttcatgatgaccgccgataacccacagatgaaatatctcggccgtatctataagcttatcctcataaccaatctgcttcgtcagctcctcaacctcgtcacgtgggtaacctgtcacaatacggtctaccagtgtgctgcagaaatcattttcattttccagccaggttttaaatccgtcctccagctcccataactctgcatactgcagaacacattttttcaaattgtccccgttatcatcaatcagttcacacgggagtaaaataagtccttttaaaccggctttgaaccttttatataaaaactgagtaagtttagccggatatgattttggcggcatatcagtcagcttctctgtacccaggtattcaattcctgcctcggtagtattggagacaagaacccttaaatccggattctctgccaatgcaatatattcttcatattgggtatatggattcaacgccctggatatagatgttacatgggtatgctcattaactacctgtccattatcaattccccgcaggaatagattatattcacaattttgctccgaaagcatctggcacatccctttttcgataggttgaaccacgactatctttccatcatacagacctttctcctggagcttgtgaaagaaatagtctacaaagccccgcagaaatcctccttctccaaattgaatcacagtttcttttacacatttactcatttttgctacctccgctgttgttttttgtaagtgcttacatttttaacttcaacatttttcttttgtttatgtgattactatacatcatatttttactttttgcaatagtttatactatttttttgtaagcatttacatatatcttcctaataacattgactttcctgcaaaattatgaatataaaaggaggagcaggtatgagaaagcacacaaaagcacttgcaacaattatggcagcagctgcactagcaatggtgactaacagccggattccgattacaaacatctggtactatgttggccaggacggcaagtggtattgctttgacagaaacaatggagatatgaagcgaggcactacaattgacggctatactgttgattttatattagcgggatttagggaaaaagagctatgtgccgattagccggcacatagctcttttaatatacacaacaaaccttcccgtcagaaaaccgccgcgcctcaacatgtctccacatctcagcacggcggtctgcgcatctaaatcaagctcagcctcatcaactgaatcccgattatatgacttatatcagccctggtccaaaattactttaatgtaaccttagcgccctcagcctctaatttagccttaacatcctcagcctcatccttggatgcgccctgcttaactaccttaggagctccgtcaactacgtccttagcttccttcaggcctaagccggtaacttcgcgaacaaccttgataaccttaaccttgttaggaccaacctcagtcagctctacatcaaattcggtcttctcttcagctgccgctgcgccagcgcctgctgctgcaactacaacacctgctgctgcggatacgccaaactcttcctcacatgcttttactaattcattcagttctaatacggataattccttgatagcttcgataaactcagcggttgttaactttgccattttatgttcctcctgtttaatatttaataattagtgtttcaagccacggcctttgccgcgcttgtgtcagtaaaattatgcctctgcggctccaccctgctgctctgcgatctgattgagtacacgagccaggttggtaatcggtgactggatgcttccaagcagcttgccaagaagctcctctctggaaggaatggttgcgataacctgggttcctgcctggtcatagtaggttccttcaactacagatgccttcagttccagctttggagctgtcttagcgaagttagctaagatgcgtgccggagcagtagcgtcttctttggaaaccgctaatgcggtaggtccttccagctgtggtgcaagtgccgcaaaatctgttccttctgccgcacgcttaatcaaagtattcttatataccttgtaagcaaccccagcttcccttaactgcttacgcagctgagtatcctgctctactgtcaggccgcggtagtctacgatgactgcaccggcagcgccttccagcatagccttgatctcatctacgactggctgttttaattcaacttttgccatgaatggtttacctccttatatagtttcgcattgaaaaccgtcatagcatggaacgattcataatccgggttccaagattccgcgccggacatgccggacgcaccggatataccaggtacggacatctgccggaaccagacaaaaaacctctctgccataaagacagagaggttcgcaaaatctcatcataaataatcagagttttgtatgttcctcggcaggcgtttttgccttacaccttacggtacctgctgtctcagggcattcaatactgtggtatcatatcatattgtatgaatgatgtcaagccccattcaggcttatccacggtttctatccacggtttatccacgatgtttaaccacggcatacgcataaatgcgtaaaataaaccttcagatgaatggggttctgtgcttaaaagcactatattataacaatcaattagttcacaagctttgcaacgttcagcttaacgccgggacccatggtagaggtcagggcaacgctcttaaggtatgcgcccttaacggtgcttggcttagccttcatgatcgcatcaataagcgtctggaagttgtccgctaactgctcctctgtgaaagaagcttttcctactggcacgtgaataatatttgtcttgtcgagtctgtattcaatcttaccagctttgatgtcgttgatagccttggttacgtccatggttacggttccggcctttgggttcggcattaagccctttggtcccagtacacggcccagacggcctacaacgcccatcatatcaggggtagctaccacaacgtcaaaatccagccagccgtcgttctgaatcctcgggatcagttcctctgctcctacgtaatcagcacccgccgcctgagcctcatcggcctttggtccctttgcaaatactaagatacgtacagtcttgcctgttccgtgtggaagaacaacagcgccacgaatctgctggtcagcatgacgtccgtcacatcctgttctgatatgaagctctacagtctcatcaaattttgcggatgcgttcttcttcactaatgtgatagcatcagcaatgtcataaagtgcagcacggtctacgtttttcatagcctctgcatatctttttcctgatttcattctaaataacctcctagtggtattgacggggaatctccctcccacgttcatataacgggtaaatgccttagcaacccggaaaccttgctcgggtgtctccggattcatgcaccaattgtattattcctcggtataatttccagatatgattctttgaaattattcctcgatggtaacgcccatgcttcttgcagtgccggcaatcatgctcatggcagcctctaagctggcagcatttaagtctggcatcttagtctctgcaatcttctgaagatcagccttcttaagaacagctacctttgtcttgttaggaacgccggaaccgctcttgatgttgcaggccttcttaatcagaacagctgccggcggggtcttggtgatgaagctgaagcttctgtccgcatatacggtaatgacaacagggatgatcatgtcgccctgatctgctgtccttgcgttgaattccttggtaaactgaacgatgttgacaccgtgctgaccaagtgctggtccaactggtggcgctggtgttgctttgccagccggaatctgtaatttaatatatcctgttactttctttgccatcttaggcacctcctaaaattatgtggtattgtcgggaatgtccctcccaccagcccctgccctgcagaagctgattccttgtgttacaaacggacgcctacatcttcttgacttcggcaaatccaagttcaaccggtgtttcacggccgaacatctcaacgtgcatggtaatggtcttcttactgtcattgatggccttgatggcccctacagtatccttccatgcgccggagataacaactaccatatctcctacttcaaagtcgactaagacatcttcttccctatggaatcccaggctggccatctcttcttctgtcagaggaaccggtttggagcccggacccacaaagcccgtgacaccgcgggtattccgcactacataccatgtgtcgtcgttcatgaccatgttgatgagcacataccccgggaacatcttcttgtccgcctttttctccacgccgttcttaagctcaaccacagggagcatggggacggacacctctaagatctggtcctgaaggttcctgttttcaattgttttctcaatgtcgaccttgactttgttctcatatcctgagtaggtatggactacataccaatgtgcttctgacatacaatcaccctcgcctttatttcaatccgcattcgtttgcttaaattaaagaataaagctcaaaccaaacttcataacgaagtccaggacagcaatcatcacgccaatcgcaattgacatgaaaagcactgccacggtctgttttgccacggtttccttgtcagcaaagacgattttcttgtactctttcttcagcccgtgaaaaaagccaggctttttgtccttcttagctgccttcttttcaaccttgtcagccttggccgttttctctgtggtttctacagcgttaactgtattctcttccataatttcacgtcctttactgagcaggattactttgtttccttatgcatggtatgcttcttgcagaatctgcagtacttctttgtttccatacggtccggatgagttttcttgtccttagtcatgttgtagttgcgttgtttgcattctgtacatgccagtgtaatttttgtgcgcacgacttccacctccacttatattatcgtagttcacatttgccgctcaggtacttatttttgagcataaaaaaaagacctaagctcttccattcgcccgtttactataccatagaaatatccatacgtcaagggatttttgcggacttatgggatggcatcattgtccatggccgataaatatggtgacaaaatatacgtgctccgcaccggcttttctgaggacccgggcgcacgcctctatggtactgcctgttgtgtagatatcatccaccaatataactttttgcatggcggacggcagggcagccgccgtgaaggcctgctccagattctttaaccggccgctggaatccaggtttttctgcggggctgtctttcgttcccttttcagaacggatgtgtttacaggaattcccagcgggacggaaagacggcgggctaattcctccgcctggttgaatcctctttcccgaaggcgggacggatggaccggcacaggaataagggcatccccatccatggaccggatgcgttttcccattttcctgaccatggcttcgctgtagaaatccagatattctctcctattattgtacttaatccgggccatggaacggctggccgtgtcatcgtaattaataaggctcagtccataatcaaagctgcgtttatgtctggcgcagtcacggcagtattcgatggtctcatccaacacttcctttccgcactttttgcagacaggacgccgtacccaggacagctttgccatgcagcccggacatatgagatttcctttgggcaggacaatatcgccgcacacagggcagcggcggggaaacaggatatctgtcaggaaatcactgccttcctgaattatcttgaacggcaccttaaatggtgtcttaattggtgtcttaattggcgtcttagtctgtatctccaccacctcctgaattcctttttaactcacaatgcatcttcggattctcagccaatggaatccggctgcgcatatatctccccgatcctgcttttaagcccggaataccgcttttgttccacgcagtttgccgccatggtgtaaaatgcatccggctgtcccaccagacatacgcacgcgcgggcgcgggtcacggccgtgtatatgagattgcgggtcataagcatgcggggaccgttgtacatggggatgataactgccgggtattcgcttccctgtgacttgtggatggtgatggcataggctaattccagctcctccagctgcttgaagctgtactctatcatcttgccctcatcaaattcaacggtgagcagctccgcaaattcattgatttcccggataattccaacgtcgccgttgaaaattccggctcccttgtccacgggtataccggacttgttgcggacctcccactccatctgatagttgttctttatctgcatgaccttgtcgcccacccggtagatggtaccgcccgcctctttttccttctttgtcttgtccggcggattcaggtaattctgcataatctggttcaggcgctccacgcccagggcgccctttcgcatgggcgtcatgacctggatatcaaaggcattggcgtgtacgtagtcaggcagcttcttctgaatcagggtgatggctgcgcttatgacagcgtcgggattgtcccttcggataaagaggaagtcctggctgcgttttgccaggtcaacaggctctcctgcattgattttgtgggcgttgaccacaatgtcgctctgggcggcctggcggaagatgtgggtcagcttcaccacattgaagctgccggattcgataatatcccgcagtacatttcccggccccacgctggggagctggtccacatcccccaccaggatgagccgggtgcccacattcaccgccctcagcagggaatgcatgaggctgatatccaccattgacatctcatctatgatgatgacatcggcatccagaggattctcctcatttctgtcaaaatgcatccccatgctctgggctcccctgcctgaccttggaacgccgggaatcacaggggcatcattgccggacattcccaccgggaccagctccagcatacggtggatggtcctggcctcatatcctgttgcctccgtcatccgcttggctgcccggcccgtgggcgctgccagaaggatttccattccctccatctcaaaataccggatgattgtattgatggtggttgtcttgccggtaccgggaccaccggtgataaccagcaggccgctgttcacagcttcgtataccgccttttcctgcagttcatccaggtgaatggactcctgctgctgtattttaaggagattggccttgatttcggcctggggaatatcccccttgatgttcaggtcatgcagcatacgggctgcattgagctccagataatagtagtgggaggagtagaccagggcgccctgggcagatggctttaccaccacctttcggtctatctgcatatccatcaggtgcttttccatggcggacggctctacttttaaaagctctgatgcctggacaaacagctctgcctggggaagataggtatggccgttggcggtagccagaagaagagtgtacagaatacctgccttgatacggtaatcggaatccgtgaagattcccacccgctccgctatctcgtcagccatcttaaagcccactcccggaatatcatctgccaggcggtagggattctcccggataatcccgtacagggcgggaccgtactcctgatatatcttggctgccagatttatggtaatgccgtaattctggaggaacatcatggcctgacgcatgtccttcttgtcctctacctgctcggctatggccatggccatcttctcgctgacgccctttacttcggacaggcgctccggctcctcctccatgacccggaaggtgtctgccttgaaatggcgcacgattcgggcagccaaagcggccccgatgcctttgatggcgccggagccaagatagcgttccatggacagttcatcctggggtgtcttcatctcatagctttctatctgaagctgctccccgtacaccggatgctgggtcatatggccgctggcttctatcatatcgccctctgcggcataagccagattgcctaccatgatgacttcttccccgtcgctctgatccgtgacactcattactgtgtagccgttttcttcgttgcggaacttgatccgctctataaatcctgttattgtcgccatcgtttcatcaaaagtttaaaagaacccggtgccagggcgtgtccggagtgctccagtctatcacgctgtgccgggttctgatttttagtaatcttctcttccgccgcctactcccatggatgcctccatagccatattcatgccgtgggcaaactcaataaacttgccggtaccaatggccaccgcggtcagcgggtcctccgcaatcatggtggtgatgcccgtcttttcctcaatcagggcatccaggccgctgagcagggaaccgcctcctgtcatcacgatacctctgtcaaaaatatcggcagccagttccggcggggtgcgctccaatacattgtgtacggcatccactatctgcagagccggctctctgagtgcctccagagtctcgtctgaggtaaccacgatggtctttggaagaccggtcaccagattacgtcctctgacctccatggtcaggacttccggcctgcggtacgccgctccgatgttaatctttatctcctccgccgtgcgctcgccaatcagaaggttatgcttcttcctcatatagcgcaccagagcctcgtcaaagtcatcacccgcaattttgatggatgtgctgacaacaggacctcccagggaaataaccgcaatgtcagctgtaccgcctccgatgtccacgatcatattgccgcaggccttgccgatatcaatgcctgcgccgatggcagccgcaaccggctcctcgataatggccacttccctggctcctgcctggtaggtggcgtcctccactgcctttttctcaacctctgtggcaccgctgggaatacatacgctgattcttggcttgcgcagcgtcttcttgcccactgccttgctgatgaaatatttgagcatcttctctgtaatggtataatctgaaataacgccctgacgcagaggacggacagcaacaatattgcccggggtacgtcctatcataagacgggcttcctcaccgatggccatgattttgttggtatcgcggtcaatggccacaacggacggttcttttaacacaacgccttttcccttgatatatacaaggatgctggcagttcctaagtcaattccaatatcattggacatcatcgaaaacatataaatagttcctcctcgctgactgaaccggaccggacgcacacgctggtggcttccatgcctgtccccctatggggaccaaacgccgggacagaccgcatcaattgcttaaatataaatggttgcattgcattacttctatgcattgcttctattatatacaatattgtaaagttttcaaagggtttttttcttttttattttctttatgtttttttcatgccaaggacatattttcgtcacaattattgcttattataataacaagttcatcgagaggtggacgaggcctttgtttcaagtgattacttgaaattacaaagctttttcatactcataccggacggagtaatccgtccggcccccctataacattttcttttatatatacctaccattcccacgcaggcaatgagctatgcgaaaaaaagcagaaaaagaactggcgacgtattttacggacgccggttcttttttgccgtatcacataaattttctgcctgcatgatatcacaagcctgaatcacaggcatggtctgcgcagttctctatccctttacccccgctatatctgaactaaagactgtctatacttttccttatccgaagtataatcaactcgtaatgcaaaaaaggaatttcaaaaagtatttcaaaaagaaaaaggagagtgcattaattatgagaaagcagacaaagttagttgctgtattatcaacagcagcactgctcgctattggtgcatccatgacttctttcgcagctacaggatgggctgaggaagacggtacttgggtatattacaacagagatggcgagagagcaactgatcagtggaagaaatccggtaacaactggtattggttagatagtgatggcgaaatggctatcgatcagctgattgaggatggcgacaactattattatgtagacatcaacggtgttatggcagctaaccagtgggtagcgattgacaacgaggatgcgggacaggatgacgagccggaccactactggtactatttccaggccaacggcaaggcattgacccagggcgataatgacaaggtatccttaaagacagtcaacggcaaaaagtatgcatttgacgatgaaggcaggatgctgtttggctgggtagatgaaaacagcgctgagcgtgttgacgatacggacggcgacgcctttaaagaaggtacctactatttcggcggcgaagatgacggcgcgatgaccgttggctggttacagcttgatgttacctatgatgaagccaccaacgatgaatataagtatactgctcctgtgtttaacgatgatgaggaccagacccgttggttctacttcaagtccaatggcaagaagatttatgctgaagacggagaccgcaccaaagacaagactatcaacggcaagaaatatgccttcgacgaatacggcgctatggtagctgagtggtctctggacgaggaagatctggaaggcaagagccttgcttcctattctgacgctgtaaaatccggaaagattgatgcaggaaaagccagcgctaatgacattgtaaccggcaaggcctttaatgccaagtacagtgaggcatggaaatacttcaatagcgttgaagacggcgcccgcgtaagcaagggttggttcaaggtagttcctgccgaatatctgaatgacgaaaaatacaatgatgatgaagacttctggtactatgcagacggcagcggcaatctgtatgccggtgagttcaagaccatcaagggcaagaagtatgcgttccgcaatgacggccgtatgattgacggactgaagttcatctacgaagacaaggatgcccagagcctgactgtatgggctgatgatgatgatccttacagatttgactccgaggatgactttgatgataatgctcctctctatgaggcagccggatattactgctactacttcggtaacggcgatgacggtgccatgagaaccaataagaccactgttgagattgacggagaaaacttcaacttctacttcgagaaatccggcggcaagaagggtgccggcttaacaggcgagaaggatgataaattctatcagtccggcaagcttctgaaggctgacaccgatgacaagtactctgttgtccagagacagttagtcaagaagacaaacggagccatcaacgacactcttgatgtggttaccaccaaagacagcactacaaccgaagtttataaagtgctggatgatgttgatgaattactgacagtggccaaggatgcagatgtcgacatcttaacaattgacgatctcaactcaatggaaaaaggcaaggctgactctattctgaaggcagcaaacatcaacaaggatctggaagacctgagagaggtttatatctttggcaaggatgagaacggcaactttaaggcatctgagttagataccaaagactacttcctggtaaatacatccggtaaggtacttgacagcaagggcagacataaagacggcagcgattactactatgcactgaccagcggcggtaagattgccggtatctatgtagaagattaatcaaaactgctgtaaatggatactgcagattatataacttagcaatataagggggaagcgttatgactgatattgattattgtcataacgctttcttttattatctaattcataatgacacaggaggattctattttgttcaaaaaaattgcaatattgggaatggccctgatgttaggcctctcctcttccactgctgcctttgcggaccaggcagaaacatccgccacaactatggagaactgcggggcttatctttttgaatggagacccgtggactgcggcgacggacattattttgccatattagtaggcggaaatactataaacgaaagcaatgtcatcttaaacaggggctatgattacccttacacctttgactatacagttccgcgtccatggggcgaggtcccccagttagttaatatagacggtgtctggggtattcctgaaaactggggtatccttcccgaaggcagccagcccacactccgcatcacgctcattacaaataataaaatacttcccaccaaggaacgttacattgacgtagtcagcctgccgcagaatattaattccagggacctgccggccgaagtccggaaatatctaatcaatgtggatggttctgacgccggtgcctacgacggcaccaccacagccggttgggaggaggaaaatggtttatggcgctaccggaaatcagataatacctatgtctcaaacacatggctcaaactggatgacaaacaatactacatgaatgaacagggaatcatgctggccgacaccattactcccgacggatattatgtaaacgcaaagggcgagaaaaccggttacaaacctggctggctccaggacggcgcaagctggaaatatgtgagaaaaaacggatattatgcagccaatcaatggattcaggacacggatggaaagtggtactattttaacatggcggctgtcatgctggcggataccaccactccggacggctattacgtggatgccagcggcgtatgggatggccagccagcctctgctgtcataggcggtgaaaatcccggaccaggagtggacacagcttctcatactgaagaataattctgctttttctactgaggcactgataagcggcaatcggggtattattttgaccctcctctgccgcttatcattttatccgggagttagacatcttccttctatttgtctatacttttgtgtttagcgcccaatttttatgaataatttacagaaatctgttcatcaatagacaaataaatgaaactgtatatttatttttgaggaatcctgagctaatatatttgttaaaaaatgaaaggagcaaaattgtaatggaacccatggagtccccgaatttcttagaacatgctgaacctctggatgaaaatacccctcattatctcaatgcttttcacaaatatctaatccagcataacatgtcccctaatacgatcactgcctacatctatagcgtaaggcatttctttacatactttgaacagcttaattccaacaatgtcagcctatacaaagtatacctcttagaccattatcagccccagacagtcaatatgcgcatccgcgccctgaactgtttcttaaaattccagggcatcagtgattataaaatacgtgccctccggctgcagcagaaaaaatatacggactacattataagccaggctgactatgagtatctgaaacgccggcttcgtgaggatgaacaatataccttctattttatcatacgctttatcactgctaccggggtccgtgtcagtgaattggtttcttttcagatagaggatgtgataaacggctataaagacatctattcaaagggaaataagatgagacgcgtctatatccccaccgctttgcaggaggatacattccagtggctggaagctgaatgcagaaaaaaaggacctctgtttctgagccacctcaaacgaggtatttctgtctctggcatccgctcccagttaaagacatttgcataccgctaccatcttgacccgaaggtagtatatccccactcattccggcatcgtttcgctaaaaatttcattgaaaatggcggagacatcgctttcctgtccaaccttctgggccacaccagcatcgaaaccacccgtatctatctgagacggagcagcacggaacagtcccttattgtgaatcagattgttgactggtaatggaatgaaaggtgcgctcagcatgaatacaactatacaagaaaaaaatgaacctgcctttcatgcatacctgaaaaaagcccaggcttctcccaatacgatccgcagctgcatggcagcctgcaggctttattattccctgtatgatgacctgactgtcaatcatctgatttgctttaaggattatcttattaatcactacaaagcagccacggtaaacaatcgaatatacggaatcaaccggtacctggactgccttgaagagctttgcggcggccaaatgattcacttcaggctgaccgtcatccgtacccagcaggcagcctttctggataatgtcatttcccaggaagattatgagacatttaagaaaatgcttaaggacgacggaaatctgctgtggtattttgttgttcggtttctggcatgtaccggagccagggtcagtgaactgatacagattaaagcagagcatctgcatctcggctatattgacctctatacaaagggcgggaaagtgcgccgtctccattttcctgatgccctgtgccgtgaagccctggaatggctggctgcaaagggacaggcttccggatttttatttgtcaaccggaatggaaaccagatcacctcccgcggaatcagcagtcagcttaagacgctggccatacgctgtcagattccgcctgaaacagtgtatcctcactccttccggcacaggtttgctaaaaacttccttgaaaagtttaatgatatctcccttcttgccgatttgatgggccacgaaagcattgaaaccacccgcatttaccttacaaaatcaacgcaggagcagcgtgaactgattgacaaaatagttacctggtaatgtttgccggcattatgccgccgcggatatcgggaatccggcggtcacagcaggccgccccatatcgcccgcctcctccggggaagaccaagggcaataagatgaggcatgcctatattccccgcggactgattcatgaactgcaggaatggctggccgccgtccaccgaagcaccgtcccctgttcctcagccgttttcacgctcccatctccccatcgggcatacgtgctcagttcaaggtattcgcggtacggcctggacccagaggtcgtgtatccccactccttccggcaccgttttgccaaaaactttctgacaaaattcaatgatatttcccttttggcccaccttgtgggccatgagagcattgagaccacggaatctgtctgacccgttcttccgatgagcagagagagcttattgacagaattgtcacatggcagattgcatttttgtgaaaaaaacagtatcatagaagaaactcggaaaggatggtttatatgtacgaatatacctggtatcaatggcttacgttcttttttatatactgctttttcggatggatttttgaatccacctatgtttccgcgaaaacaggccgctttgtgaaccgcggtttcctgcgccttcccctgctccccctttacggaacaggcgccgttatgatgttgtgggtatcccttcctgtgaaggataacctgctcctggtatacctgacaggcgtcatcgccgccacccttctggaatacgtcaccggctggggtatggagaggctgtttaagatgaaatactgggattacagcagccagcgatttaacgtgaaaggatatatctgcctcagctcctccattgcctggggttttctgactatctttcttacagaggtggttcaccgccccatcgaacattacgtcctgggcctgcctgtcatggtcaacattgtttttgtactgataacaaccctgctgtttgcagcggatacggctgagtccgtaaaaaccgccctggatttggccaaggtgctggatgccatgacagacatgcgggctgaactggacgatatacaggtacagatggccctgttaaaggcagaaaccagcgagcgcgttgccgaggccagagaggaagcggctgccaggctcagccggttgaagtcaggagctgccagccatgcggctgcgtttaaggatgacacggccgaacgcctgaatgaactggttgagaacaccatggagaaaatgagcggattcgtggagggtaccgccgaaaagatgggcggtctggtggaaaacacagccgaaaaggtggcccggacagcggaacggctgtcagagcttacggaggacgcggctgccagggtatccggtacgctggcccagcgcacggagggagcccagcaggcaatacagcgtgacgagcttaacaaaggtatcgtccaggagcgcagggacaaactggccgccctgtcgcagcgccttgtatccatttccgaaaaacgccatatgctgtcaagccatatggacttctaccgcagaggcatactgaagggcaatcccaccgcctcctcttcccggttcgcagaagcgctgaaggaactgcgtgaaattgcggacaggaaggacccggatgaacgtcatataaaatagtattctgttttttaaccaaaaataccctaatagtttgacacagttgtattttctgcgtcctgctattagggtatgttttattccataattattacatcatcttatccaccatagccatcacggctgcgcccagtgcctcagacctggcgtcggcatcctccatggagctgcccttgataccatagtagaacttaatcttaggctctgttccggaaggtctcacacaaatccatgctccgtcgtttaaatcatagtacagcacgttggaggaaggaaggcctgtgggctttacttcaccggcagccatatcctttatggtgtccagcttgtaatctctggcggacactaccttgtagccgcccacctcttttggcgtattattcctgagtgtctccatgattgactgaatcttagccaggccctcgatgccggataagccgatagacttgacagcatccttgtaatagccgtacttctcatacatggcaaccatggcatcccacagggtcatgcccttctgcttatagtaagcggccgcctcgcaaagggccgctgtagcggaaatggcgtccttgtcacgggcataggtgccaatgaggcatccgtagctctcctccataccaaagaggtaagtgccgtggcccgtcttttcattctttaatacctgctgtcctatccacttgaaaccggtcagcacttcaatcagttcacagccgtactcctttgcaaccgcatcaatcaggttggtggagacaatggacttgataacctgcccgtcctccggaatcttgcctgctgcttttttctggctcagaacatactcgcacagaagggagccggacatgttgcctgtcagagggatgtactctcccgatgcagcgtccttcacgtatacgcccagacggtctgcatccggatccgtagccagaaccaggtccgcatccttctccctggccagcttaaggcccagggcaaatgcttccgcagcctccgggttcggatagcttaccgtagggaagtccccgtccggcagttcctgctcaggtactacatatacatgggtgaatcccagttccttcatcactcttctggccggaatgttgcctgtgccgtgaagtggtgtgtacacgatgctgatctggtcctgcatctcgtcaatggccttctggttcacgacctgggccttgacctgggcaatatacttgtcgtcgatttctctgccgataacctcgtacttgcctgcagccgcggcagaagcctcgtccgtggtctttaccgtggacaggtcctctatggccagtacctcctctgtcacgcccttgtcatgaggcggcgtaaactgggcgccgtcctcccagtataccttgtatccgttgtactcaggcgggttatggctggccgtgatgttaataccggctatgcatcccagttcccgcaccgcaaaggacagttcaggagttggacgcagggactcgaacttgtatgccttgattccgttggccgccagtgtcatggctgcctccatggcaaattccggagacatatggcgggagtcgtatgcaatggccacgcccttatctgctccgccctgcttgatgatgtagtttgcaaggccctgggtggcacgtctcaccacataaatattcatccggttaatgccagcgccaatgacaccgcgcagtcctgctgttccgaactccaggtccatataaaaacgctctttaatctcgttttcgtcaccttcaatggcgcgaagctctgcttttgtgtcctcatcaaaataggggtttgataaccattcctggtatatcttcatgtaatctttcattttatactccctcctgaatgtgatattccctgcatgacctgccggcattcccgctgcagcgcaggccaaagggccggtccgcagcgtattttctgattaagattatactatatcaaaccagaaaaaggaagtacaacccttattatttttcgtcaaacacagccttcacagtccgctttcaggcgcttcaggaagctgttcctggcctgctgctgttcctccaggccccgcagtttgtcggtgttgcgggccggtatccaggccttgttggcgttgtagtaaaagttcagctgcttccagtatttttcaggataaagaaacaggtagtacaggcatcccctttccttcggctccatgggcagcaccctttcatatgaatccagcatggacaggcccaggtccaggttccatccgtgcttttccatgaccttgcgcatgaaacggtacaggtccgatatctgtattccaagatgcatccggttgtactcaatgatagctgtgtagctgcctcccatgagcacatggtgctggtccagatccccatggcacaggtacaggggcttcctgtccttttggcctgggggctggacctccgctgcttccagggcatcctggtcatcctggtacagccccagcttcaggcattttccgctgccgcacattccgtttcctgctgccggctgccggcggggttcgggccataattcccgtataccctgtaccgcttccagggcctggtcgtaaaacatctgatagctgccaatgacgcacagctcaaattccgacttcttgcgtttggatcttatataattgcgggcccgctgcatttcccggttgtgccgctccagctcttcctccagaggacctgagaggatggagcccatgctccactcctccttaaactcaatctctcgcagctggctgtgcagcatagccagccgggacagtgcctggcgtatttcatagccgtcctttatattgcattcccggtccaaaaaccaatcctttaatatgtatctggtgccgtcgctggtcacggtcatcaggtcgccttccctgtttctcaagtaccggtcagccctcagacttcccctggtatcaagccgccccaggacctcgtcctcaaactccagacgcctggctgtcccgcggtattccttcaaaagcctgcagccctggtctgtctcacatatccaggagccgcgtccctttctcacggttctgacttccatatcatactgttctaaggcttccacgtacttctcgttcatccacaacccctccacactcttatcccatcacatttagtcgaaacgggaagctgccgtttcagctacttctagggtatgtaaagatttggttgtttatgacaggagaaatggaggaccgggttcaattcccattttgtgtatagtgtacaaaccattcccgccgtattgcccacatcatgccgaaatgtcctgatatgacagtaaagaaatgtgaaaatgacaacaattcctctgaaaaagcaatataataattctgtaaatatttacaaggcacacaaaggaatgaatcatgagctcatatatttttgaaacagtggaatttgaaaagaaatatccggttaatgcgtttgtggcttctatccagagcagcagtttccattggcactacgaatacgaactgctggcagtactgaaaggaagcattacggtcagagtcagctccagggtactggtccttaaaaagaacgatatcatattaatcaattccaaaagcgtgcatgaaattcaatgcgagcagggagacaacctgtgcatggttctgcagctggacccggcgttgtttaagaatgaaaagggggagaccatcttctaccgcttctatttaaacagtgtgaccgatgaactgcctgtgagaggcggatatctgcattttgtaaggagggctgccagaatcgtactgggctcccttaaaaaggaggaggaaaaatcatactaccgcgtctgcgccgaggtatataccctgattgccgatctgtttgaatatgtggagtatgacatgagcatgcagacaggacagtctgaccatgatatcactcttctgatggagatcatcgattatatcagggaccatgtggaggaccgggacgtcttaaagcacctgtgcagggaaatcggcatgagcagcaagaccgtgtaccggtatcttaaaaatcatgtgggcatgtcggttaaggatatggttgacacgctgaaggtggataaggccaaaaagcttctcaatcacacggagaaaaacatgaactgcatcattgacgaatgcggatttggttctgaaaacacattttaccggattttcagacagagcaccggactgacccccagggagtaccggcagaagggacttgaacagaaggacaacggcatcctgaagggctatctggattttgaagaatgtgaggctgaaacaatcatactggaaatattggaggaacagaaataatggattacagcaaggaaaacaggctgtcctatacagaaagggcccgccgtatcgtggattccctaaccctggaagaaagggtctccttaatgagcggttccatgacgttcgaggaagtaaggggagccatcaagaagaaaacaaaggaacactataatcattttccctaccccgcaggaggaatcccggaaaaaggaatccccgccgtccttttctgcgacggtccaaggggcgttgtctgcggcaatggaaaaagcacctgctttccggtgtccatgctgcgcggggcttccttcgatacggacctggaagaagaaatcggggaggccatggcagaggaggtactggcctacggagggaatctgtctgccggcgtatgtatcaatcttccctacaatcccggatggggaagaagccaggaaacatacggcgaagactccttccatctgggcgagatgggcgccgcccttgtgcggggcatacagaaaaagggcgtcattgcgtgtgtcaagcattttgccttcaatcaaatggaaaatgcccgtttcaaagtaaatgtggactgcaccaggagaacggagcgcgaagtattccttccccacttcaagaaatgtattgaccagggggccggagccgttatgagttcctataacctttacaagggggtcatgtgcggccataacggatatctgctggaccaggttcttaaggatgagtgggggtttgacggtttcgtcatgagcgactttgtatggggtgtgaaggatacggcggcggctgccaacggcggacaaaccatggagatgtgtgtcaccaaatactttggccagaatctggtaaacgcggttaaggaggggctggtggatgcgagcaggattaacgatgccgccctgcgtatcgtgcgcacacttctggcatttgaggataaaaaagaacatgtaagacctaatgtgattgggtgcaaaaaacacacaatgcttgctctggaatcagccagggagggcatcaccctgatcaaaaaccaaaaccaggtgcttccccttgacaagaaatccaccaggcaggtggtggtcctgggacggctggcacaaaaggaaaatacaggtgacagaggttccagccaggtgtaccctccctatgtggtgaccgcagtcaagggaattgccgcggcatcccccaaaacagaggttatctattatgagggcagcaatccggagcacagccggcacctggcccaggaggccgacgcggtcatatttgttgttggttatgattataacgacgaaggcgagtatgtggctgaggacagaaaggatgtctacaccggcgcagtgggcggcgacagaagaaacggactgggccttcacggcgcggacaggaaattgattgaggcggccggtcctgccaacaaaaactccatcgtggtcctcatcggaggcaacatgattatgctggaaggctggaaagaccaggtggcgtccattctcatgggatactatccgggtatggaaggcgggacagccctgggggaaatcatttacggcgacgtgaatcccagcggaaagctgccctttgtgattcccaatagggaggaccagcttccgtccgtggactggaacggaaccacccagtattacgattattaccatggatacaggaagctggacaaggaggaaatccgccccgcagtaccttacggctttggactgtcctataccacattttcagtggaatgcatgaaggcctggacagcagacggtctggtatatgcctgctgcgatgtaaaaaacaccggcggcagggaggggacagaagtcttacagatgtatgtgggtttcccccagtcaaaggtagaccgtcccgtccgaacattgaagggatttaagcggagcagtctccagccaggcgaaaagaggactgtcgttatctcctgtcctgtggaggaactggcctggtttaatgaggaaaccggttccttcgagacagagcatatggaatatgagatttacatgggcaccagcagcgcgccggaagacctgctcatgacaactattacaatatagggggaaatcaagatggaaaacaaaccatccttatgggagaaacttgcctttgccgttggcgacggaggctgcaatttcgtttggaccaccattggttcattcctgacattatattacacggacagcgtggggatcagcgccgctgtcataggcaccattatgctgctgacaagacttcttgacggggtaacggatctgggtatgggggccctcatagacaggacccgcacacgctggggcaaagcccgcccgtgggtcctctggtccgccgtacccatggggctggggctggttcttctgttcaatgttcctgcctccctgggaagcagcggaaagattgcatatgcagccattacatacaccctaatggcggctgtcatctacacggcctgcaatctttcctacaacacccttctgtcactgacagcgcccaacccaaaggacagggttctcatgagctccctgcgattcttctgcaccatgggtgttgttcttatcatcaactacaataccatgaacctggtggaacgttttggctggaatgggatggctttcgccttcggagtcattgcggtagtcctgctgctcattaccttcttctttacaaaggaacgctccatcgcgggaatatcgggaaagagtgagaaaaagattcccgtgggccagtctttcaggttattgttcaagaataaatactttatatttgtcaccctgatttttgtcataaattatacagcccttggtgtcaacaacggtctgcgcatcttctatgccagggatgtccttggcaatgcagggctgatgggaacgctcaccttatgttttatcctgcccaaaatgattggcaaccttctctatccccaaattacaaggataatgggaaaatggaaaagtctggttctgggatacatcctggaaatggcaggagtagccgtcatggccctcacaccttcctccctgggcactgccgtggcgggcctggtactgctgggaatcggaggcatcccccatacggcgggcctgtttgccctggtagctgacgtaattgattacggcgaatggaaaaccggggtccgcattgacggcctcaccaattccgccaccagcttcggcatgaaggtaggagccggcctgggctctgccatcgtgggatggggactggcctggggaaattacaacggcaggctggctgcccagacagcagaaaccgtgtcagccatcaaaatcctgtttacggcagttccctttgccctgttttcagcggggctgataatcattatgtttaccaatattgacaaaatataccctcagatttccagggatttggcggcgggaaggtctgaggccggacaataggcttcccgcccgaaaacacccccggagcagtgtgaattatcgtaatataattcacacgttccgggggtgtttcacttatctttttatttatctgtttgtctgtctattcatccttccagtgcaggtggtgaagctgaccgttcagctccagcttgccgaatccattctgtctcaacgcctcgtacagcacgatggccgcggaattggacaggttcagggaacggatatcgccccacatgggaatccggatgcaatggtcctcattgtccaccagaatctcctccgggatgccggcgctttccctgccgaacatgagatagcagtccggcctgtaggacacatcggaatacaccttgtgggctttggtggtggcaaaatacatgctgccccgggcctggggattgcgctccaggaagtcctgataatcgctgtacacagtcacgttcagtttgtcccagtagtccagccctgccctctttaatgccttctcattgagcttaaagcccaggggctcgatgagatggagcctggtccgggtggcaacgcaggtacggccgatattgcctgtattggacggcatttccggttctaatagtacaatattcatcatggtatgctgcgcctttctgctattccccgccgtccagtcttttcacgaaccttgccatgcgtcccagggcttccttcagtttatccagggagtaggcataggaaactctcacgaatccctccccgcagtccccaaatgcggtgcccggcaccacagctaccttttcctcttccaggaaccgggtggcgaattcctcagatgtcattccgaaacggctgatgttggggaaggtataaaacgcgcccatgggctcaaagcaggtaaggcccatctcctcataggcgtggagaagaaaacgcctgcgctgattgtaggattcccgcatcatggccacgtccggatccccgttcttcatggctgacacggctgcgtactggctggtggtaggggcgcacatgatggcgtactgatgaatcttcagcatctgctccagaatgatatggggagctgcggcatagcccagacgccagcccgtcatggcataggccttggagaagccattgatgagcacggtcctctccttcattccggggaaggatgcaatggtcacatggcgcttgccgttgtatgtcagttcggaataaatctcatcagaaatcacaaacagatccttttccaagacaatatttacaattttttccaattcctctttttccataatggcacccgtagggttgttggggaagggaaggatgagaatctttgtcttgtctgtaatcttctccagaagcttttccggagtcagcttgaactggtccttttcctccagctcaatggtcacgggcacgccgtctgccagggtaacacagggcatataggacacgtagctgggctggggaatcagtacctcatctccctcgtttaacatggccctcagggcaatgtcgatggcctcgcttccgcctaccgttaccaggatctcctggtccgggtcatatgtagcgccgcatctgcgctttaaatattcgcatatctccactttaaggggctttaagccggcattggaggtatagaaggtacgccccttttccagggaatagataccctcctcacggatgtgccagggcgtctcaaaatccggctcgcccacgccaagggagatggcgtccttcatctcacttacaatatcaaagaatttacggataccggacggcggtatctttacgattttatctgataatgggtttctcatggagtaatcagcatcctttcatcctgcacctgctcactgataatggtgccgtggtctttgtattttttcaatacgaaatgggttgcagtgcttaatacggattccatcggtcccagcttgtcggatacgaactgggcaatctggcgcatggttctgccctcgatgaacacagtgaagtcataggctccgctcatgagatacacggcctccacctcgctgtattggtaaatgcgctccgctatcttgtcaaagcccatgcccctctgaggagttacctttacctcgattaacgccaccaccttttcctcgctggtattatcccagttaatcagtgtatggtatccgcagataatgtgttccttctccatctccgctatctcgttggccaccgctatttcgctttctcccagcagtatagccaggtccttaaggtcgattctgctgtttttctcaatgactgcaagtatcttttctctcataatatatcatcctccatccttccatgtttatatagcttcttagctgtctcatattatctttgtcagttcatcgggctggggccgctccaaaaatccggctccctcctgtccatggcgtatctgcctggcatttccatccgccacacttccgatgacgcccgcgggaattccctctgccatgagccttctcaccagctgccctcccctgtccgaggccaggatggcgcagtttccgctgtacagccggtagggattcagttcaaacagctcgcatatctctaccgttacctgccgcataggcatacttctgaggtccacatcaatgcccgcgttaaatatccctgataaattccaaagggcagctaaaacgccgccctctcctgcatactcgtaagcagtgaaggagcagggctccttcttctgttcacgttttatccattgttccacggagtatggctccgtttcatccagacaccttaagaacacaggcgaaaagcgcccattgagcacatcccgcttttctgagcctatctttacagtccccgcaaatccggcatgacctgccatcaccaaatcctgacccggcctcatgaagccgtcgcgcttctcaaatccgcctggtccctgtccggccgtccgcattatggtccctccaccggggtgaccgtggggcctcccccggccggcgccggatttgcagcgggcgccgggttcgctgccggcgccggatttgccgctgccgggttcgcctccggggccggggccgcctcagcagccggctgcgtcacgcccgggcctccctccacaccggtaaccggcgctgtctcggccggggctgtatccacgggcgccgtcacatccggcaccaccggcaatgccaccggcagatcaggacctacccggtaaatggccttggatgcattgtaggtgtccttgtttagcagggttctctcctgctccacaccgtccacagtcactaccttccataatctggatctgagtcctgtatgggaggactggaccttgacccttgctcccggagccagggtgttgtctacaatgagctgaggctcgcccggactggtgcttcccagggtctcagacacgtattccaccttgcggttggccggccttgtctccttgccgtatatggtaaaggtaagcttcctgccggaggtatacccttccacataaataggggtactgtaattgttctgtatcttaatatccttatatgtgcctgcaatggccgcatccctggatggtttcacataggtgacaatcatggagtggttctgtctctggacaatctccacctccgcttccagggaagcgttatacagagtggtagccagctggcacacgcctcctccgatactgtccaccacctggccattctcataagccgccgctgtcttatacccgttggctgtggtaaaaggctgcaggcattcatagcctgacaggacatcccccggcattagcacatggccgttaatcttagccgcgcctactgccaggttggtggagcgggctgcgccgctgctgctgaaatcagttgtatatgtgcccagcacatcctgtatggtggccagggcttcactggtaatggccggctgttcttctgttacctgggccgttacctctatgggcttttccagaccggcttccagtgcctcattcagggctgcctccgttcccgccacgtcaaccacgcgtccgggcacagagtccgtaatgacaaactgtccattttctctggttatagatgcattccggggctccgccgtgattccctggcactgtgtatccacaaaggccttcaccttagcggaatccacctctgtctccagttcaatatccacgggcgccgccgccagatctttttcaatcatatactgtttaatcaggctgccgccggcatactggccggccgcctcatcaattgcgtctgtgttaatccagtgaaagcccagctcccccgccgtggtggccacgtcctgtccatccacgctaagggtcactgactgggccgccaggccgtccacatattcctggaccgccgccttcgcctcctcagccgtcattccggccaggctctggctgcctgcggttatcccggccggcagcacaggcgccgcccaggcaatcactggaaatgccgcaagcagcgccatactgatgaccgctgtcaggccggcattacctatacgattcctcataaattctcctcttccaaactgtaatgcaattaatacataagtgcgcttaaggccataggaacaatcatagccagcactaatacaacaacaatgatggtggaaatgattttcttggtccttggatctctcatattaagcattgtacattcacctcttttaataatatacctcagaatctcttctttagtctttctgttccccggatattcttctggtcatccgtccgtaccgggagataatattgtcaatcatccgcgacacctcaccgcggctcatggcgtctatctgcacagctatgtctattctatgacattttaacaaatcgtgcaagtattctttttgcctttttgtgggcggctgctctctttttgccttataaatcaagggttttgccgcaaaagcctccggatgctccctgccatggcgggccatcatcgcctgatacagtccatgagccgcctccgcgtccgcctgggcccggtgggccgtggactgagaaacctcataaaaggagcaggcgcaggtcagattccgtttcacatccgcgggcataaacagacggcagatgccaagggtatcaatcccctcccgctcaaaatccagcccgctgttcaccgccgcccgtttcaggaaagcataatcgaacaatatattatgccccagcaaaggcagatttccgcagaaccggaccgcatccccaataatatcctcaatcacaggagcgtccttcaccatatcatccgtaatccccgtaagctccctaatccgctctcccagctgccgcataggattcaccagagtgacaaacctctcctccacccggccgtccaccaccctcaaggcggcaatctccgtaatcttctccagcctggcctccaatcccgtagtctccaggtccagggctatgtatgaatttgtcatatcttcctctttccaataaaaaataaacaccgcaaaaccacatgaagccgtattctaaaacaaacctcatatttatgacccattctactacacttatggaggaaatggaactggaaataatagaatacaaagaaaacattcaatcacctgccatccgtcctccatccccaaaaccggatatctggcaagcgcgtccttcacatccatgaattcatatccaacccggcgtatgtcctcctgggacacatgttccggattcactgcataggtaatggtaaacctgccctcagaggagctgtgtatcatgtgggccggtaccatggcagaaccgggaaacgcccctttttccatcagctccatggtatagggcgtccccctgtagccgtaacggcgtatgagcccgtccacctccggattctcgccaaacccctttattcccggcgcaatgaccagtaattccccgccgtcctcgatcatcatccgtgtgcggtaaatggccttgtttcccacccaggtggtggagaactcctccggctccagataagccaccaccttttttgcccggcgttccacctgtgtgatgcagcgtctttttgccaaagcagccgcatgttcatagacctgcctggacgcgccggtaaagatgccgtgaagggcgggcctccccaaagaaccggatctgttccccacggctcatggccctgtgggtccccaccgcaggcataacgcgcacttcggcctccatgctcagacggtgatacagataggaggtgataacacccccataggaataacagcgtgtgatatccggcggcactaagaggatacgtccggccctcggaagtccctccagcatgtaatccagtacgtgctccgcctgtttcctgtactgtttcgtgaactgtcccgtaaactgtttctgactggatggagcactacttcctatgcttttccctgctgtatatgagtaccagcagtacgatgataacgccctgcataatctgacgccctgcctccggaatattgacaatggtcagaaaatcatccagtatggtcatgataatggcgcccgctatggttccgatatatccgccctttccgccggtaatggcggttcccccgatgatgacggccgctatggtctttgtattgtagctggtacccacatccaggaagctggtacccgtgtatcccaccaggaagaaaccggagacagccgctatgaccgcggatatcagatatacggaaaatgtcacccttcctgtgtgtattcccgaaaacctggccgcctgctcattggtgcccacggaatatatcttccttccatagggagtattccgcaaaagcacaatggtcacggctgccatgacagcccatatgaccacaataccggagaggatgcctatgaagctctggccgcagacagcctttagaagtggggacgcattgcccttgggggcgccttttgtgtaaataagaaacacgccctggatgaccgtacccacgccaagggtcatgataaagggcggtatcttaagccagtggattcccactccgttgataaatcccaccattgctcccatgacaataaccgccaaaagcgcggcggtcaggttttcatcccggcccatcatgatctgggccgcaatcacattggcaaacgtgatggtattggcgatggataaatcgattcctcctgtcagtatggtcaggttctgtccgattgcggcgattcccataaaggaggccagcctcaggattccggccacatgggtgggctttagatatcccggagacataatctgggccgccagcagtaataccaccagtataacataaaccataacctgtgaactgcctgcgtttttctgaatgaactgtagcttggaagcctgtctgctcttttcttctcccattttctttcaccttacctttctatccttaaataataagtccccacagtccctaacgcctcttatgcagcgcgctgagcgacagggctgcaatcagtatcaggccctggcatatgaactggtaaaatgaagaaacgccaaacaggttcagcatattatttatgatggaaatgatgaacacgcctgctatggtccccagcgggtcccccaccgcgcctgtcatggcggttccgcccaccaccgtggcggtgatggcgttcatggcgtaatttttgcctatagtcgcatcggcggaattcatctgggcgcttaagaatattccggccaccgcgcacaggagtccggccagacaataggcccggaattttatctttcccacccggatgcctgtggagtaggccgcattttcactgcccccaatggccctcaatgccttgccgtagggcgtgctgttggcaagacgtctcgccagacagaggatgaggataaaaagaagaaagggagccgcgccggaatatccccgggtcaggaatttggcaaaagccttatgtacacttccccccggattgggcatgagcagtaaagccatgccgtcaaatacggctgtggttgctatggttacaatgatgggggccagacgccctttggtgacgagaacaccgtttgcagccccgcaggccagccccaccgctgccgctgcccccagggcaggaacaaacccccaggcagagtccgggttcatggacaggacgcagaccacgttgcacagggccacgattcctcccagggacaagtcaatacctcccgtgagaataatcagcgtctgccccagggcagccatcagtagcggaaaggaagaacgcagaagattcttgaaattccccagagtaaaaaagtccttattaaatatgcttacaaaaaccatgagagctgccaggaatacatatatgatgaccgtatgaccgtgtttgtgccagaaattcttattcatcctgttcttcacccttcctcaccttccttcctgttctttcccagccccatgcccagctgcatgattcgttcttctgtcagatcttccttctccaggataccggatatccttccctcgtacatgacaatcacccggctgctcatgccgattacctccagcatgtcgctggagttcataactaccgccacgccctgggccgccaggccgtgcatgatttgatagaattcccgtttggcttccacatcaatgccgcgggtaggctcgtcaaagagaatcaccctgggctccgtggccagctccttgccaagaaccaccttctgctggtttccccctgagagactggatacaggcaggtccagccctcccattttaatggagagctttgacaccatggactcgctgaatgcctgttccgcctttttgtctatgaaacatcccttcatgcgctttttcatactggaaatggacaggttgtgacggttggaaagctccagcatcaggccctggttcttccggtcggagggcaccagggcaattccgtttgcaatggcctgtcccgcgttctttattcccacccgttttccatttacaataatctctccctcagacaggggatagagtccgctgacagcattgagcagttctgtctgtccgtgtccctgcagtccggccacccccagtatctctcctttatgtacctggaagctgacgtggttcagcttatggtccgcatccgccaggttttttacctcaaatatgacctggctgtggtctgcctggcatacagacggagggaatacatgattcagggaacgccccaccatcatgcgtatcaaatcatcctcatttatctcgttcatgttcctggtcccaatataacatccgtccttgaatacagtaatccggtggcccagctcaaacagctcctccagacggtgggaaatgaaaataattgtctttccgtccgcaatcagattgtggataatctgatacagctgctttacctcctttttcgccaatgcggaagtcggctcgtccagaataatcagttccgggtccctgaccagaatcttaaggatttccgccatctgctgttcagccaccggcaggctgcccacagtggcatccggatcaatgtggattccatagcggtccataacgtccagaatgcgctttttgatttcccttctgttgattcttcccagacgggtaaccggctcctggtttaaatagatattttcccagaccgtcatttcccccaccagcgtcagctcctggaacaccatggcaattcccagtttctgggactgctcaggattccggatttccacctttttaccatgaaaataaatctccccttcatccgcctgatggattcccgcaagaatcttaagtatggtactctttccggccccgttctccccggccagcacatgtacttcccccttgctgcaggaaaactgtacgatggaaaaagccaggggactgcttgagaataccaacatgaaaatgtatgagatttcatccagggtaggatatgaaaatgcggcctatttcagcgccgcattcaaacgatattatggaaaatctccctctgagtaccagagccggaggtagggcggacggctggcagggagaaaaaatttataaaatcttacgcctccctgcccggacattcctcccgcagaaagcattcacagcatttagggcgcctcgcaacgcaaatggtacgccccagggtgatgatatgtatgttccacagaatccagtggtcctttggcagcaccttcatcagagcatactctatcttctcgggatcctcctcttttgtaaggcccagcttcctggaaatgcgctttacatgagtatccaccacaatactgggctcgttgtatatgttcccgcgtatgacattggctgtcttacgtcccacgccggcaagggaggtaagctcctctatggtctttggcacctctccgccgaaccgttccaccaggtcccggcagcaggcaatgatattcttagctttcatgtgataaaacccaatggaatggatatcctgctccagctcctttaaatccgccatagcaaacttttccagtgtatcatacttttgaaacaagtcagctgtcacaatatttaccctggcatccgtgcactgggcgctcataatgaccgcaatcagcagctgccagggagtctcgtgattcagataacagcggtactgcgtaccgtattccctgtccagtgcagacaggatacggtcaatacgggcggtgagttctgcttttgtttccctgacggcttttcttccagtctcaggtcgcttcaaaatggttttctgcggcatatatccaatcctttcatcacaacgttcttgttgtatttacaacaatgcaaggtccatcacctgatcctgaccgcccttgcattgtacgtcagcgggtccctgtgcctgtagtcaaacagcaccagggttccgtctcccatggcctcaatatgggccatcttactcatctgcctggaatcatacccttcataatccgtaagatacaggggggatttctcctccctttgaaaaaactgccggacagcctgtttataggggctttggtcccgggcaaaggagggacggctttttacattttccctgagatataagtcatacatgagaaggtccctgaaccgttccatgacagaggcatccatccccgcagccccatgtccggctatgatgctgtacagtatctcatatctggctatcctgctgtggctgatgccggtgagatggttctcccggtaaaatgcagccatatccagaaacatttcataaggcgaaccgtatgctcccgcaagctcggccagggtatggacgaactgcctgctgttataatacacctctgtcatatcctccactccctttagctccaggatgtctctgtaggacagccagcgggtggacaggacctcatagggcggcctggaggaatagcagagaccataggacggcgccatttcttccatataagaacctttcagtactttcaggaagcccagctgaagctgctccggctccatggaatacacctgattgaatgaatggcggaagcattccagattctcactcggcagccccgcaatcaagtccagatgctgatggacgttatgccctttattaattgtgccggtaatacggcgtatctcgtctatgtcagtcttgcggcgtatggccttaagcgtgtccggattggtggactggacgccaatctccagctggatcagtccgggacgcatctggcccaaaagctccatttcctcctggtccagcaaatcagcggcaatctcaaaatgaaaattagtgactccgttgtcctgactttgtataaacttccaaatggccatggcatgttttttattgcagttaaaggtcctgtccacaaactttacctgagacactccggccgcaaggaaataggccagctcatcaaggaccagttccaggcttctgaaccgtacgctcttatcaatggaggacaggcagtaactgcaggagaaggggcagccccggctgctctcgtaatatatgatgcggtgctccaaatcctttatatccatatttttataaggaaacggtatccggctcatatccatggcctggcggacaccggtatctgccaatgaaccgtcggggaggcgaaaggaaagcccgggtatatctttcagaccggcctgtctctccggcagacgttttccaccgcccaccctcttttcgcaccgcttatccacataatatccggccagctgtgcaaaggtctcctccccctcccccttcataatgcctgttacctccggcagctcccgaagcactttagccgcgtcaaaggacacctccgggcctcccagccatatgggaacatccggcagtattttccccaaatccgccaccaggtatctgatgtattctatattccagatataacaggaaaaggcaatcacatccggttctctactgaatatatcctgaagaatcaggtccggctggtggttgatggtgtactcggccagctcaataaacggctctgcagggccctcccggcatgtcccggtttcccgttttattgcccggtcattcctgccgcccgcttcacccgcccccaatatctggtccgcgtaggccttcaggctgtaaattcccagattggaatgtatatatttcgcattgacagccgtcagcagtatcttcatgagactatacctctagctcgattttatggcctgtggactggtactggtaatagcgcactcccgccgcattcagcatgcgcttggacgccttcaccgccggcgtgtccgcatatttgtcttccctgtatacaatggtcctgattcctgcctgtataatggccttggcgcactcattacagggaaacagggtcacgtagagcttgcttccctccagacttccacctctgtaattaaggatagcatttaattcgctgtgtgtggagtagaaatatttggaattgtaggggtcctccttctcattttccttgccccagggaaattcgtcatccgaacacccttttgggaatccattatatcccatggacagaatcttattgtcctggctgacgatacaagctcccacctgagtgctggggtccttggaacgttttcccgacaacagggccacccccataaaatattcatcccacgttatataatccgcacgttttccggtcatcttttttcctccttttatcctgttcgcagtccctggctgtctctgcacacgcgcagcatccccctcccccgatgagtccgctgtatacgcctcctgtttggacattcaggaacggctgcttgattgctgcttatattttcctctgtctgtgaatggattataacattccgggcatatttaatcaacagagttgagcaaatcttggcattggccactctatgggaccttgcctttttccgggataaatgctatattataacaaccggacggtagcggaatataagtaactatcgctcattatcctatatcttttacgatatctgaaaatatctgaatcttaaagatttatctaaacattctgccccacatgagtcgggcaatgatttccacgtttaaatcacaccattaattcatcaaaaggcaaaggagctattgtctggtttatcagaaaacgctataatggggataggttcttatatggcttgccggaaaaggaggctgtatgggaggaacatacctgcgtgaacaggaatcagcaggggccagcgggttcagccagctggaggacaaggtaatgaaaacagcggcacagtttttcggggaagatctgcttccctatgcaggtgtaaagggccggatagcccgcgtggcgcctacagagcatgtccatctggagatgcgcaggctggaagaagacttcaatttcatcatgaaggacggttcctggagacatctggaatttgagagcgaccgcattcgggaaaaggacttaagacggttccgtgaatatgaggcttacatagggcttacatatgatgttccggtcgccacaactgtgatatgcacatcccgggtaaaaatcctgaaaaaggaactggtcaacggaatgaacgtgtacagagtagaagtggtgcggctgagggacaggaacgcggacaaggtctttgaaaagctgaggcggaaaatcaaccggggcaagatactgagacgccatgatgtatttcccctgcttctgacccccctgatgtcgggaaagatggaaatgagccagcggatttaccagggcatggagattctccagtgtgaggaacttaaggcaggggatgaggaccgaaaaaggatgcagtcagtgctgtatgcgctggcggtaaaatttttggacagagatgaattaaagatgataaaggagaggattggaatgactgttttaggtcaaatgctgtttgaagacggtatggaaaaggggatagaaaagggaattgagaaaggcgtccagcaggggctggggcgcgcaaatgcactgattgtaaagctggcagacgctggaagggcggacgacatcatccgggcagcatcggataggacgtatcaggaacagttgtttaaggagttcggaatctagtaattttaaaaaactttatatagcagaccgcccgtcaggttaaggaggtgttcctgtatattggcctttattgagtaatgtaaacttttgtgagtctttagaagcataaatataaactgtattttcgtactggtttcttagggttataggataatgttaatcattgtaaagcagacattgtacaatttaaatacgctttaagtatatttgattacagaactatcatcaataaaccgaaactcaatattagaaaaaccttgaataaattaccaaaatctgttattatataaacctaaaaagaagcaaccgcccacaaggggttggctgaatatgaagatagaaataccacccactcaactgccaagtatcagggtggtttttctatgtagctacttacaaaacgtaaaaacgaatgtaagcaatgccaaaagggatagaccaaaggtcaaatatcctatatgttacaattggctcgtcaggaaaattcctgaggattgaaataataatattgtaaataaagaggagaatgccattaaaaaacaatggcagactcttctttatttttcatcagtcccaactttacctgcatccattttccggcaccggcttagtcacaatcacatccgcgtcataccccagcagatgcggtatgacaacggttcccgctttcacaggggcggtcagtgtacatttttttatctcatccattgcatcgaaaatccggtcccgtgggatggggtttgtcagcctcacactggccaggggtagtataccgccctttaccaatacagatgtggcaatatttctctggggggccgtcacttcctgctccacatacgccctgccctttgggcacgcggcgccctccacggagcaaatccgtctggttccgtcttccctctcctcaatctgcgcccttatatcacatccgttggggcagatgatacatgtatattctctcaacattcagcgctcacctccagccggctcagggacaccagtttatcagccttaacggtaagttcaatcatctcggccggtattgccttcttcattttctttgacgccaccaatacaccgtcctgccttacctcaatgcggcattccttcaagggactgtttaccctcagggacagcttaaaatcccttgtgccgctcactctctggggaacagtgtggttaatatggctgtccgtttctatttcgatgggacagggggtaaggcatccgttctgcacatattccgcagctgaatccgccaggctctctgcttccatggaaacaaagtccactaaatcatggacatggagcacgtttcccgcagcaaaaatcccctccacatccgtctggaaatgttcatccaccacagcgccttttgtcctgtcatccagggtaacaccagcgtccagagaaagttcattttcgggaatcaggcccacggaaagtatcagggtgtcacacttgtattccttttctgttcccggaacgggtcttaagtgttcatccacccgtgacaccgtgacgcctgtcaggcggttgtccccgtggacagccgttaccgtatggctcaggtacagcggaatgccgtaatcattcaggcactgctccacattgcggggcagaccgctgggatatggctggatctcaaacacggcctggacatgggcgccttccagcgtaagcctgcgggccataatcatgccgatgtccccggatcccaggatgaccacttcctttgcgggcattacattgcagaggttaatataagcctgggcaaccccggccgtaaacacaccggccggccgctcacccggaattcccaaagcgcctctggtccgttccctgcatcccatggtaaggatgacggacctggccttccacaccttaagcccctggcgtgtcgctgcggtcacagtcctgtcttctgtcacctccagcacggttgcgtccgtgatataaggaattcctgattcttccacctcatcgataaatctctgggcatattccggcccgctcaatgtggttttaaaacgggtcagcccaaagccatcatggatgcactgcctgagtattcctcccaactgtttttcccgttccacaatcaatatgttatgtattcccttcctgtataaccggacagccgcagccagtcccgccggtccgccgccaacaatgagaacgtcaatctccattccctacacctcctcccgcactctgccgaaaaacatctgtgaatcttttcttgcataccttacttctgtttccttttttcccgattcctcttctatcatctgcgcaatacgcatctggcagtatcctccctggcaccgccccatcatggaacgggtcctgtatttaatccctgccatggtgtcaacccccagtggattatggatggctgccaggatttccgccctggttaccttttcgcaccggcagacgacctggccgtaatcaggattctgccttatcatctgttcctgttcctcttttgtcatctccgcaaaacgaggaattccttttctcacaggattaaactccggattgggcgtcagcttctccctttcttccataagacagaccgcatgacgggcaatggggactgccgccgtaagacccggagactcaatgcccaccagattaatggcgcggggcgcaatgtcatcccttatctctatcttaaaatcctgtataacaccgttctcatccacccatttaggcagaataccggaatagctgcggatataatcctttttatggatacagggccacaggtctgaggcactcttagccaggtaatccatattttcctgcgggacgccatagtatgtaaaatccgttaccatctccgcgttgggaccaataatgacattgccgtctgtggtgttggtcacatggattcccatgtaagtattgctgggaaccggatatacaggcatggggagaagcggtcctgtgcgcttgtccagaataatgtaatctcccttggaaccaatcaccttatatccgcggatacccagcataccggatattttaccgcagcccagtccggcactgttcacgacccaccgggtatggaattcgccgtttggcgtcataagaatataattgccctggctgtcccgccgtattcctgtcacttcatggtcaaaataatacgctgccccgttggcatgtgcattctcagccagagctacggtataattaaatgggtccacgattccgctgttagccgaaaacatggcaaattcccctgccacagccggaaccagttgatgaagccgctcttttccaatgagctccagccccgcagccccattttcttccccctgccggatggtccgtttcagggtttccatatcctccgccgtattgcccaccagcaccttaccgcagcggatgaacttaaaatccagttcctcggccagttgttccatgaatcgattgccttccacacagagtctggccttcagtgagcctgtgtcataggcaaatccgccatggaccacgccggaatttctgccgctggtctcataacatacatccagattcttttccaacacgcctattttcaaacggtacctggacatttccctggcaatggcgctgcccaccacgccgccgccgataatgattacatcatacagttgtttcatgccgttttcctcctgaaggattatcgcaaattcatcctatgaatatattttatttttaccacatttgatgaatatagtcaatacaaaatccttaagaacgcaaatatttataggatgaatactctgtagcttccattccaccagaaaatttatcctcatcagaaaaccgcaccttaaaaaagaccggatgtccggtcttttcatggtaaatcattctgagggccgtacccgaggcgtctcagcatcaattctattccctgcttttcattattcctcaatccttattccctgcttcccatcccgcatttcgcctttataccggttgtcattatacatcagatggaaatacatagcctgctgcgcctccacgggtttcctgtcccggatggcctcaaatatcctgcgatgggatttaagggtctgctcatactctgtttcctgaacagcgccggcaaatacacggacgccgtctgtgattaccggcaccaggttagtcatgaccagattatgggaacaatttgcaatctgggcatgaaactgcgaatccttgtccgaatagtcttccctgcgcatcatctgctcctccaggcccagaaggatgttctccagctcgcggatgtcctcctctgcagcgttctgggctgccagagccgcaatgggaggttccagcataacacgcacctgaatcagatcctctgtcagttttctccggtcctctatcatggcaaaccccagggggtcatcggatacaccgtttttatctgaaataaaggtacctgaaccctggcgtatggtaacgatatttctggacataaggattctaagggcttcccgcaccgtgttgcggccaacccccagaagttccaccagctcggcttccgtgggaagcttatctcctgccgtatagccatccttttgtatcatctccaaaagcttctgggacacaatctcccctaaggtctgtttttccatatctcctcctgcctgacgcattacaccttcacaatcttatatcccgctgccttggaaagacggttcatgatggcctgtcccaggtggtctttcgggaagctctccgaaaatatgtagtccactcccaaatcatcaaactccctgagcagagcgtaaaggttatgggccacagatgcctggctttttcgttcgcctatgctgcgtaccgcgccgtctgtatagcaatgcctggactcgtccgtacagatgactcccaccctgcagccggcctcaatcttcccgcgggaaagctcccgcaccttgccaatcatggcctgaagctgtttctcatccagtccattttcccggtcaacgtcctccggctccaccagtgtaaggtcggccttaggcgcataatgcttatacttcattcccggcgccttcggcctgacatccgcagaaagagggcccaggatagccgggtccacgctcacatcccccagcaccgcctcaagcatttccatggtgatggcccccggtctcagaacagccggtacctcggatgaaacatccacaatggtggactccaccccgattcccacgggacctccgtctataatcatctcaatcctgccgttcatatcctgccatacatggtcggccgtagtgggacttggacggccggatgtattggcgctgggcgcggccacgggcactccggccagagcaataagccggtttgccaccgggtcgtccggcatacgaattgccacggtatccagaccgcctgttgtgccataggggaccttgtcactcttgggaaatatcatggtcaggggacctggccagaaagcctccatcagcttcctgcctgcctccgggatctcctttacaagaggcgctacctcctccatgcaggatacatgggcaataagaggattatccgagggccttccttttgcggcgtaaattttccctgccgcatcctcgtccagggcattgccgcccagaccgtatacggtctccgtgggaaatgccaccaggccccctgaacgcagtataccggctgcctcccccagttcctcatcctttatatggttcctgtcctctatcataactctttttgtctccatgattcatacctcgattgtcaaataccgtttgctctatgtccagtctattttagcacccgccacagccaatgtaaagccgggaaatctcacctatctggcgcctgtctcttgaagaataaggacatttcgtgtaaacttaagttatcacaaatgattggaggctttaccaatgagcaatattaacagcgtaatgaaagaattcaaggcatttatcctcaaaggaaacatcatcgacatggctgtaggcgtcattatcggcggcgctttcagcaagattgtaacttcccttgtcaatgacatcctgatgcccctgctgggcgccctgaccggcggcgcaagcttcaacacactcaagtatgtcattcatcccgcggccacggtaaacggggtagaagtagaagaagccgccatactctatggcagcttcctgcaaaatatattggattttctcattatcggcgtgtgcatgttctttatgattaagacagttgccgtcatcagcagccggttacgccatgaagaagaggccaaagaagagacgcccgcgccggctggtcccacacaggaagagcttctggctgaaatccgcgaccttttaaaggaacgcagagacatggcctgatatccctagaagaaccgaatccgcttggcattctccacaaattccctgttattcctggtcctcgcgaaaaggtcaagtaccttttccactgcgtcctcaggtttcagggaattagtggccttgcggatgatatccactgcctccgcttcctcccgggaaagcaggagatcatcccgtctggtaccggacttcaatatatcgatggccgggaaaatacgtttctcagacagtttcctgtcaagcaccagctccatattgccggtgcccttaaattcctcatacacaacatcatccatgcggcttcccgtctccaccagcgcagtggccagaacggtcaggcttccgccctcgcgcatatttctggccgcgccgaagaaacgctttggcatatgaagggccgccggatccagaccgccggataatgtacggccgctgggtgcaaccgtcaggttgtatgctcttgccagcctggtaatgctgtccagcaggataataacgtcacgtccgtgctccaccagacgctttgcccgctcgatcaccatctcggataccctcttatgacggtcaggcagctcgtcaaaggtagagtaaatgacttccacattgggtcccacaatggcttcttttatgtctgtaacctcctcagggcgctcgtcgatcagaaggatcatcagatgcatgtccggattattggttgtgactgcctttgccacctgctttagcagtgttgtcttacctgcctttggaggagacacgatcataccgcgctgtcccttgccgatgggagccagaaggtccagaacacgcatggccactgtattcctctctccaggtgtttccatgtgaaggcgcctgttgggaaagatgggggtcaggtcctcaaaattgggccttgtctccgtggcgcttaacggatagccgtttaccgtcttgatgtagagcagggccgcgaacttctccgttgcagacttcaccctgcggtttcccactataatatcgcctgtcttcagattgaaacggcggatttgggatggggccacatagacgtcgttttcacctggaaggaaattttcacagcggatgaatccaaatccgtccggcatgacttccagtatgccgtttgcctcaatgccgctgtccaactcagccatgtcctggctggataaacccattgagtcactcctgttgtccgctctggtaaaacgctctccctcactctgggaaggcgtactgttctggctcatgctgttattcatgccactgtttccatggggcttgggagactgggttctgttctgtgtatatttgttgtcgtaccctcttgaaacagggcggcggttatccgttcctctgctgtcattcctgttttcctgataatcctggctccttgactggttgcgctcaggggcatgggactggtcctggggacggtacgcttcctggctgcgggatgcctcctgtctgcggggcgtttcagccttttcttctctttttatctccgccggcttcacttccgggtttttctccgcctcagcgcagagcaaatcaatgatttctgcctttctcaatgaactaatgcccttaattccacggctcttggccatttcctttagttctgaaagaggcagggtctgcagtttttcacgcatagtatctctccttattaaattcaattcttcacccgcaaaaaaagccggtgcacgccttctgtctatatccacattatcttctgttcattcaaattcggggtttattccagatttgggaattgctcagggactaacagactgccggcagcatcaagaaaactgccagccaatctatgtatagccctattatatacacgaatatcagagaatgtaaagttaaaatttgagaaaatcagcttttcctaaaatgagaataggataccactctgattccacctgtattattggtgtatctgttaagcttcccatacgcctaatacttcacacttagcatccctaattaaaaatcttgctccccaaaatatcaaactctaccttgttaaagggttcactgaaataatcaaactccaatatcacagcttcttcaaagttaattctttcaaaattttttcttgtcaaatcaattactctatcaatttacaccaccatctatttttcggagacgctcaaccaatgcctggcttacgccggcacctagtataactcgatttaaataagcttacaatttaagcattggtagtaatctgatttcttggcttacgtgtccgtgctttgggcgcacgtttcccttggttttcaggataataatataaacttattaaaatcgagttatactagtttccctgctaaagtagtgccaataaaaggtccgtaatacggaatacaatatgttcggatgtaagggcaatcagcatgtatgtacatccacataaaagctttcctagcctgcgccctggaaagcaaatataagaatacacaatctgcagggcggtgacactgaccagccgcaagagcggatagaaatacagtttatcaatccatgtaattgctaatgccaaaaggatgccgccaagcatctggcggtaccagtaatggtcctttcctcctaaaatacgatagaaaagataccagcagatacctgcctccacaaaattaatcattatctctgccattttctcataatcctcccctaaaaacaactattctcaagtgccaattcgtgcaaaaaaccgacaattcgtgaaaaaaacaacacccccacccccattattataacatttttttctgtttatgtggctaaatctggaaatccgctggtgcctgatatgcactttataatgcaatatagtaagaaaccctttacaagagcatacagaaaaaagagctgccaaccttacaaacaacgccgccctgaaaacaaggcggcgttttgctatgtggtcacttctggccagtgtggccagagggagtggtatatttatattccctgcatctgatatgttccacaaggataaaagatataaggcccaggagcggtgagcggcagggccgcggacaagggaaaaggccggaggcgtgttccctacgcttccgacctttcatggactcctctttacaacactgtctaactccagaccatttctgcaatggcgcctttcattgacatctataaggacgccattttttaatgtctgatacaaagtcaggtattatatgtacaaatatcagaaagtcagcttttaagccatttcatatgcgcatttatctgtttctcgtaaccattgtcagaaggttcgtaaaatacggttccctccataccgtcaggcagatactgctgctgcacataatgcttggggtagtcgtgggcataccggtagcctgccccatgccccagcttttccgctcccttgtaatgcttgtcctgcagatggacgggcacaggcatggtccgttcattcctcaccgcttccatggccttctgtaccgccatacaggcagcgttgctctttggagccgtggccacataggtaactgcctgtgaaaggatgatattggcttcgggaagtccgattcgctctgcggcctgggctgcgttcaccgccaccacaagggcctgagggtccgcgtttcccacatcctccgcagcgcatatcatgattcttctggctatgaacttgatgtcttcccccgcgtacagcatccgcgccagataatacacggcagcgtccgggtccgacccccgcatgcttttaatgaacgcggatatggtatcatagtggttgtccccgttcttatcataccggaccgcccttttctgaatgcattcctgggccactgccatatcaatgtgaatccgcccgtccgatccctttgcagtggtcagcacccccagctccacggcatttaacgcggccctggcatccccgttggctgtatctgccaggaaatcagcggcatcctcgtcgatttcggcatcgtaaatgcccattcctcgttccttgtcataaaccgccctccggatcagctcctttacatcgtccttttccaggggcttaagctcaaatatcctggacctggaaagaagcgctccgtttacctcgaaataaggattctccgtagtggctcctatcagtatcagcgtcccgtcctccacaaagggcagaaggtaatcctgctgtcctttattaaagcggtggatctcatccacgaacagtatggttttccgtccgtacatgccaatgttatccttggcctccttcaccacctcctccatgtccctttttcccgccaccgtggcgttaatctgcctgaaatccgcactggtggtattggcaatgaccttggccagagttgtcttcccggttcccggaggtccgtaaaaaataatggagcccagcttatccgcctgtatggcccggtacagcagcttatcctttcccacaatatgctgctgccccaccacctcatccagggtcctgggacggagcctggatgccagaggcgactccctctccatatccttttctctcatataatcaaataaatccatatctgtattctcctcagtcaatcagcagttcatccaccgtaacaaaagtatagccccgcttcgtcagcgtgtcaacgatttccagggctgcttccacagaagtggggaaaatatcatgcatcaatataatatccccgttctccacatccttaagcacacgtttcacaacacggttggtattgcgcagtttccagtccagtgagtccacggaccacagtacggtggtcatgccgaccctgcactccagctcctcattccagtctccatagggcgggcgcatatactggggccgctctcccgtaatctcttctatcatccggctggtcctgtccacggcctggcagaccgcgtcggatccggcctttgtgagctgcacatggctgtagctgtgatttccaatcaaatgcccctctgccttcatccgctttacaatttcctcgtttccctctatgttctgacccataagaaaaaaggttgcccggacatttcgctctttcagcccgtccagcagtttttccgtgtaatcctcatttggtccgtcgtcaaaggtcagagccacacatttcccttccaggcccttggcccggtccagggtatcccctccctccctgacccaggagcccccgtcaacggacacatgggccggcatttccccccttaccgcatggataaggccgcccagcagcagaaggtccattatgcagacggctgccaggagttttgacttatttatcagcttcaccctgtttttccctctcttatttcacatccttatctatccagtatatgtgcggggacaatgtaaaaatgcttttacctttttccgtcttccacatacttaaaaaaacatgggcaaagaagaaaacagcgccgggactgctcccggcgccgctcagctgaacttaaatcatatagaacgtatttacctgacttctactgtgctgttcctatcggtgtgaccactacacccggtccgccggatgtacctgtgacagactggcctgcccccggtgcctgattggatacgccgccgctctgtgaaggctggggcgcctgtcctccctggctgccgcctggcgcctgggtctgtacatttcctgtctggccgtccccggtctcatttcccgtttcctgaacaacctggctgagcactccgcttgcgtctgtattgtacgccacgccgcctatgtccacagtggtgcctgccgccatacgtcctgtggatggctccatatagtagtggagtccgcccacatcgatcacgcctttcgccatacgtccggagctctcaaagtaataccaggccccatccatctcacgccagcccgtggccattgccccggatcccttaaggtaataccgctcaccgccgtcatccagccagcctgtctgcatcacgccctcctggctgctgtaataccaggttccgttgtcattgatccagccctttgaaagggctcctgagctgtccagatagtaccacttcccgttctgactggtccagccttttgccatggccccatttccctccaggaagtatctgcggccgccgtcatccagccagcctgtctgcatcacgccctcctgattgctgtaataccatgttccgttgtcattgatccaaccctttgaaagggctcctgagctgccgaaataataccatttcccgctgtcggatttccagccggttatcatcttaccgttagagtcatccagatagtaagacttgccggactggttgagccatcccctggacaccaaaccgtccccgttcatatagtaccatgtgccgtcatcctgaatccagttgtttttctgctttgcatagttctggtaatagtaggtctgcccgttgatagtcctccacgtattagccggaatcacagaggtgaaatccttgaactgaaaatcgatatccacatttccgcttataccgtttacagcgccggtgcttgttgcctgccacataaccggattctgataggcgggtttggcggaatagcgggctacccatacaggatagttcattttgctcatatccagcttattggcaagccagttgtcattagcatagatgacaggataatagcccgcctctgaaatccgcccgcagaacgcgttggcgatggctgccagctcatcctttgacaaggttccctgggtggaatcctccatgtcaaaggccacgggataggaaaccggataatcatgaatcaggttgaggacaaagttggcctcctccaccgccatctccggcgtcatggccagagagtagatatatacgcccaccttgacgcctgccgcgctggcctgctggatattcctgtggaagtaagggtccactgcgccctttgaacgggtgcccagcatgacgaaggacacgtcgtccgcggctacctggctccagttgatatctccctgccacctggacacgtcaattccccggaacagcacattattgatggacgagccgtccggcatctggtatacgccgtttaccttcttccatgcgttgggatttgcggtggaagcagactgtccggaggtggttcctgtaccggaggtggttcctgtgctgccagtggaactctgccccggccctacgggagatatgaccgtggaggactgggtctctcccggtcccacggccagggatgtacccgcgggcaccattgtccctgccccgattagccccgccaaaacaagtgcgcggcagcgcctcattatctgcgtcgtatttttcataatcttctcctcataccattgtatttttcaaaaaaagaggggatgtccagccatccgctgtcacatcccccttgttaaactgctgtacatcaacctggtccgtctgtccgtcctggttcaagcgcagttgacgagccggatgggctgttattggaattgccgctggtcgggccgctggtgctgcttccggagccgcccggtgtgccgctgctgataccggagccggaagaaccggacacgccgggtccgccgctgccgccggaactgccggaattattgttcacggttcccggtgtctgggccgatacgccgttggcattctggcatacaccgctgccgtcaaagttatactgtacgccattgatggtagctgtggtgcccgcaatcatcttgccctcgttggcagggttcagatagtagtacttgccgtccagctgaatccatcccgtcatcatatgtccattgctgttgaagtaatgccaggaattatcaatctgcttccagcctgtggacatcttgccgttgcttgtatccatataatatttgttgccttcgctgtcgctcagccagccgctcagcatccggccatccgtattcaggtagaaataatcattatccactttagcccagcccgtcatcatcttgccgtccgtgccaaagaggtaccagttgtccttaatctgtgcccaggaattaaccacgcactttccgttgctctggaaataataccatgcgccgtccatctcacgccagccggttgccatggttccgttgccccgcatgaaatagtagtcgtttccaatcttcagccagcctgtaaccatacttccgtcgttcagcatataataccacttgccgtcctccggattgatccagcccatggccatgagaccgttgggcctgaagaaataccattttccgtcaatctgcttaaaacccgtggacatatgtcccgtggataagtccatgtaataccagccctcgctggtctgaagccatcctgtatgtgtctgtccattatagatataagtccaactgtcattggatttactccatccgtccgccccatagctggtgaatacagaccccaatgacatggccccaatcataccggctgccgcgattgctgcccagtactttttatatcccatttgtcatcctcctcgcctggtatatctggccaggggcatagtagtccccaaccgtttacatatctccgattatagcacaatcccatattcatttggtaacaaatttattacaatttccgtaatttcctataatatttttttgcataccggtacatgatgatggtgtattctccaaactcatcgcccagaatgcttttatatacagcccacaggcaccacaggaatcctcccagggccgcattggcatatagggcgaacagctcgtcctcagagggctccctctgaagataaagcctgaagagacgttccatgtcttcttcattgtaataggaataaatcgcacacatggacacatccatcaccgggtcacacatgcctgcatactcccaatccaggagttttacactgccgtcctcaaaaaagagaaagttatccacatttgcgtcaatatgacacaggcattttgggtgttccatggaatccagggtatccatgagccagtccatccaccccctcacttcctcgtaatcctcaaacaaaagagctccatggctcctgcacagcttttcatagaagctgattctctcccggatgtcaaaggaatgggccaccgtaatacccgactggtgaaggcagcgcaccatggacatgcatttttccatatcgtcccaatccgctgcatccgcatttctggtaccttcatagtaatccgctatcttataccccgtcttttcgttcatgtacagcacatgctcggtgatttcaagcggggcaacggcgtcgtagactgttttttcctgttccctgttaatcagaagttctgttcccggacctggtatgcggcagatgcagtggcggtcctccaccttaaacagaaacgacttgttggtcatgcccgctttcaggcagcggatatctttaatgtgggattccggtaccttgaatacctctgcgaccagcttcatggccgcattgtcagaatgattctgatagcgggggtcaaacaggcgcagctcctccaggttctcaaactcatatacctggtcatccggctggcggttcacatccatctctatctcatcccatctggaagcagccagtccgctggcttcctgggccgcttccaacagtccgccggcttcctcctccagccgccgcctggcctctccttccagcatatcaacatagacctgttcccagtagaactgctctgttcccggcgtcttataataggcttccagcacgggaaggaactgccgggaaaattcccgggaaaaataagccggaccatacatgacccactggtcccgtccgcctactttcacatcggtgatccttccctttttattgaaataaaggcaccactccttggtctctcccctctgaaaagccgagctgtaccaggccccacattcataggcatgatacatgttctcccgcatccagttgtccgatgacagaatgtacatattgcgtccctccagcaccttcctggcccggtatatagtggtcagggtgtttttgctggtgtattcaggattgtacagaagctccacaccgtatttatcaatgaggtattcaaacttctccttcagatatcccactgctatggttatgttccttatccccacttcgtgaagctgcttaatctgacgctcaatcattcgctccccaaagacctccaggagccccttgggcatctcaaaggtcaggggtacaaaacgtgaaccgaatccggctgcgataataagggcgccgtccaccctatattggtctaacagcttctgtccctcagccctcagcctccatctggcttttcccttttggctgcttttctctcctatatatccctttgccaggcagtccttaatcaaaccattggccgtgcccagggagacgtccagctttccggccagctccctctgggtgatatccggctgctccagcactgccctgcatacaagtccatgtctgtccattgtgtaatcctcgcttcctgcctgtttatgttcaaatttatcattttgtggaaatatatgaacattatatcacacccgctaaaaaaagcaagcataaaagcagcatgacagcacccggaaaatggcagagaatattcccttttttgataccataaaaataaaaaaccagactccgaaacattccccggaatctggctttcttatctataaacttacacttcaaatatcaaatccccataacttggcatgggccacagttccttatccactatcatctccagctggtccacaggagccctgagcgcttccatggccggtactacctggctgtggtagatgacagcctggcccttgccaccctcggcggctgcggccttttccgtcgcctccaaaagatgggcaagtgctgtctttatcccggtaagcagctctgaggtctctatgagcagctctgtctgggtgctcacatccgcctcctggcatacgcctttcacggccccgatggatgcggcaagctgtgtggtatacttgatgactgccgggataatggacttgctggccatatcgtacatggtcctggcctcaatgttaatggccttggaatagttctcatattccacctcagaccgggattccagctcagcctttgtaaataccccaaatgcctcaaacagcttcaccgccttatccgttgtcagagccgggatggcatccaccatggagcggatgttcggaagtcctcttctctctgcctcggctacccattcatctgaatatccatttccattaaaaatgattctcttatgggcggccagagtcttctttatgaaatcatgtacagccatatcaaagtcatctgccttctccagtatgtctgccgcttccttaaaggcttctgccacgatggtgttcagcacggtattgggagaagcgatggaatccgaggaacccaccatgcggaactcgaatttattaccggtaaaggcaaagggtgatgtacggtttctgtccgtggcatccttatccagatcaggaagaatgtcaactccggtctttaaggtgccgccctgtttggagtgggtggcttcgccggtgctgcacagctggtcgattacatcctcaagctgctctcccaggaaaatggatatgatggcaggcggcgcctcgttggctcccagtctgtggtcatttcccacatcggaggcagactccctgagaaggtctgcatggatatccactgccttgatgatacatgccagtaccagaaggaactggatgttttcatgaggcgtgtcaccaggattcaggagattggtgccgtcatccgcggtcagcgaccagttgtcatgcttaccggaaccattgacgcccgcaaagggcttctcatgaaggaggcaggccatgccgtggcgtccggccaccttcttcagtgtctccatgacaatctggttgtggtcaacagcctggtttacaccctcgtagataggcgcaagctcatgctgggccggagccacctcgttgtgctgtgtcttggcaggcacgcctaatttccacagctctttatttacatcgttcatgtaagaaccgattctctcacggatggctccaaagtaatggtcctccagctcctggcccttgggaggcattgcgccgaataaggttcggccggtgtaaatcaggtccttgcgctgcaaatatttctctctgtctaccaggaaatattcctgctccgcgcctacggacggtgcgacccgcttggctgtggtgttgccaaaaagacggagtatccttaatgcctgctcattgacagcctgcatggaacgcagcagcggagtcttcttatccagcgcctcccccttataggaacagaaggaagtggggatgcacagggtcacgccgatggcgtcttcccgcaggaaggcgggtgaggtacaatcccaaaccgtatatccccttgcttcaaaggtggcccgcaggccgccggatgggaaggaggatgcgtccggctcgcccttaatcagctccttgccggagaattccatgattacttttccgtcggatggagcagagataaaggaatcatgcttttccgcagtcacccctgtcagcggctggaaccagtgggtatagtgggtggctcccctctcgattgcccagtccttcatggcatgggcaaccacatccgcaatactggggtccagctctgccccgtcttcaatggttttctttaacttcttgtacacgctctttggcagacggtccctcatcaccgcgtcattgaatacatttttaccgaacatctccgatacattcaacacatcgctcatagaattatccatcctctcttttttatcttccttttccaaaatcgtttccaaaattctcaggtcatagctctctcaggtcatacatctcttttcacgtaattatattaagtccgcgcgtatatataataaaaaggtgttccccctctgagagagaacacctttgttctttattaaaataaaccattttcaccgaaattgcaagtggtttttcaataaaaatacatttttattctaataaggattgttaagccatattaataactagcatcagttatagtgatgtaggttataaatcagccggtatatcgtatattatgccttgccaacggaaccgaacagctccatcttttccttaacagttgccctgatagcatcagcgcccggagccagaagcttccttgggtcaaagcccttgcccttcaggtccttgcctgcctcgatgtattccctggtggctgccgcgaaggacagctggcactctgtgtttacattgattttcgcaacgcccaggctgatagccttcttaatcatatcctcagggatacctgtaccgccgtgaagaaccagaggcatatcgcctacggctgcctttacctgctctaatacgtcgaaacgcaggccgggccagttctcaggatatttgccgtggatattgccaatgcctgctgccaggaagtcaattcccagatcagcgatggccttgcactcccggggatccgcgcactcgcctaagcctaccacgccgtcttcctcgccgccgatggagccaacctctgcctccagggacagacccatggcatgagctaccttaaccagctcctttgtcttctcgatgttctcttcgattggatagtgggaaccatcaaacatgatggaggaaaatcctgctttgatacatttatagcagccatcgtaagtaccatggtccagatgcagggcaaccggaaccgtgatgttcagttcttccatcatagcccggaccatggcagcaactgtcttaaatcctgtcatatactttcctgcgccctcggatacacccaggataaccggagatttcagttcttctgctgtcagcagcacggacttggtccactccaggttgttgatgttgaactggccaaccgcgtacttgccttcccttgctttttcaagcatgtcttttgctgaaactaacatattatacctccttataactttgttattttattaaccatctcacccattatatcgcatacgcgaacaaaaaggaagatgtttttcattaaatcagctgatgccgaggatgtcctttacctcgttcttcatatcatccacgccgcactccctgttatggcggaccgccgcatggcggatttcctccactgcctggggaacagcgacgccggacagggcgcttaatgcatccactatttcaaattcatccttgccctccagtccttccctgcctgcaatggcttccatgacactgtgggaaaatttataagggctggcagtggacgctatgactgtctttgtgccatccccgctttccctcctgtaatttgcgtaaacagcagccgcaacgcctgtatgggtgtcaatgagatagcccgtatcatcaaacagtctcctgatggtggcagcgtcctgctcctgggtggcaaagcctcccgcgaaatcagacatgaagacgcgcatctcaggcgtcacctcataccttccctcctcggaaagcctccgcatcagggccgcgttggcccgggcatcacatcctgtgctcagatagatgagacgctccaggttgctggatataaggatatccatggacggtgaattggtgaggatgaactctctcttcctgtcataaattcctgtggtgaagaagtcatataaaactttattgtcattggacgcgcataccagcgtctttacaggaagtcccatgcgcttcgcaaaataggccgcaaggatgttgccgaaattgcctgtcggcaccaccacattgattttctcgcccttgtctatctctcccgcttctaacagtttggcataagcatatacatagtatacaatctgcggaaccaaacggccaatgttaatggagtttgccgaggaaaaccggaacccctttcccgcaagctctgcttccaggtccttgtccccgaaaattttcttcacgccggtctgggcgtcatcaaaatttccgcggattgccaccacagaggtgttgtcccctttctgggtgcgcatctgaagctcctggaccttgctgactccgtccttgggatagaatacaatgatccgggtaccgggcacatccgcaaatccggccatggccgccttgcccgtatccccggacgtggctgtgagaatgacaatttcccggtccacatggtttttcctggccgctgtagttataagatggggcaggatggacagcgccatgtctttgaatgcaatggtgcttccatggtacagctccagataatatgctccgtcagcctttgcaaggggggctatctcttctgtatcaaacttgctgtcataggccctggcaatacagtccttaagttctgcttccgtataatctgtcaggaacagcttcataacctcgtacgctgtctcctggtatgtcatggacgccagcttttcaaggggcacatccagctccggaataccggacggcatgaacaggccgccgtcctttgcaaggccctgtaagatggccatggaagctgtcacttccttttcaccgcctcttgtactctgataggttaatcccatactctttttcctcgcttttaaaattctcaattagtaatgttaccaaaatattaacatatttcccggacagacgcaactgtaaacacggataccttccttttccgccctttatttggtatactgatacagcctgtcctcatactgccgggtcctcatctgacgcggaaaacggggcaggcccaataagcccgggaggaacatcatcatgacctatgaacacatagttgccggaaccttcataagccggcccaaccgttttatcgcccatgcggagacagggaacaggacggtggtatgccatgtaaagaacaccggacggtgcagggagcttctgattcccggagtcacggttatactggaattccatccggatgcagtcctttccggaagaaagaccgagtatgacctgattggcgtgtacaaaaacggtctgctcatcaacatggactcccaggcccccaacaaggccgcatgggagtggctggtctcattgggcggcggccaatatacggaaaaaaaccattaccctcttggttcttatgtaccctttgacatacggcgggaagccacccacggcgactcacggtttgacctggcattctccctgagaaaccgggataccaaagcagtgtctccggccttcatggaagtcaaaggcgtgaccctggaggaaaatggtctggctttgtttcctgacgctcccacaaaacggggcatcaaacacttaaagggccttataagggcccatgaggaaggttatgaggcctatgtcctgtttgtcatccagatgaaaggcatccagggttttacccccaatgatattacccatccggcctttggggagacgctcagacaggcccgtgaagccggcgttcatgtgctggcatatgactgcctcgtaactcccgataccatgactgtggattctccggtaaaggtcatgctggattagaacgtgtcacaatatacccttcaaacgctccgggccggggcctcctttgcggaagccccggccggtttagaattcatgctgcatattacaaccctaagccgcaggcagttcaggggcggcagttaatttaggagcggcagttattccaattgccgcagttgttccaattgccgcaattattgcggttattgcaggagcagcggcagttcgaagcctcagcggtccggcctgctgcccgggcagccgtccttgcctcagccgaacgattacagctgttgttggcatagaatcctgccatatatccctgccagtataaatcgcaggtcctgcttgttccgccgaatgacccggacgtatcagccgcggctgcggccgcagtactgcggcagttttcaccggcagactccgttctggcaaatgctgcatcccctgcataataagatccctcataagttcctgcatattcattccaaccattacaattattatagtccatagtattaatctcctttcatctaggttgtactttattatacggggctgggccaaaagtgtgacaaccctccttttattcccacagatacgtgctctgcatataatatcataacaaacctgaacggtgattcactatggtttatccgttacatgaactgaaaccgggagaacgggctgaaatcgtctgggttatcagcgaaccgcctatgtccctgcggctggaagagctgggttttacagcggcagcccaggtgacctgtattctgaagggccggcgcggccacatgtccgcctaccagatacagggcacagtcatcgccctcaggcctcagaatgccagggaagtgctggtccgggttctgaatccgggttgaaattacagtttgaaaaactgattgggacatcatttcgcccttaataccggttgtcaaatacgcgggtggacttcttttcgcttcttggaagctcgcccagctccaccagcttcaccaccggagtcaggccaatccgccctttaaactgattctggatttcgatttccagggcatatttgttaatggagggatttgtctccacaaataaggtcagcacatccttgcccataaggtggtccaccataacctggtattcgcttgaagctccttctatggagctcaaaagctcctctatctggcttgggaatatgttcacgccctttaccttgaccatatcgtcggtacgcccaatcagggtgccgattctgggatatggcgaaccgcagggacagtcccccggcacgattctggacaggtcatgggtacggtagcgaatcaggggcgcgccttcctttttcagggtagtgatgacaatttctcccacctcgccgtcaggcagcacctcacctgtcttggggtccacaatctcgatgtaaatgtaatcatcccagtagtgcatggctccctgtttctcgcagttgatggcaatacccggcccgtatacttccgtaaggccgtagatgtcgaacaggtccactcccagctcggccgctatcctgttcctcattttctctccccagcgctcggaaccaataacacccttcctcagatggatgcgctctccaatccctctcttggcaatctcctcggccaataaaagagcataggaggatgtggcgcacaggaccgtggatttcatatccatcatcatgcgcagctgcttatccgtattgccgggccccatgggaacggtcattgcgcccaggcgctccgcccccagctggaaaccgattcccgctgtccacagaccgtatcccggcgtaatctggatacggtccagattggtgatgccggccatctcatagcagcgcgcaaacatcagcgcccagtcatccacatccttctgggtataggggatgatgaccggtgttccggtagtgcctgaggaagaatgaatacgaacgattttctcttccggagcagccatcagtcccagcggatacgcctccctcaaatcacccttccaggtaaaaggaagcttctcaaagtcctcctgcgactgtatctgattcacattgacgccttccagcttatgcttgtaaaagcattccttggctgtcagtttcttgagctgttccttaatgagaaggaactgggattctttcatcttcatctggttaatcctccgtttatcttatcatggggccggctgatgcgcccagcttcagggccttcatattcatatccttaaacttttccggcacccttttttcaatggctgcctccatctcttccagggaaattcctatcagtccgctggcaatggctgctcccagcagagccacattcatcaccttaggggaaccgcatgccattccaatggatgccgcatccactaccgccaggttatccgcggcatgctccagatattccatcatctccaggcccgtgtagccacctcccgtcagggaggcggtcaccggccgtatgggagccggggataccaccacacagccgccttttttcaggtatggcagacaccggacagcctctgccggttcaaagccaatgagcacatcggccccgccatggggtatcagcggagaataaatctcctcaccgatgcgcacatgactcaccacgcttccgcccctctgggccatgccgatggtctcagcccccctggcctccattcctttctccatggctgccagggctatgaggcgggatgccaggacggtgccctgaccgcccactccgcacagcaatacattttttgtcatcttatatacctcgctctccaagcatcttccctgtcctgtccgtctgaggcaggactatttaaccgtttcaatggcgtttacggaacaaatctggctgcacagaccgcatccggtgcacaggccgctgtcaatgctcaccacatccccctccagcaccagcgcgggacagccaatctcattgatgcaggtccggcagttcacacagctgtcctttgcaatcctgcacttgcgggagctttttatgatagccacgcatggagacttgaagatgaccgctttcacgcccttcttggcggacagcttgagcacagcctccacacacgcatctaaatccagcgcgtccaccgtgacggtattttttacaccgatgccctccagcacctttgttatatccactttctccactacatttcccatcatcgtccggcctgtgcccggatggggctggtggcctgtcatggccgtggtggaattgtccaggatacacagggtcaggctggcctcattgtataccgcgttgacaatgcctgtgagaccggaggcaaagaaggtggaatcccctacaaaggaaaaataccgtttatccggttccacccgctgcagcccctgggccatggtaatcccggcccccatgcacagacatgtgtccaccatatccagaggctttgcgttgcccagggtgtagcagccaatatcgccgcagtaaactccctctatgggcttcgcgccctcctccaggccttcattcagcttctccatggccctctttaccgcgtagaaggacgcccgatggggacatcctgcgcagaggaccggcggacgcaccggcagcggcggaaccggcagggatatttccggctgcgatgctcccggatccgctgcaccgtcctccagtcctttcagatactggatataggattctcccaaatacgcctccaggacccttctgacagactccacggaattctcacccgcgggctgaacctcccctgtaagcttgcccttcacttccagaggcaggtgatgtctgccgctgagaagcagcatctcctgttccagaaccggatccagttcctccacagccatcacctcatccagcccttttgcgaactccagaagcagacgctccggcatgggattgggagtggataccttaagcactctcgctcctttgtacccgttcaaagcttccatgacaaactcgtagctgatgccatgagtgaggacgcccttgaccgtgtttccctcttccctatgtaacaggttgaacctgtagcttgaaaaatcctcccctatcatgggattccgggtctcaatcatcctgtggtttgcatgggacagcctggggaaaataacccatttgccggaatccttgacaaaaccctcatgctccggaagcttgacccgttccttaagctccacgctggcacacccgtggcaaagccttgtggtcgggcggaacaatacaggagtatggtatttctcagaatattcaaaggcatcctttatcatctcgtatgcctcttccggagaactggggtcaaataccggcagcttggaaaactggccgaaccgccgtgtatcctgttctgtctgggaagatatgggccccgggtcgtcagccgccactaccaccaagcctccctttactcccacataagccaggctcatcagaggatctgaagccacattcagccctacctgcttcatagttaccatggtcctggctccggtgtatgcggccgcggccgccacctccatacctgccttttcattgacagaccactctacatagatatctccgggattatacttggccaccgtctccagtacttccgtagagggcgttcccggataaccggaaaccacctgaactcctgcccggacagcccccaggccgattgcctcatttcccattaaaaatgatttggacattccccttctccttcccaaccgcgttttgtttgtcagaacacgttcaaacaggcttcgggcctttccgatccgatacgttctgatatgttttaatactattatatgaaaaaagacccgtcctttcaagaaaggacaggcctgaatctcaaaatgcctgtgttaccaccttaactttttaatgctctcgcaaacatgcacggtacatcggtactgtacatgctctgcccttaacacaggcctgcggtccagatacttggcgcgtaagctgtcagctgacggcctttcccctttccctcagcggtccatttgccggccggcctgttacagggattccaccatcccccgctctctgtgaacgccctctacggtttgatttccgcctcaacggtttatttcaatctattatacaagttttcccgcagatgtcaaacattttttagccggaatctcacgccgcgtcaattactggtcattggtcagcttaaagtaatccagaacataaaataccaggcttaaaatcatgcctgtcacgcaggccagcaccataccggtaagctgcacatttccaaacttcacggcaattcccgacagtcctgtgacaaatatgactgaggtaagtgccagatttctggaatttccgtaatccacccgggaatccaccagaatacgcagacctgaggttccaatcataccatagagcaggaaggaaatgccgccgataacaggaccgggtatggtgctgataagggtggagaacttgccgatgaaggagcacacaatggacagcacagctgctcccgcaatcacgcgcacgctgtatacacgggtgattgccatgactccgatgttctcgccataggtggtggtgggcacggagcctatcagtcctgatatcatggtggagaaattatctccgaacagggaacggtggaggcccggatcctttaacagatcccttcccacaatcttgctggtgactacctgatgtccgatgtgctcagaggtaatgaccaggagcaccggaagaatagtcatgatggcttccagattgaacttaggcgtactgaaattaggcagggcaaaaacaggggccgcagccacctctgcaaagtccacgataccgcaggccagggccgacacatagcccacaataaccgctatgaggatagggataactgagaagaactttctgaacaggatagaaccaaatacagcggttcccagggtaaggacaaacacgattgtctttctggggtccagtacctcgtccaagagtcctgcattgctggccgcggaaccggagagctccagtccgataagcgccaccaccgggcccatggctgccggcggaaggaccacttcaatccactctgttccgaatttatatacgatgaatgccaggatacatccgcagaaacctactgccacgaaccctcccagggcatattcatatccgaaattactgataaccacgcctgccggcgccaaaaatgcaaagctggaccccaggtaggccggcgcctttccctttgtcactcctataaagagcagggtgcccacgccgttcatgaacagcaccacagccgggtttatgccaaatataaacggcaccaggatggatgcgccgaacatggcgaacatgtgctggatgctgaggggtaccagcaggttaaagggtaccttgtcctctacctgaatgatgcgttgattttccattgtcttcctcctttgttgttcacttgtttcatactctgtttcctgccgcgcgcctccgccctgagcggctatgcccccggcttatcttacccctctcaaaacaccgtccgcagatagagaacgggtaatcccatgacagttccttgccgcaggctgagcatttgcgggtgtagctggcacattctgtccttaatatacggctgatttcctcctctgtgccgcgtctctcctcggccaggttatccgcctgtacgggaagccccaccttcctggaaaactggaaataaaggtccagcattttatagtagctctccaattcatacaggtcttccccgggactgtaaggaaactccagttccgtcacgtcacggtactcccgacagtaatccttccacaggtccatgaccattttattgtctatatcgatggaacaggtgatgagcttataaatttcctgccgggagtattcccccatatcatcccggtgtacatgctcaaagctcatatacagcgccagcagctcgtccacctccattttctcatagatggaaggcgtatccatgccggcccatatcttaaccagcgtatcaatctcagccggaaggttaaggagctgctcggggaatcccacataggccttcatgatgggcatgggcattctggaaaggccgtcttcaatgacctccgcctcgtcgatagcagccacaaatccctcgtcgtaaagaccgtatcttccggcccgtccggcaatctgttttatctcctccggattcagggttcgcttatttaccccgtcaaacttgcgtgtctccacaaacacgattctgcgtatgggcaggtttaaccccataccgatggcgtcagtgctgaccaccacctctgtctccctggccaggaacctgcgcacctgttcacgtctggtggcgggaggcagacttccgtaaataacgctgcaatggattccctcgttctccaggtgggctgccagggccagcactgatttcttggaaaatacgatgagagcatcgcccttttttaaatctcgtttcagattataaggctttttctccatggtcagacgtgtgtttctcttatggcgcaccaccctgtaccggtcgccgcaccgcttaatcatctgcaccacaatatcctctgcctccggagccatgcacaggtggatttcctctgcccgaagtcccagcactgccctggtccagttatgtccgcggtaggggtcggctatcatctggcactcgtccaccaccacgatatcgaaatattcatggtcattcagcatctccacggtacaggactggcagacagctccgggcacctccaatgtctcctctccagtgaccatggaacaggacaggccctctgtgttgagtttgtcatagacctccagggccagcagccttaaaggcccgaagtaggcgccgtgtctgcactccttaagacgttccagggcttcgtgggtcttgccgctgttggtagggcccacatgaaggataaacctgcgtttcatctccctggcccccgggtattcctgctccggcttctgttttacagactccagaatgccccgcttgatggttttcggaatgtagaacagctggtacgccctctccagagaattggtgaggagataacggcgtatgccctgcatcttcagcacctgctccaaatcctcacgggacaggccgtttacatattccaggtccttcctggcaagggcttcacagaattccctcatctgacggcagctggactcccactgctccagggcgggccctgtcagatgtccttccctgcgcatgagataggcgcacacctttgacagcatggcatggacatcgctgagttcgttggacttcaccagcggctttaagttggcctcagtcaaccggctcaggcgtttcctgagttcggcacctgtcatggcccggtagcgtttgttcacatttccaaagaacaggtcctggtaatattccgccagatactgctcgcactccttttttatctccatggacttcctctttcttccaaatattcgtaaaagcagccagacgcatatgtttccatattcatctggcagcacattaaaccatggttgtatctacaaaatgttcaaaccccgatataccatattctgcacatacgctgttgattccatccacgatttcctcccgtgagtaattggcggtgtagagttcgtcatccttcagctggttgaggtacatgtaaaatgtaagggccatctccagacagtccaggctgtccgtgtccagctcgtcggtaagaaggttctcagcatcattgatgtttccctcatccaccaggtccttaagcctcttatatacccggtcaaggtccgtatacctgtcctcatcctccggaaggtcataatcaatatcgttcttgccaagaaccagcctggcaatcgtcctcaccagatcgctgattgtcctcataacataatcatcctgatatcccatatcatttcatctcctgaatttagtggattctgttttttgcacatttaaacttagtatagttgataacctttcctccgtcaagcagtctgttatcacaatgataaaccaatggcagatagggacctgtctgccatgcaccaaaggttctgcggcacatacgctatcctaagactcaatctgcccgcccacaggcagagtttatatttcaggagtgactggatggaacacccacattttatcatcgcgtttaccggtaatgaacagactggcaaggaggtcttattcaaaaagctcaccgcccaaaaaggatctgttaaaccttcccgcatgcgggacatgtcctgcccccatggagattttctatatgacagccgctgctataaggcagtaaaccttcccggcatcctgtccctcagctctccgtcagaggaagccaactgcactgcatcctatctctgctcaggaaaaccggatgccatcctggtaacaggccacgcactccatctggagattcttctggggcttttaaaggaaattctgagtcttggaccggtcagagattcttccatccccgttgtactgtgtatcagccgctgtgaagaagccagacggcagggcatccgcattgatttttcacttctccacgatgtactccggattccggtcgttcctcttcatggatacggcaaggaacagatggacgacttaaaagcagccctccactatgccctccagccccatcacaagcatgattttctctacgactgtctggacttttctccctgccgtctggctcatgagtgtatgatgacagaaataaaaccatcccatggaaggcaatggaatatacatccggaaacaggacggaccagaagaatatgtgaagcactgctgctattacttttattcggacttaccgcatgtctgtcaatccggctcacggactgcttatggccgttattttttgaaaccaaaaccatcctgtgggcctgggcagaatggcttggattgcctgcctggctgagtgcgcccattatccatggcgcattttgcgccgtgtcatgcaccatacccgtgatgcttccgccgctttttctgctgttccctctgttgggattattgggaagaagcggctgttttctctgggccgtatacctgtcagacctgataacggagttttttattgaaaaaccctgtaataccgtcagacgctacaagtcatacggcatattttccaccctattctcctgtaccgcggaccacaccattcccatccttgaccgggcagcggcggcggctgtccccaccggcattctcatatggttccttggcagcatggcatatgtgggaccggcaacagattcttccgccttcctgtccccaggcatagacggcgggagcctgctggaagccatcatacgtttttttgatcatccggcccgtctcattggtctggacggcaccatactgactgcttttatcctgggtattttttctcatggaatggcgcttcccgccatgatgatgatatatctgaaaacaggaggcattccttccccttcatcccccttcatcctaggacagctgatggcaaatcacggatggacctggcgcacagccctgtgcacctgtctcatggccctgacccgctttccaagccttactgcctgcctgaagctgcgcagaaagcccggccgctccctgtacttcctttcaggacggctgctggtgttcattctcggcatcatcctgtgctttctcgtcgctctgacaggcaaagtatccggttgacgccatcgttcccatcatgattcagcaatacctttccctcacataaaaacattcccctgaacatggtcctgctctggaaatattttccagagcatgttccccattttctggggattctttcttgactgccgggtctcctgagcctataatggaactaagtaaacaacaggatacatatatggacattcaaaaacgcaggacgttcatcatcagctttatttactttggaatcataggcgtgctctgctatataggattaaagaagctcctgcccatactgattcccttcatggcagccatggctattgcagccttgctggaaccggcggtgtccttgctggacagacatatgaagggtggaaagggtgtggccgccgcggttgtgctgctggtcttttatggttccattctgacaatcatgtgcgtgtccggcagccacgttctgtcctccatccaggagcaggcaaaaaaactgcccggcatctacagccagaccattgagccaggtctgtcccatttcttttccttactggagaacagttttcccggccacagcatccacatatctgccctgggacaaagcctggagcatttcatgaagaatgcctccatgggcatctcctccgcactgcttggctggggcgcctctgccataagcgggattccctccctgttccttgatttcatcatcgccgtgatagcctcatttttcctgacaggcagctacagggagacgctggatttcctgctgtgccagattcccggcgacagacggcagatgctcctgcagatatttctccatgtaagggatattgcctgccggcttctgagggcttatgcgcttttgatgcttctgacatttacggaactttatatcggattcctggtccttggcattccggccggattcaccctggcctgcatcacctcgctggtggatattctgccggtgctgggcacgggcaccgtgctccttccctgggcgttcatagcctggatgaccggttccaaaagcctggccctgggtcttgtgtgcctgtatctgctcatagcagtggtccgccagaccctggagccgaaaatcatcggccttcagatgggcctttcccccgcagccaccctgctgtgcatgtttgcaggcggcaaacttctgggcctgaccggtatcttcctgtttcccatagccgccgccattctggcagaactgcgcagcggcactacctatccctcccaggaacaagcttaacccagcgcttttactgactgcgttcttcatgactgcgctctccgtgactgcgctcacctcaaccgcactatccccggccccagcatcccaccaggcaagaacacaaccatcccccaaaggcaggtgttgcatatgaagttcttccataacgttacagccaagattccaccggtatttacctctaaaaacacagcaaaatcacccagacaccaaaacgcggctcctgaaagagcagaaaaaaaagtccgttccctggttttcttcgcagccggcctggttctggctgctgtctccggcctgctggggctctgtgcccggacggtgcccgggtttgcccagttttactccgccaccgtgtaccctttcctggcagggacattaggacggttctgcagcctgtttccattttccctatccgaaatcgggctgtatttcctctgcctgctctgcatatgctacatgattctgcatatcagacagcctgttgcgctgttttcccgtgttctttttctttgcggtgtcctgttatttctgttcacggtaaactgcggcatcaactattaccggactcccttttcctatgaggcaggtattgccgcagaaagctcctccaccgaggagctgctggcgctgtgccgttatcttaccaaccaaatcaacagctccctgctggaaatagaccactccggcgatcttctggacggtctgtatcccggacaaatggaagcaacccccgcaccctcggcccgggaactttccagactgggaaaggacggcagggctgctatgattcggctgggccaatcctatccccagctggatggatattatccctatccaaagccctttatcaactccagactgctgtccgtgcagcagctctgcggcatctactcccccttcaccatagaggcgaactacaacagggagatgccctactataacatccctcataccatatgccacgaactgtcccatctgaagggctttatgcgggaagatgaggccaacttcatcggatatctggcatgtatcggctctgactccccggactttcgctacagcggctacctgaccggctgggtctatgcaggcaatgccctggccaaggcggaccctgagagttattatgacctctatacaaagctgtcccctcaggcagcccgggacctggactggaacaaccagttctgggagcgttttgatggaccggtggcagaggcctccacccagatgaatgacaggtatcttaaagcgcacagtcaggaggacggcgtcagaagctatggccggatggtggatttgatgctggcgtattataaggagcaactatagtctgtcccatatcaccggccgcagggttccctatctctccggcgaagcgctggattggctggtacaaatccgggatggaatgggcatacacacaggaggcgtaccggagaactaacattaccggctccgctcaaacctcataccctcatatatacggaccgggttcccccgctccagccttgcgtgttccatccacgcaaggcttttttctttttgctgattccgggcgttcatctctgccagtatgcagcacagccggttcatggcaatctgcttattcatgtgctggctcctggcctgggttgacaccacggctgtacctgtgggaatatggatggcccgcacgccggtctccaccttattcacatgctgtccgccctttcctccgctgcaaaaggtttcaaaacgcaccatcctttcctctgatatccttgggacctggtccagtatgctcacgtccacataccagttcttccgcttgtgtccgggacggtagggacttttacaaatccacagcacactgccctccagctcccgcaaattccggtctgtctcaaacaccacagatgacatgcagcccggcttctttccaggcatacagcttaccaggcgcacatccccgttttcccttctcagttcttcatagagcatggccactgccagctcgcattctgccggcccctgaccggagctaatctgtactctcatagattccctcctatcctttaaacgtgatcaggggacgcagggtggctgttatgtcaatcagcccatactcctgcaatactccgatgacctgctccacatttttatatgcctccggcgcctctgcgaacagcaggttggtatcgtggcagaccacacggctcttaaggccggtgtaccggatggaatcccggtcataaatctgctccacacattggaactccgcaaaatggttgcctcctcccagggtccccaagtcccgtatagggcactcctcctcatacgggtcggaaaacaaaatatcctccagatcccggatggcctccagcctggatacccatttctcctgtttaaacttctttttctttattcctgtatcaaagaggctcataccacatccgatatcatttcccaaaagatggggatataatattcccctgctcaggacagcggttcccacaggaatccgcccgggatgcaggtccggaagccccaccgccttcactacgcccgggagcctgctcactgccaaaagctggtcctttgccgcctgttccacccaattcttaccgttgctgattaatatgcagttttctttctccaaatcaaattctccttcataagctgacagcgctgcccatacttctgtcatttcccctaaaaaagggtacaaaaaaacacgacaacaagccgtgcgcatcaaaaaacatagtatgccgcttcctgtcctactgttctgttatactgttttcacctctgctttaccattacgccctgccaacataacaaccactcctttgctcatgaaggatttgcttccttcgtattctgtattataatataatagtaacccggcaaaatgtcaatcccggaataacccaaaaagcccaccgggcctccgtttccacggaacttttatatcattgcatataccagggcatattaaatgctgtgacagacgccgggcactctgcccgctgttattcatacagggcaggacgtaagcaatgttcaagcatgctctgtaatcaagcaatcgaggaggaattcataatgaaaaaaagaaaaagcctggcggcacgaatcaccgcagcccgggcagccaccccccggacagccctggcgctgacagccgcggtactggcagcagccatggctgtcaccggatgctccggtacaggccggacagaaacagaaccggagagccagactgaaatcacggccggcccggcagttaaccggcctgaaagccccaagcagtcccttggcagccaatccggcgaaggtccggcagcctatgtggatgatttctatgacgcggtaaaccatgacacgctggaaagctgggagattccggctgaacaggccgatatgagctggttcagaaaggcgcgggaggacaattattccaaggtaaatgacctgattcgccaggcgtcgtccgaagcaggccagacacttcaggaagccggaagcgacctgtacaacatacgcgcgctgaatctgaccggtctggaccgggagaccagggacagggaagggtacggccggacaaccggagcatttttaaaggaaatagattcagcggactctgtcaccgggcttctgaaggcatgccttcagttccagaggaataccgggctgttcagccttatgggctggtattatgaaggggacagtgaggactcctcggtaaaggtcctctatctctcgcagccggattccggtctcaggagggaagtctggttctccgaagacgcatccaaccagaagcgggtggaggaatacaaaaaatatctcacaaagcttcacgaaaacaacggcctgagcccggaggaagctgcggccaccgtagcccgggtaacggatatgatgaaggaactggcatcctccacccttaagatagaggaggtctatgacgcggaaaaaacatacaatgtctgcacagccggcgaggcagcaaacctgtattccggcgccctgcccttcagccttctaaacagcatattcggcatactggaaggtgaaaagacagttgtctcccagccggatgcctgcaggaagcttggaagctatctgaaggaagaaaacctacctctcctgaaagaatatgtcaaaacctgtctctattcggatctgtccatgatgacagacaccgcttccctggctgctgcccaggagtatcagacagctgcaggcggtatagaaaagagaaaggattttgagaggaccgtgtctgaaacagtccaggaaaaacttggtttccagtgcggccgtgtattctgtgaaacctattttaacgaggacgccaaacaggatgtggcttccatcatccgtcaaatcatagatgtatacgacaaccgccttgcccatatggaatggatgacagaatccacccgtcaggaggcaaggaaaaaactgaaagccattacagtcaaggttggttatcccgaccaatggccccaggacaaatacagcctggtactgaaatccccggacgagggcggcgtctacattgacaatatcatggaaatcctgaaggcatcccaggactactcctttaagaccagacacgacccggtggaccggaatgaatggggcatgacgccccagacagtcaatgcctattataaccccggaaacaacgaaatcgtgtttccggccggaatccttcaggccccgttttatgacccggaggcagagcctgtggccaacctgggaggcatcggtgctgtcatcggccacgaaatcacccatgcatttgacacaagcggttcccagtatgatgaaaagggaaacctgcgggattggtggactgcccaggataaacagcgtttcagggaactggcccaaaaggtcattgactactatgataccatggaagtaaacggcatccaggtaaacggtacactgagcgttacggaaaatatcgccgacctgggcggcgtttcctgcataacagaaatagccagggaaaagggatatgacctgaaggagctgtaccatgcctatggtgtcatatgggccacaaaatacagggatgaatacctttcctacatcatgaccaatgatacacattcccctggcatcaccagggtaaatgccgtactgtccgccaccgatgacttttatactgcctttggagtcaaggagggcgacgggatgtaccgcaggccggaggacaggccccatatctggtagaaatattttcatatatccaaaatgtcagagtccgggaagcagctgcctcccggactctgtattgccattattactcttctctcttcttcctgacaatcagccagatgattacaaacccggtgcataaaatcataacctgaaatataaggatgacacagatgcctgccagcaccagaaggcctacaacccttaatccgctgtcagaacttccctcaaggtccgttcctgcctggcccgcgtcctcctgtgacggaacttcggagtaagtaggtaataatcagtatctgcaaatttccatccacatttgataagataagttcaaatgatggaggtgataccaataaatacgaatgacaatgtaacctcaaaggctgacctttgggcagaccggttccatgcttttcaggaaagcggtttatcccgcaaagaatggtgtcagcagaatggaatcccacagtctacactgggttactggatccgaaagctccagtcagaagcagctgagacagaaagtgcttctgatccggtgtttgcaaagctcccttcggaacatgaactccatttcagtacagcagatacaggaaaacctcctgtgatgctctgtctcccggaaaatatccggattgaagttgctgcggactgtccagccagactgttgactgccctgcttcaggccttaaagaactatgcttgatttttacggaagtactacagtctatctggcatgtggctgcacggacctccggaagagctacactggtttagcggccatcatcaaactgaaattccatctcgatccgtactcccgctgtatgttcgcgttctgcaatcgcaggcgcacattgctcaagatccttcagtgggacgggtcagggttttggatcctgatgaaacggctggaccgcgattccttccattggcctgacacaccggatgaactgcagaaagttacgctgaaagagatccattggctgtgcgatggtttatccctgaaccccagcggcgcatttgaagaacgtcacccgaagatcgtcatatgagcccggatcctgtcaattcgcaaaaagccgaaaatcactttgttttgggcggattttcctccgtcccggaatgcagtttcctataggaacggaatgctttttctggtatactttctggtagagatttcagaaagttgaggctgtgttatggatccgctttttacagaggaacaactgaacaagatgagcagggaggatatcatctccctgatgaaaaccatgcgggagcattatcagaaacaggaaacaaagatccagatcctcgaagaaaaaacaaaggaactggaattcctgaacgcgatgctttctgaccgtctgactcttgcgcagcggaaacagtttggcccatccagcgaaaaatatgcggatggctatacgcagctgaacctttttaacgaggcagagcaggaagcagagcctgatgcgccggagccggaaatggaggagatccatccgtcttcctataaaagaaagaaacgttccggcaaaaaggaggaagatctttccgcctttgagacaacggaagtaattgagtataagctgaccggcgcggaccgaaactgtccggactgcaataccaaatataaagtcgtgacaaaagagacggtgaagcgcctgaagtttgtgcctgcacggtttgaagtggtggaggaggtcacctatgtttacagctgcccgaaatgcggggcgatgaaacgtccggaaaaggcgccttcccttctcaaaggcagtgtggcaacaccatccctggtggcaggcatcatgaacgcaaagtatgtgggcggcatgccccttgcgcgtcaggaacgggaattcgcccgttacgacctgaacctttccacaaagaccatggcgaattggatcatccagtgtgcggaccggtatctgcagccgctttatgaactgatgaaggaagaattcctccggagccggtacgctcatggggatgaaacccgtgttcaggtaatcgatgagccggaacagaaaggttccacccagaactggatgtgggtctatctcactgatgaatacagcggcgcaccccggatggtcctcttccaatacgaaagaacccgggcgggatatcatccggtggaattccttggggatcagtaccagggatatttcacctgcgatggataccaggcataccacagccttccggaaaggatcaccgtgacaggatgcatggcccatgcgaggcgcagatttgatgaatccctgaccgttttgaaaaaggactttaccaaagagcagctgaaggaaacaaccgcatatcaggcaatggcacggatcgggatgttctataagatcgaagagatgatccgtgacaagtcaccggaagaaaggtatgaagagcgtcaaaagcaggcaaagccgcttttagaggcttttttcgagtggcttcataccctggaggatgctgtggacagatcttctaagatcggagaggcggtcctgtatacgctgaaccaggaaacctatctgaaaaggtatctggaagatggccatctgagtattgacaatctagctgcagagcgggcactgaaaaattttgccatagggagacgcaactggctgtttgccaaaagcatccgcggggcacaggccagtgcgactgtgtacagcatcacagaaactgcgcttctgaatggactgaagccatacaactatctcacatatgtgatggaaaagatgaaagaactcggtgcgtttccggcaaaggaagaaatgctggagcttctcccatggtcctccaatctgcctgatgattgccgcagcaaacttaaaaagtaaaagacagatcttcccccggtaagtgctgggggatttcttattttgtcaagatacggattattacttacttacggaacttcggatccctcaccatcctgctccagtccctggagcctgcgcacatccccggccagggattccagttccctgctgtcaaacacatcccgcagcccgcagcggttcatggtgccgcaataaggtgcatccagaccttcatgcaaaagtcccatgtaggtatccacagcgccgtcccagtcgctcctggacatggtccagaggtcaagggccgacagcgccgaggttccatatcccatatagtacagggggctgtaaaacaaatgggacacatccacccagtcatagcacacaccctcatcgtagacatcataataccatccatgataggaatcctgtatctctttgaatgtgcggttcatgtcctccagactcatgtccggctccatgtaaacagcttcctcaaattcctgcagcatgcaggacataattgtcacatacagcatatccgtaacggactcaaactcaaaggcctctgccccttcgccgaacatatcccccgcatactggttggccagcatctccaatccctgtgactggacctcgcacacatccacactgtaaccctggaacagctcaggcaccgaattataataataggagctgaaatgcccgaattcatgaatcagggactggtaatccgtaaatgtgtggtttctgttgatgaaaataaatgcgtctccatagcttgggaaccctacggtataattattatccacccggtcctgtccgtcttcccctgaccggatatcatacagctcattgtcctgcatataccggaaaatctcacccagctcaggattcaccgacttgaccgttcttcccacacaggccagtatatcctctgtggaactctcttccataaggtccagggagtcataggattcctgggccacatccatatgccagatgtcattattcaggggaacaatactggtctttacatccgcgcaaagctcctctgcatcctgaagggtatagtcccttccgtaaacagcctcaaacgaatactgggcatagttatcatagcccttaagctccgctatccggcggcgcacctgaacaagttcccggaacttgctgcccagcacccggttcttttccctgaccaatgcatcctctatctctgcatattgcccatcgtcaaggtccggttcccgttccagccggctgtagctccactgtccgttctccagctccaccgtaaaatcaccggcagccagtttatcatactccctgagaagctcctgctccttccggttcagttcggtcagctcccctgtattttccctgtaatattcgatgtaaggcgcattttcaatccccatcttatccgccaggacttttttataggatgaattcattcccttttttagacaagccgcggccttatcccccatctcggaataaatgtccgtagtatatgcctgctctgaggcagcctgctcatccgacacatctgcgtcatattccagctgggccatataagtcagggtggccagacggtcatactcatccacaatggcatcgtagagcctcagcacttcctcatcccggccttcaacagcacaggcctgttcaaagtcagccatggcctgttccatgacagccgggtcataatgctcgtatggcctccgggaatagggtacggcttcatgggccatcacgccggccacgccggcatttcccgctgcctgggcagccaatctttcctgagccgcgccgcaggcggcaatggacagggacatcaccaaagtcagggccagcgccgccccgcgcctcagattccttttccacattcctttattcacagcaggccctccttacatattatggtatatgcctattgtaacatcccggacggtttaccgccagttgatttagcgccgaatctcccgtccatactccctgcctaatctccggtcagccatccttcctcctccggaagcagaaaatagttattgtccctgtccgaatcagcaatcatggcatccagctcccgaatcagatagctgtccggcatgttcctctcccagaaccggtatcccttggtgctctttatgcctttgacgtcaatttcccgtcctgcatagtaatcaatgtatacccccgcataggtagctgccatggaatgctccacgtctgtccccaggttcttcacaacgccccttatctggtcactgatcagcttttgtatataccggcaggaccagtcctcaaaatccagcaggtccggattggcgcttccgttattccgggcccaggccgacacatccacggctctggtggcataggaaatacttccgtcctcctcccatagcacctctccatactggcagggcggtatgctgagggcatctgtcacgatttcctgtatgccgtaacttccttccggaactccgggttcgctcttatgcttgcggatgcgctgcacatgcagatgtccgctgaaaaaaagcgggagctcatatttctgaagaagggaaatcacctctccattgttgtccatggcgcactgggtggtatacatcctgctctgggccaacagattatggtgggcaatgggtatcacaaacacgccttcctcctttgccctggccagctgttcatcggcccaggccatggtgctgtctttcagccttccctccaccttgttatccggctcatattgacaggagtccagcatcaggagccagtttctgtcatccagggcgtagacatagctcagcgagctgctgtcccggctcaatgcctggtcatatccgtattcatggtaaatctcatggaattcaggtccgtcaatatagggagccggctctttccggtcgccgtagtataccgcagcgtcgtggttattgatatcatggtttcccggtatcaccaggacctgtatgccggcgtcctggacccgcttgagtcttgccgccagttcctcatggttcatccgctccccgttcatggtaatatcgccgctgagaaccagggcagagggccgttcttttatgacctcgtccagaaatgcttccaaaagctcaggcagatactggaccaccttcccgtcgcaccgttccacgaacagccggaaagcctccccgccgtctccggctaaagcgctttgatagtgaaggtctgttgccaggatcagcttaggcggtatgtagggttcctccggagccggagggttccacataccggggaatttcttcttccactccttatagccctcctgccggattacttcatcctgggtttccccggcctgggagtccgtagccaatgccggcccggcctgttcctcccactcctcccctgtttcctcttcccggatgctctcaggcacctggctttccctgcgctcaaccgatgcagaccctgaaggctccattaaagtttttaaaacgtgcagtaccccgaagcatgccataaataccatggcatacatcagggcacttatcatccaggtctttctcttcatgcagtcttctctttccgtattaactatcgctgtgttatattatgcccagttccttcatggcatacgcgattccgtcctcctccacatcctttgtctcgaacgtcgcgtagggctccagcacctcgtcatgctttcccatcaggatacagttgcttgcgtagcggaacatggcaagatcattgccgctgtcaccgaacacataggcgtcgtccagagagattccataatgcttcagcaccaaatcaatggcagttgccttggaatgtcctctgggcacgcattcatattccccgtttccccggtctatgatttccatgtccctgagccgtccaaaaagctccttgggcctgctgttttcatccgagataagataaaacttatcatagtcatagcagtcgtcttcccagtcatattcagacaggcagcctgaacgcctgagcgacgccttcagctgctccacccttggaataggtgactgtgacctgtgaatgtggattccgtccgacgcttcaagggctccgtccagtccgcacgcatcaatatggctcttgatatccagccctctctcatgaggaatgtggtagctgtacattaccctgccctccgcaaggatatatgtcccgcagccgcacagatatccgtctgcttccaccagcttcttaatttcacccagatgggcatatacacggcctgtattgatgaacaccagatgtccctttgcccgcgcctccttcagcgcctgtaccgcactttcgggaacccggcctgttttctcagacaggagggttccgtcaatatcataaaataaagctttcgttttcttattcatcatctctgaacacaatggtctgtgcttcctcgtccatgctctccacgattgccagtgactccagccggattccctctgaacgcagcaggtctccgcctacctggaatcccttctcgatgacaatgcccgcgcctaccagctcagcgccggaatcccgtacaagggcagccaggccctccagagcctttccattggcaaggaagtcatcaatgagcagcaccttatcaccggctcccagaaactcttttgacacaatgatatcataaaccctgccatgggtgtaggactccaccttggtggtataaacctcgcctgcaatatttttggtctgcgtcttcttggcaaatacaaccggcacatcaaaatactgggccacaatacatgcaatcccgattccggaggcctcaatggtaagaatcttggtgacctccacatcggcgaacctgcgcttgaattctttcccaatctctccaaaaagcttgatgtccatctgatggtttaagaagctgtccaccttcagaacgtttccggcttttatcttgccgtccttgcgtatcctgtcctttaaaatctgcatgtacgagtcctcctttttcttttggcaatccttctttactgtgcggcagttgtctctgcagctgtggtttctgccggagctgtggtttcctctgcggcagcagtctcttccgctgccgttgtttcctctgcggcggcagtcccttctgcggccgttgtctcctctgccggagcagctgcatcctgggcttcgttgactgcgttgtccgccatgaacttcattaccttctggttcagggccatttcatccagggtctcctggccgaaatattccactgcggcctcgagggtctggccgttcatctccgcaaatgcctggcggtcggcatcctccagggtaatgccctccagctcggcaaccttaaggataaccagctggttcttcacatcatccttcactgacgcgtaaacagcttcctgtaatccgggaacatccatgccattggctctggccatgccggacaggttggtgccgtacatcttagcctgctcttcatactgcttgatgcggtcattatagcgtctggaaagggtattcttattcagcttaaacttggagttctcaaccacattcttaagtacatactgctgaatctgaaggtcggcagactgctgcttctgctttaaaaggtcctccttaacgctggccctgtactcatccactgtcttaaaatcagaaacgctctgtacaaatgcgtcgtccagtacggctgactgcttttcctttacagcattcacagtcacctcaaatacaacgtcctgtcccgccagggctttctcgctgtagtcctccgggaacgtcaggttcagttccttcttatcgcccttttttgtgccaatcagtccatcctcgaatccgtcgatcattttgccggagcccagggtcaggtcctgtccttcgccggtgccgcctgcgaattccactccgtcctgttttcccacataatcaatgttgacaatgtcgccttccgcggcgggcctgtccacttcctcaattttaggattctggctgagtacctgattgatttttgactctacctcggcgtctgttaccatgacagccggtacatttaccttcacgcccttatactctgccagctctactgtgccgagattttcctttccttctgtctggctggccccgcagcctgtcataatggaggccgcaaccagtccgcataaacatatgagtgctaattttttcattctacatatcccttttctatcctgatttcacacgcaggaccttgaattatccttatttttccattcatccccaaatagcgtgcgctgtacatagttatatcatacctgtccgtgaaaaaaaagactttccaccaatttcatgaaaatttaagcaaccgtccacagactatttgtagaatgccttaaacgccttatacgtattatagacatccagcttggaagccagctcaaaaggagaatgcatggacaggatgggcacgcccaaatccacggtatccacatccatgtgcgccacgaactgggcaatggtaccgccgccgcccacatccacggctcccagttcaccggcctgccaatacacgccttcttcctccataatggcaatgacctttgccatggtctcggcgctggcgtcgttggatccggactttcctctggctcccgtatacttggtcagcacacagcctttgctgatatagcttgtgttgcggccctcgtacacatccgggaagctggggtcaaatgcagcgtttacatccgaagaaaggcacagggatttcctcatcacttcccttggcctgacacctgcctgctccgccaaatcctctatgtaatgaagcacaaaatccgaattcagtcccgtgtttccggcggatccgatctcttccttgtcagccagaatagtcaccgtggtgtggaccggcttctttgcgtctatctcagctgtaagggccgtatacgcgcaaaccctgtcatcctgcccgtaagcgcctatcatactggtgtcaaagcccacatccctggcctttacagcgggaaccatctcaatctcagcgcggaagaaatccttttccgtaattccgtatttctcgtttaaaaggcttaaggccaacagctttacaggttccttaacctcctcatcctggaagggaagggagccaaccacaatattcagttcctctccctttaatccgtcctttaagggacgctcattctgcttggcggccagatggggaagcaggtccgtcacgcagaataccggctccttctcatcctctccaatggaaatctccacggtctctccgtctttctttaccaccacgccgtgcatggccaggggaatggtaccccactggtatttgcggataccgccgtaataatgggttttaaaaaatgcgatatcctccttttcgtacagaggattgggctttaaatccaacctgggggaatcaatatgggcaccgttgattctcaggccctggtccagaggcttctttccaaatgtggtggcaatcagcgatttaccgcggttcacataatacaccttatctccgggctcataggattccctggagtcaaaaggcttatagcctgcctttttaagcatctttacagcttccttcacacactcccgctcggtctttcccgcatccagaaatttcttatagccctcacagtatttaaacgccttttccgcctgctccggtttatcctttccaatatgagggaacgcccatgtaagctgttcctgtaattcctgtccttttgtattcttagccattattatcctcctggtatattttattttataaactgatgctttactgacttaagttatgacggttgcggcatttataattcaaatgtccgttcccgtccgccgcgcggctccaccccgccccatccggtcctgcctgccgccttacggcggctgtgcttcacatccagcaacagggcggaggactgggcatcaccggacctggcggcggcatctatcatcttcttgatctcagcgtctcccagccgggctgaccgggccatgaagcccaggatatcccgctctccacgttcaatcagtccctttgtgccttccccggcatgaatccttacataatcccagtactcctcctctgcattttcccttaaaccatagggccagtacaggcggtacagggccaggcgcaccgccagctccggcttttcctggacctttacatggggaaacagcctgtcgtattcatcgaaacggaaatcccctccgtcaaaacagtaccgatacatatgaccgcagccatgcatctccctcatgatgatgcgggccggtgtgttttccacggactcctcaaaaaattccggaaatacaagctttgccagaagcgtacccgaaccggacctgtaatttacggacagggtctggtgaagctccgacaggatgtccttaaagcaggacttcctgcccttggcaatacggatatccaggcattccaggcctgtacagccggtaaataccccggctccccagtcctccacggcactgctgcatgaaagcctcttcaggccgtagcagttgtagaagccataggcccccaccttcctgattgtatccggcaggctgattacctccacccggctgccgcaaagctccggctctccctggtactcaccgggcggcggttcccgcctgcggactgtatctgaaaaaaggtaggcggccagctctgtcaccggcatgccgtcagccgtccccggaatctccagaattttatccaaaccataacaacgctggaggcagatcccgtccagcgttttttcatataatattctcatggtatcagtttaatcagtttagtggattttttcaagactattttacttccagcaggtattcccatacggatgaccgccatttcactgactccccaaccgcctgactccattttccgatatcactatatccatcatctggtcgtggggctccataggtatgtccgcgcgcatgattcgttccctgcatatgactgccttcacggcccgggtcccgcccagatagcggtcatagtacccgccgccgtaccccagccgcctgccgtcgtaactgcatgacatgcatggcacaatggccagattgatttcctccggctgtatgaccggagcatgtgctcccggttccaatataccgtattttcctgcctccaaatcccgaaggctcctgatttcacgtacctccatgatccctctggcagtgcacttgggaacacccacccgttttccctgccttaaagcctcctccagtatgggcgctgtattaatctcaccgctggttcccacaaagcagaacagagtctccgcctgctcatattccgtcagcccggtcacatgccggaatatctgaaggtccgcctcctttgtgtacccttcatccagcgctgcaaccgcctcttttgtctctcgacgcaatgcttttttccggtcttctgatgttttcagatcctccaaagccatagatgcttcccctccctgtcagtatgatttcttctattttatagaccacatatcctgcgtccttaacagcctgtttaagctcattgtttccgtacttctgtttcatccgcaccagggcctcgcctttttccaggtccacctgggcccacaccccttccaggctgttgagggcattttccacatggccggcacaattaccgcaggacatgccgtccaccttgagaatccgtgaatagggataatgggacttatccttatcactgactttgatttttttcaccgatgcctgggacgaggccccgcagcacccggaggttagttttttggcgtagctcttgagcccaatgattgcaatgacaatcagaactgcacatataatggctgttgacataatatcatctcccttatgcttagctgatgtgtggtttatgtgataagattagcattggctaaccaaaatgtcaattccttccttctgcaatcttttatttccgcattctcccccatcccacaaagcaaacatgtcctgaaagcccgccctccatataaaaggcagcttccaggacacccaatcttactctgctggctctgcgcccgcgaatatttcttaacacacaactatttctctttcatcatagccttaacaagggcagcccccgcaaacagcataatgaatataaaggggaatgccgccgcaaggaaattgtctgaagcggtttcaatccacccgcaatcaggagtcccacagccagaagagactgtacaacgccccacagaacctttcttccgttcttcggattcaggtctcccttggatgagaacatggcaagcacaaaggtaccggacaataaggactgcgtctgtctgagctgtccacaaatgcagcatggaacccgggctgaatccatcctccatattatccctcagcatatcatcctccatattatccctcagcatatcatcctccatgggcatattcctgacttttagctatattttcagtgtacattgttttataatatttgtcaaaaagaaaacgaaagccctttccagtccaatgttctaccatatgtcccggtttcatatagtgtaacaggaggtgcatatgaatatttcacaaacaatagccgggattctgttcgtatccgtactggggacccttctccatttcacctaccgctggtccggccgcaatcctctcatcggccttattgcccctgtcaatgagtctgtctgggaacatatgaaactgctgtttttccccatgctcctgtttggtctatggagcttaaagggcgtgaccgacgcctgccgcttatctgcatttcacgcaggactgcttatgggaacgctcctgatgccagtgctgttttactcctatacaagcgtgctgggacgtagcattttggctgtggatataacactattttacatttgtgtaattgctgcatttctcatataccgcggactgtcagggagctgtcttttggaaaaatacagtcatatgacatccatgaccgtgtttcttttattgatttgttttctgctgtttacttattttccgccgggattttctatttttaaggatccggaagggtgacggaggtatgacggcagaatgacggcgaaaccaaaattttaacgccattaaatactgactggaatgggactttgaaatagccgatatcacccgtaacagaacttcgaaatagcccgttatcgtccattttggaatttataaactgtctgtaattatacgctgatttgcgtaagctaatgcccgtccggccatgctgcataatcttagaatgcagtatggctgacgggcattgctatttcgccatttatgcagattataatgacattatacactgtaaatacaggttctgtattctcataatacggtccattcatacccgtcaaaccggtcgattcattttaccggaccggctcgtaatccacggcggactcctggccggtggactccagtttgaatatgacaggccgcagtccgtcattgcagctgcatatggcgactcccggctttctaatccagtctccgtaataaaacagttcatttcccgcaccatgggccagggcaaatacgtactgataaatggctttccatgcctcatcacaaagcccttcaggctttgcataatccgcataaaatacctgcccttccttcatcatgggacaggcagtcaggccctctgccccgtattcccgggccagttctttgtccagggtggtttttaaaacagttatcttttctttcctcatgttccgaacctcctttgtcactgcggttacccgatgatataatatccggacagcttaaacctatttttggatgatttgcgtccattcccttgatttaaagtattcattgatatggtattcctgttgtcccatatcgtttctgggtttccccaatccatctttgatataaccccttctaaaagctatggtaatgagaccatttgattccagcataagccttctgattgcctttagaggcgcgtgcctgctttcttgtaagagactcctgataggattcctcaatggcattggcaaacatctcttgaaaaagttttcatgcaaagaaagaccagccgttcatctcctactgatctttacaagtctctcccatatatgattcagaaaatcccgatacccgcaatatgtatcttcaaaactgcagcacacttcctcctgcatccgcctgcagcctccaccgcagagcttccggtatcggcaatcgccgcaaagtacggggagcttctccctctttttgcatgccgatacagctgaacgttcgtagactgtacgcaaagagtcccgcgtcaaattacctactgcaaaaggatccaggcagtaaaaatcacagggatacacggttccgtctgcctccacaacaatctgcggctggcagtatccgccgattccgcaagctgttacaagccctctggaaagcagctggaccagatcatcaaacagcttcacgctccggtactgtccgtcacagagttccttataccataagtcaaacagttcctgataaaatgatgcaaaccgctctggcgtcagcgcaaacgcttccgttttggaacacgtaagatcacgcaagcatggagtaaactgaacgtattcaattccaagctttttaatttcattccagacctgtttcggatgtctggctatctgccgggttaatgtgcatagtacattgtattccacacgataccgcgtaagccgcctgatcgtttccaccacacgacggtatgttccattctttttttcgtccgtccgcgcatgatcatgtgcttgcgaaagaatatcacaggaaattccaatcagaacatgattctctgtcaggaattcacaccactcctcattcaaaagaaggccgttggtctgaatcgtgtaaaaaatctgcacctctgttttcttttgctttatatactcagtcagattccggtaaaaatcaagccctgcaagcgttggctctccgccctgaaaggacaatgtcagccggtctccggcttccagttcagtcagaatgtgatcgagcactgatctggcaaccgactccgtcataatcccaaaggaggacacctcccgcaaactgctgatatcatcataaaagcaatagctgcagcggagattacaaagtgacgatgccggtttcagcatcacggtaagctgtttcatcttatctgcacctcttatctgatcaccctgatcgatcttccctcataaatgcgcggcttcatcagatacgaatatccattatccgaataatccttctgtcggatcatctgcatcaaccggcttccgaccaaaactcccatttcataaccaggatggatcgagcaggtaatgcctgtttctttccagtccttattggaataatcaaagcagacaagggaataatcctccggaacattctttttcatctccttcagactggccagtacagactgcaggatcatatagttacagcagaccacggcagtacatttttgcagactctttaaaaattttccaatctccttataaaagccgtccgaatgcgcttcattggaaatgcaccacttcacataatcgtcttcaaatacaatcccggcgcttcttaatgcactcacatatcctctgaatttttcaatactctgataattatcgtacacaaagatgccggctatatttttatgccctgcttgagtcagcagtccgatcagttcccgagcacatttataatcattattgatcacacgggggtactttaactctttgtaatagttgttataaaaaatcaccgggatttttttggaataaatgttccgataacagtccagattgggatttaaaagacttgccttcacaccatccacaataaacccatcaaagccctgatgcgctaccacatccagacagttccgctcactggaaaatttattgtccgtaaagaatgtctgcagatctgcatccgtatcggtcagtacttcccgaatcccgtcaatcagaccggaattcgcgttggaatcctggccctgcagaatcagtccgatcttcagacaggagttttgcaaaccgactcgactggatagcgcagtcgctttattaatataggaaccgctccctttgacccggatcacaattttttcctctaccagtctcgccatggccagcctgactgtatcccggctgacctgaaactgacggcagagtgcattctcagacgggagcctcagattcgccgaaaatttattttcgtcaatatacgcgcgaagccggttataaatgatgtctgacttctttttgttagtagataaccctgtattcaatgcactcctcccgccagttctttttcaattttccttcacactacagatggaagttctgccattttcaaacattattccccatctacaatgcgcggacggctatgttccgccttctcgatccatccaagcagtttctcccgcagctccagccggaccttgtcatatgccggatcatggatcagattattcaactcatatggatccgtcctcaaatcatagaggaaatcatccgcatacagatccgatgctgcacaagcacctccatccttatccggtgcatagacagaatacagataatacctggttcggatacatcttccaacacggctctctgaaatctgcgagaacacctcatcaggtctattatctgtctttccgcagaccacgtcaagaagattctccccgatcatggcgtcccccacatcgacaccggcaatcgccagaatcgtctttggaagactctccgtgctgaccagctcctctacttcctttccgccctgataggcaccccccgctataacaagcggtacatgagtcgccgccgcatggcaggtacgcttgtaatcgtcgtagccatgcagatgactgtctgtatttcttgtcataaaatgggaaccatgatctgatgcaaaaatgatgacggtattctcatacagatgctcttccttcagtctctcaatcagacgccccagattctcatccaggcttgcacactgtcccaggtaatccggatactcttctgccgcatttccctttaacgctgccagatctcccggaaggacaaaattcttgtatttttctttggatccatgcggtccttcataatgcttgtgatcattctgatgatgcggttcaatctgggaaatcgtcataaagaacggttttttccggtcatactgatcaaaaaactgcagcgccatatccataatgcagtctgcccggtagcctttaaaatcgatgcggttatcattttcatcaaagacataaccgtcataaccatgagaagtaaattccagaacatccgccgttctccagaatccggtatagccgccgcgcagctctttcggaatggctgtaatggtatgatcaatcaccggagctttctcaagttctccatcacttgccaaatgccattttccaatgtaggctgtctcgtatccagcctcctcgatataatctgcaagtgtttttacaccttttggaagcataatattattccgaaagcacccagtctccgtaggatattttcccgtctgaaacaatgcacggcagggtccgcagaccggctgcggagaataagcgtgatcaaactttacgccttcctttgcgaggctgtccagattcggcgtaatgtccagaggctgtccgaaacagccgcaggtatccgctctctgctgatctgtaaaataaaagataatgttttctctcatggtttaaactcctagtataataatggtgtagtcaagagtgactactggttaatagttacaaagtcaaatttaaatatatttgtatagatgccgaaggaggatacgccatctgcgccgctgcaagggatgcctctgtatttgggcgcgccctgcccagcaatgcactccgcatcaagatgtacacagagaagcatctggactccatactggaagaactgcacaaagctgtagacaagctgcaagggaagcctgtttatgaacgcattaaccttcttcaatcccttcgtggtgtcggctttttaagtgcggttgtcctaattgcggaaatgggctcctttgacctgttcccttcacccaagaagctctacgcttactttgggcttgatccggctgtaaaacagtctggcaagttcaacggggataaagtccatatgtcgaagcggggttcaagcctttatttacgattattacattcgcaaatgtacctgtaagaaaaagaatgttgctgttggcgcggtcatgcacaagatctgtaacattattttcgccatgcttagggataacaagccttttgacatcatcacgctcgaagagcactgcagccgctatgcggcagaacatctttttcaaatcattccttgacatttcttagctggactttccgggcattgcgttccataactttgcttctcacaatcatagccactgcaccaacgatcagcgcaataaaaatcagacagtacggactgcttacaaaaatggatggatttccttctgagatcaaaagcgcacggcggaaattagtttctgtcatattcccaagcaccagaccgaggagaatcggaactgtcgggaaatcaagcttatacaagatccaggcaatcacggcaaatgtcagcgttactgctacatcgaagtaggacttattcaccgaataagctcccgcaaagcagaaaatcacaatgatcggtgtaagtatttcctgcgggatagagacaaccttagcaaacagtttcgtcagatattttccctgcagcagcatgaaaaggtttacaaataaaagcccgatcatgatcgcgtacataatatctccctgtgtcgtaaagaggcttaagccaggattcagtccattgatcatcagcgcggacagcatgatggccacgcagccgtctcccggaattccgagcgtaagcagaggaatgagcgttgcaccggttactgcgttgtttgcgctttccgcagcagcaattccttctaccgatccgtgtccgaactcttccttgtgcttcgacatatttttcgccacgtcatagctgaaccaggatgccatagacgctccggttccgggaatgattccgataatcgtgcctataatcgaggaaataaatgccgggcgcaccatgcggcggtactcatctttactgatttttccatcatctgcaattctggacgtatccagctttaaacgatccggcttcagttctgcctttttcaaaatctcaatcagcgcaaacaggccgatcaggcagattgcaagatccagccccagatacagtctggaaatgccaaaggtaaaacggtcataactggtttgcggatccgctccaatacaggaaacaaatagaccgacacaagctgagatgattcccttaagcatgctctttccggaaattccggcgatgatcgtaagaccgaagacacaaaccagaaaatattctgccgttccgatgtttgctgcaaccttcgccacctgcggtgctaaaaacaaaagcgttaaagcggagaatatacctccaaatgtagatgcatacagagctatcttcaaggccgcctttgtccgtcctttttctgacaggggatgtccgtccagcatggtggtggctgcatgcggtgttcccggcgtattgatcaaaattgcagatacgcttccgccgtaacctcccgcgcagtaaattccaagcagaaacatcatgcccgggatcgctgtcatcttgtaggtaaacggcaaaaacaggataatgcataagattacggtaagtccgggaattgcagcaaacacagagccgataaacaccccgagattcatccagataaagttttccggtgtaaacagcattttcagcgccggtccgatataagcacccatctcacattcctcctctaaaattttacgttcagtccaaaacagaacaccgcccagatcatcacagccagccccagcgtaatcacataatagctttttttccggcaccggaaataaagcaggaaactgactgcacagaaaacagcgcccagcacaaacagatccgttactttgcagatcagataagtcataatgaggatgccgagaattaacaatgccttgatctctgtcaacagatgaaacgtatacgtctgaaccggttcctttctcagcagctttgaaacattctgaatgatcagaattaagctgcagatcatcatgagcaaaaataaaagtcttggaaatactcttccatttacaacatcactttccgaaacagagacctgttccggcatgatcagaaacaaaaatgcccccaatgcaaaaaataatatggctccgaccagatcggtcggaattgtaaattgcttttcctttaatctggatgcgatctgatccagtttcttttcctgcatcgttttccttcctcccgttattgcaatgaatatgtctcacggctgacataacatcagatcgccgcggctaagtgtaaaatgagaatgctgctgttacacagcatcctcatgattatgatatttccttcactggttactgtacaaccagatccttgtattcgtttacaatgctctttacgttttcaatgtgttccaaaacctgatcattggtcatggtgtctacctccagaagcatggtatccgccagccactcgctgacactctggtctgcaaggattttgtcatagagttcttttaatgccgcaatcttctttgcatccgtacctttgcgtgcaaggatcaggcaacggtttctgaagtaaggatatccgtacttaccgacaccttccactcctgcaaacggaccgtctgcaatatcctcgccatcaaaggcacagacaatgctgacaccattctgctgataggtctctaaaatctgggactgatgggatactgcaaagtttgtctctccctttgccacagcttgggctgcctcagccgctgagctgtacgcaacgatcttgatctggtctccatagcccatggatccaaacagtgcagccgccaaaaaggcctccgatccggttgctccgtttgttgcaatggaaatctgatttccctgatccatgtaagactttaattcatcgatagaagtgattccaagctttgcatctgccgacatgacaaatacggaggaatacaaattttcaacaaattcaaaatcgtcataactgaactgcatcttcgccggatccagaatcgaggtaatggaaaaaagaccttctcctgcaaataccagttccgaatcatttgcttttgtttctgccacccagctgtttaccgttgccgcatccccttttacggcatccgccaccagtacaatcttgtctgagtaagtgtttgaaagactggctgctttctggcttaccatggctgccacaccagatggcgcccacggacaggtaaccgtccaggtttccgtcttttcggaacatcctgcaagagacatgactgcagtcaaagcagccaacccaagtgctaacatttttttcttcatgacccttctccttttgttaattttgattttttcatacaacagtttctttatttattagttcaagattaacatacgttttttttactttcaacaacttcattctattttttcacaaagctgtaggttttgcagctttatgtgcaaaagctgtaggggattttgataattattagacacattgtcacgataaaacttcgaaagacagcgaaaccgccactttcatgacccccgccagcccataacccaaatcggattcatcttacacttctgcagcaaaaccaggcatacagcgaagatgcctgccagcactcagttggtatgtactagggcgatctgctctgcgcttccccagaatacggaaatcagaatgaggatcccggcagatccgatcatagctaccacagccggacgaagagaattcaggattccctgcaaaagcttcatattcttgtataagatagaacgtaagtaggtaatcatccgtaccttgatttttcaaaataagccgccccaaaagggcggctcaaattttattcttttgttcgaagttcttccggaagttcgcccgaccagggcagaagccgatccaggtcttccggcttcgggaacgggtccatccgccgcagctgatccagaacgtatgtaagataaagatagggtttcacaccatttaaaagcgctgtctctgtgatactgtaaaccacggcgctggcaccgattctggccatggcctgatatgcgaccgtttctttcagctgctccttcgtgaaatcctttttcagtgcggtaagcgctgcgtcaaaccggcgtctggcatgggtaaagcatccggaaacgatgatggaatccttcagcccatgatatgcctgataactatcgcaggtaagatatccctgaaactggtctcccaggaagttcgccggatcataaccggcgcgtgtccgctcataatcaaaaagaaccatctgcggggcttcgctgtaacggtctgtcagataaacccacatccagttttgagtggacccttgcttctccgattcgccgattacctgaagacgtgtctcatcgcaatggatatatcggcttttcaggaattcttccttcatccggtcatagagccgtttcaggtatctgtctgcgcagttgatgatccagtttgccatggtctttgttgacagctttaaatcatatcctgcgaattcccgttcctgtcttgccagcggcatgccgttgacatattttgcattcatgatacccgcaaccagagatggagtggcgattcctctcatgttttgaaaagatgtatcagaaactataaaggcttgctctatgcagtctacatattcggtgtcataagaatagggaggctccttttttaattggaagaaaatattagaaataaaatcaatgaaatctaaaaaatatgttgtctgacaagatgctataaaaaactcaatttgttttttcttatcattaaaatatcctttgctgggtactaaacttttagttccgatttctcgtgaaaaagtagcactgatactttatattcatatacatctggtaattcgttaggattagcatttctttctgaatagagtttaaacatattaatacctccaatacaatatattataatgtaattatgtgaaatataaaagagcctttataaattcgtttttccatcattgaaagatagaaaataatttgctaaaatatccgtagggaacaatcatgttattacaaggtgttggccttccattttacataagatgggaggtggtgcgaatgaaatttgacttcaaggacttaatggcctttggtatgttcattctcgcattactgacctttatcttaaagattagtcagtagcgttttcttaatcccggaaacgggtacagaaaaaccacccttgtaaacttggccgttaaaagggtggatttttctatcgttgatataggccaacctcttgtacgaggtggttgttccttttttattacacttctattataatcaatccacctatgaaattcaagtgattcttaaaaaatcctcgttaaatcgtcacgccagcgataacaattcacctatatttcacctcatatccatcaaaagcgccctattttctagccgccgcccacgaactgatttttgcgttggatcttccgcaaatgttccaaaatcagctgatcgttcagtttcggaacaatcttctggttactccacccccaatttgctcctgagaatataccatataaaatctccgcatcagttttaaattctctgcagaatagcctttgccataattttttgtcaggaatttagataattcctttaaaagctgcctgccataagcggcacgattctccccattctgctcttcctcgacaatctttctgccgatctcgtagtatgcgtaaactgatactcttatatccatgccagggggtcccgcttgtcataataccacctcgccactatcgcttcctctttctagtataaatgtttttaaataaatttatgttattccccttttatggtatactcttatttataccaaatccggaggaaagaacttatgcctaaaaacgcaaattcaatttcgcttactgatgacgagttgcgatatctgacatcagtcactcaaaaaggaacggttcaggccagagtttataaaagagcaaaaatacttctcttaaaatcccagaggctttccaatgagtttattgcggcctattccaacaaaacgaaaaaggaaaggccaaaaacaagctgaatcataaagctatttaatgttaactatactagtacagcattgccaaaataataatgaatagacgttgcttttttattgtagtcggtgcataataattctatcactaaagaatggatgggttattatgcgaaggaaaacaattgatactatcccggttttatctgatgccatgaaaaacatattatctgctttttcaaaaagccgctcccttccgtcaggactggtcaaaagagccagcattgtcctgcttgcgtcacagggggaactcaaccagaatattgcaccacaggtcgggcttcattataataatgttgccacctggcgcagtcggttcctcgcggcgctcccagccttgcggaggattgaaatggacgccccggaaaagcttgaagatgagatacgggcagtcctgtccgataaaaaacgccccggtgccccgtctgtttttacgccggaccagatcatgcggatcatcggccttgcttgcagcaacccaaatgattttgggtacgaagtaagccagtggagcctcccgctgttagtggcagaaattaaaaagcaggggatcgctgaacagatttctgagaaatctgtcagccgttttttaaaaatgaggtagatttacatccccacaaaatccgttactggcttcattcttcggaaaagacggaagccccggaatcttttgcgcggaaagtaaacgaaatctgcggcctgtaccagagtgcccaggaacaaagccgggaaggtgcacacattgtttccacggatgaaatgaccggggtacaggcgctggaacataaatatcctgacaagctcccattacccggccagtgcgccaaaatggagtttgagtatatccgccatggcacgaccagcctcatcgggttctttgatgttgcaacgggccgtatggaaatgccgtatttaaactccacacgcacagaagaggattttgtggaagccgtgaaagcattggtaaggacagacccgcaagccccatggacatttatatgcgatggcctaaacacccataagtcggaagcccttgtccgctatgtggcagaagcctgtgcccttggcgtggaactgggcaaaaaagggaaaacagggatccttaaaagtatggaaagccgggcggatttcctgcatgacccttcccaccggatccgctttgtctatactccgaaacacagttcctggatgaaccagattgagatatggtttggcatcattaaccggaagctgctgaagcggaaaagctgcctatcaatagaagaactggaagcaagcatcctgcgctttattgaacaatacaatcttacagcacacccatttaagtggacatatgccgggataccattagcaatttaatcactgatatttaagcaatgctgtactagtacagcattgccaaaataataatgaatagacgttgcttttttattgtagtcggtgcataataattctatcactaaagaatggatgtgttattatgcgaaggaaaacaattgatactatcccggttttatctgatgccatgaaaaacatattatctgctttttcaaaaagccgctcccttccgtcaggactggtcaaaagagccagcattgtcctgcttgcgtcacagggggaactcaaccagaatattgcaccacaggtcgggcttcattataataatgttgccacctggcgcagtcggttcctcgcggcgctcccagccttgcggaggattgaaatggacgacccgaaaaagcttgaagatgagatacgggcagtcctgtccgataaaaaacgccccggtgccccgtctgtttttacgccggaccagatcatgcggatcatcgaccttgcctgcagcaacccaaatgattttgggtacgaagtaagccagtggagtctcccgctgttagtggcagaaattaaaaagcaggggatcgctgaacagatttctgagaaatctgtcagccgttttttaaaaatgaggtagatttacatccccacaaaatccgttactggcttcattcttcggaaaagacggaagccccggaatcttttgcgcggaaagtaaacgaaatctgcggcctgtaccagagtgcccaggaacaaagccgggaaggtgcacacattgtttccacggatgaaatgaccggggtacaagcgctggaacataaatatcctgacaagctcccattacccggccagtgcgccaaaatggagtttgagtatatccgccatggcacgaccagcctcatcgggttctttgatgttgcaacgggccgtatggaaatgccgtatttaaactccacacgcacagaagaggattttgtggaagccgtgaaagcattggtagggacagacccgcaagccccatggacatttatatgcgatggcctaaacacccataaatcggaagcccttgtccgctttgtggcagaagcctgtgcccttggcgtggaactgggcaaaaaagggaaaacagggatccttaaaagtatggaaagccgagcggatttcctgcatgacccttcccaccggatccgctttgtctatactccgaaacacagttcctggatgaaccagattgagatatggtttggcatcattaaccggaagctgctgaagcggaaaagctacctatcaatagaagaactggaagcaagcatcctgcgctttattgaacaatacaatcttacagcacacccatttaagtggacatatgccgggataccattagtaatttaatcactgatatttaagcaatgctgtactagtgctattatacaggagcagacatgagatcgcaatacgttttttagaacatttgttcttttcatatttagccactgtttttggtttgcattgaaagacttacgtttaaagctgcggcacctgtccaatctgacttcctcccaggcagtcccgccgaaactcctcttccgtttttatgaacagattgtcattattgtccgtatcccagaacccaataaatctcacccttctcggtccgaatgggccggtaaaacagttcttctccccaaccgctatctgccatcgctttccactcttccatcacagccgccagttcccggtcatttaactttccgtaagttcgtaccgtaagcacaccccaaaggctgccagcatatgcttctacgtctggcgtcatggatgcaacccattttttaagcagttcataatacaaatattctaccagccccttctcagggcagcttttaagctggcctggatcttttcccggatcatgctttcatacgagagaagctcctccccgcttaaaagctccggtacaaaggagtcgctctcattccaataagcagttacagccaatgaattgtacaggcggaactcttgcactgacggactcaattcctgtatcggatgtcccttgcagatcagtgtgccaaatattgtctccaacggcccgttttctttcattttctgtaaaccaaattcctggagacggatatatggttccagttccttctcgatgtaaatctgatgtagattcagaagatacttcgcatagccctccgccgatagctcctgaatcggaaggaattcataatccctataattacgaataatccggcacactgcatatgcatctctgggaacctccgcctccagtgatgccagaggtttctttcttgacacagtggttttatccgccaggttctgtatctccatcgcaatctggttcaacactctaaatgtgagccgtggaggtaagaactgatccaacttccagatattactaagatagtctgccacctcatcaacgtcatatgttctgcacttctcctccagggcctccagttgtttctccgtcatagggaaataaaaacagatcttttccggatacctcttatcaaatgccagatacaccggaatactgccgatccaggatgcactactttcggattctgtttctttcccactgccggttttggcgccttaattctagtgatgagcccctcctctgtcagccgctcactcgctttcatattcaaacggccatacgcctcataatcaaaatagccgttcagttccatcggcagcgttcttccctcctgctcaaacagataacgcccatactgttccagggattttatctctaaatggcattcatactggtctaaatgatccattgcctctacaatctgcagcaaagagtccggcttttcattctgaagcacagtctcgaagacagcccgctcctgttccgaccaggaaccaatctttgcggcaaggtagtttaactgccctaggttcgaatcctgaaacacaaattccccaattaacagaggagccagcccagccaccggggctttcacatctcctatgaacggaatcatcctggaaggatggtacccggccagctcctccaggacctgctctgcctgttcctgcgaagcacggaaccagaatacttcatagcaaaagttatcggtcaagattatccccaccttttgctatgtagtgtaagcctcattcaccttaccccaccgggcaatttttacccctttttagcggttttcaccccttttcggaaagcgcaaccccatccatacacttcggcaaaactattgctcaatttgtttcgccattgagtatgtctttgagccacttaggaaccatcggaactttcttcccggcaaggatcagtttcataatttcttcggtatcctcctgccgccagaaccgattacggatgtagcagtcatggctacaaaacttctgatttttcgtttggctctcaaattcttttccgcaaaacatacactcatgcttgtaaagaaacggatggtttttcatccacaatctgcggcactcatcagaacaataaatccgttttcgtccggcggacttcttctctaatggcttgccgcattgtctgcatacactatcagcacagacctcttccatttttcttccttctctggcttgcagacgattttttgcatatccatctaaaccttttgctttgcaataatttctgaccttgtcccttggaaggtccaatgcgatccctatttttcggtagcctaatcccatgtttcgaagacgctcaatcgttttctgctgttcttttgtcatctgatatcaactccttaacaaatttggtagtccagtaatcactctggattgccaatttgtcaagaaaatcttctgctaaaaaatcagttatttgactaatgtcaaataattcttagctatctgcttacttaaagttcctgcatcattaattccttttaattcagctaactcatcatatactatacctaatttctctattgaatatttctttccatgcacttttgtaaatgggccatcactctctacaaatatcctttccattggaattctttttattatttgttttccattaacgcctctcatcataatgaactaccccgcagcaagctgcggggtatcgaaggttgcaacctctacatataatcccatatgctatactgctttgttttctctacgtttttatagattgttttataatttttttcctgtccctgttctttcacatatctacttatgatttgctcattcccatgttcactcaccgttgctacgtaatagccatctgtccagaattctcctccccacaattttttcttcacttgtggacatttcgcgaacacctcccgggctatgatgctcttcactatttggatgattttttttggactatatgcaggcactgactggataagaaaatgtatatggtctttatctgtacctacttccaaaaatcttatttcatacctttcctgaattccctcacacgtttctttgattaccctatctacatcttcatctattactactcttctatattttgctggacatacgaaatgatacatgagtactgatacattgtgtgacttgcgtattgtttcactcatcacacaatttctcctttcctttttcctctagtatatcacttcctccatgtcttgaaaaagtttgttacgcagcaagctgcggggaattaaaccctctttttgattaaaattaacagaaaaataggctcccaaattaataaatttttctaaccatatctcatttcctgaataccaatgtataattactttacgatttccattcttcttcaatatctcatatatctgttgttctgccatgcgacaatggactgacatgattttgtcacaagacattttacatataaaatcaaagatctctatctgctcatttttatagttcaagtattcatttgaaaaatccagaccaacttctccaacatattttgtggtcgataaatttcttataaaagatgcctttccaaacctcaccttccctgcattttgcggatggaaaccaatcccaaattgaacataattcgttggctgatatagttctatacatgtttcaaaaatctcaggttgatttgtaacgcataaggtatgctgttccaatttgtttatttgtttgaaaacctgtgaatgattcgaataaaaatcaagatggaaatgcatatcaattaacttactcatcaatcgctccttctataaaagtcaataaatcatccccatttaactgcgcttgagtctttacaaattcatataattcctccatagatttcatatatacttttacatattcgtctatttctttcatattcattccaccgagcgcaaccaatttattcgtgtaataatccttactaccatatttcagataataatgcaaagataataatacagccttcaaatctgttgtttttcctgtatctggatttgagaatctttcattcttcacaaaatccatgtcaatattttgattcggatagttctctttcaatattctatataactcataaattctattacccaacgcattatattctcggcatccaacaaaacatacatgtttctcttgctctaataaatttatggctcctgaataagaatctaagcctccagaaaataaagaaacggcatcaaaatcttgaccaacaatatcatatttctttttagacttaatgtttctaaaccttaaatccgttttcctaaaatttatttcccataaatctccacttaaaaatcccaatatattttctatcccactcttaatactattccacctctctatttccaatactggaatggacatacatatttctcttgtccaattatcttctacttctcccgcataaataccagcacgaggtatccttttatccgcagcataaacacttgtagcaacaattattaaatcttcataaataggctccaaattgtcctttttaaatcttctccatagttcttcaaaattaacttttatatttgacttcgggccctcattcagtatatcaaatctaatggcatcttcaaaaccgtgaatcggctcgatttctgttgttttattaatccatactttcatattgtccctccattttcttcaaatcagcataacattctttgcatacagaggcgatatactgttgcccttctttacttgtataatctaaatccaacttcttttctaattgaacatctgccattattctattttcgattgcagcgctcacatcatccataacacgatcataatcttttgataactcggcatgtgtaaatatcttttcagaaaaacaggtttcaaaatttttaatagcaaattgaataatgaattctatcaaaaactcttcattattaatttgttcaaaatctttaaatgtttctatctcaagtctcttcaatgtttccgaaagactttctcgaattatctgcatatccgttgtggaaaaatctctagcaaagtagtcaattaagcctttatataattcgtttccctttttatctaataaagaatctaaaccaatatttttagctgcattctcagcaccatatttattgaccgcacttatgaaattcataagtccgcccgcaacaaccgaaacattacttttactcaagtgagtcgacatataagcatctgcatatttagaaatggctttgctaattcctgcacttcctcttgaatctttcatcattctagttacagcacctttagcttgtctccattgttcatttttaggtggaatatagccttttgatgttcccataccgcccctcctatttttccttcataataatatctactatattttgctccaatccgttacctttcaaagcttcaatcacgtcaaggaagcccgatttatctgcttgatacattgaacacattacagttgctccttgcaaatttatttctgcgactttcagcttttttattacatccttaatttcactcctatattctggataacaaatataaattggttgcattttttcaagtaatttgctatttttcttaaattcttctataagtgcatttgagatttgtttatcaaaacactaaattcttttctgaatagacgaatattctcaactgtagtatctttatcttcatctgcttccttttcgccccatgcctgttttatatcttctaatatttctttccttttcgcttttgataagtattgtgctaaggtaagagtagtagcagccggattaatcgcactcattataaatggcatcccatgcttaattgctgttgcccctaatttcattaaattgattcttccaattaaactttttatgtcatcttttagtccttcaaaagcaggctggttgtccataagagtccgcaaaagactttccatgattgcacttttagcatcatcatatccttcaaatatccaagaatttaacgaaacgcaaacatattttttctttgacatatctctttcttcaatatttttttcaactaactttagtaatgttgactttccaacaccccaacgtccaaataatcctattgtcaatggatttaatcttttatttgctgttatattcgttatcaattcagcaaaagggctatacgctaacaaatcaatttgagactctttatccaaccacatatatttatcccttcctttttttatatacattatatagctcacctccattctcgacaacatattttgaccttttatccaaagatgccaactaaaggaaaacccttcagttggcatcacctttccatttttaattttctgttttatacacaatctccgtcccatccaggaacaccgccaccaccacgccgctctcatatactttgatatgatccagtgtccgcagcatcaaatcaacatccaactcctgtatgggctgtgtatgttccgtcagtttcataaaatctatcgcccggaacctcgccagtaaatcctctccctgtgccttttccttccactccggcagaagcgcatcccggcattccaacagcttattccatgccatgaaataaatcttccgcatggtatcttcatctatatgccgattggagcatcccaacactcccttcaccttataccgctcactgcactgccagatcctgcgcgtctctccagcgctgctctgccagcctttcctatggaaaactttgttgcactcaccgcaaataatcttagctgcaaatggattctgctccgtattgtgggaaaaagaatttgtcccatgctcttccagataccgcttccggcgttccatctccaactgtacgcactcccaaatccacggctcaataatggcttcatggtcatcctcaatataaaactgctgaatctccccttcattcatcacacgcttctttgtcaggaaatcagccgtgtagcttttctgcaaaagggtatctcctttgtatttctcattctccagcatactggcaagcgtagtggcctgccactttgtgctgccgttccaatttactacgccttcccgctcaaagatccgcttgatataatcggtagtttttccatgcagaaattccatataaagtctctgcacgatcttcgcctgctttttgttcaccaccagtttcccggattcattggtatcatacccaaggaaccgtgccgtactcattttgtgctggccgacttcaaaccgtttccggattccccaggtgctgttctctgaaatattgcggctctcatcctgtgccagagaagaaagaattgtcagcagcacctctccctttgcgtccagtgtgtcaatattctccttctcgaatattatcccaacaccgagcgcttttaattcccggacataattcagacagtccagcgtattccgggcaaaccgggaaatggattttgtgatgatccggtcaatcttcccggcacggcagtctgcaatcatccggttaaattcttcccttttcttcgtattggtgccgcttatcccttcatccgcgtatatcccggcgcattcatattccgggttgctgttgatgctctctgtgtaaaaccgcacctggttctcatagcttaatagctgctcttcttgatctgtactcacccggcagtacgccgctacccggagcttccggcgctgtgttttcttccctttccctgctgtcgaatttttctttggcggtataacggtaatgtttcttgccatcctttacaacctcctctgccaccgttggctctgtaatattctgccgggatgcggattcatccggaatccttacccccggacatgcttgttttccttcctcaatgtaagtggaacacagccactcgatcctctttttgtatccctgcctgcgccggagcgtccgtccgcaatgcgggcaatacagcattccggtcagcggatacctgttctggtatttcgagggattatcctgcgtggtacttctatccctgcggttttctttcattttctcctgaagcctgtcccactgctctgcgcttaaaatcgccggatagctgtcctccatataatagctttggacttccccacggttcctcacggtctggttccgtctgccttccggtgtataatatttctgcaggtggaaatcacccttgtatttctcattcttgaacattccggtaatcgttccggcagtccattttcccccactcactgtcgggatttccagaaacttcaataactgtgccagacggctgctccccactcccaaaaggtacatatccgccagaaactgcaccaccatggcttccttcgcatttataataagctccccgaattcgtctttgtcatatcccatgaaacggctggtgttgatcatgtattccccacgctcaaaccgcttccgaatggaccatttattgttctctgatatgcttctgctttcttcctccgcaaaagaagcgaggacagtgagcatcatctcgccgtccccggataacgtgttgatattctgttcttcaaaataaatagcaacacccaactgacgcagctcccgtgtcacttccagaagcacggttgtgtttctggcaaaccgggagatggactttgtaataatcaggtcaatctcccctgcttttgctttttggatcattttctggaattccggacggtttccgcagtatccggagattccctggtctgcaaacaccccaacaaactcatatgccggattagacctaatggaacgctcataagcggatatctggttttccaaagattcgccctgttttctgctgtccgtggaaacccttgcatatgcgcatacacgcttccgcttcggttttgcagcctttttcggttcgatcatctgtatcctcatacaagcgcctcctccccaaaataatccttcataaactgccgtatccggctgtactgctcccaggcatctgcttccctgctgatgctcaccacatccacattcgccttatcgcagattttcataaattccaaaaactgcttccagtcacgggcaatcatgacccatccctggtcactaccacatggatatgcccttttttgacctcttccatcagccgcaggaattccttacggctgccgtctgcgccggaaccttcgtcccaaaagaaatgttcttttttcttaaccacgccataccgttcttccaatgctgtttttcccggttctatatatttctcatatccatggtcacggtgtgttgtccggtaataatatgccacctgcttcactctttccggtatcaccatgctgctttcacctccatgcatttctgccccgtcccttcctattaagaaggtaggattttggggtagtctattaatcactctgaatgcccgataagtcaagcagataagccgtttccacgccttttatttctgctcttcggaaacttattttcaaaggcaagaaagtgccttcggcacctcaactcccctagcccctcactcatgaggggaattagggcttgttttttgcgtcattttattccataataatctcatgaatgtgattcagaagatgctcagagactattacgaaatcattgaatacgatataaaacccagacctgtcgtcatggaaaacattgataaggtcattaactgcggggatccttcttatggtggcgccatgtatggctgtccccattgcggtaacctcaagttcgttcctttccgctgccactccaagttttgcccctcctgcggcgctaagtattccaatgacaggtctaccgctatgtcttttaaattaatacagtgtacccatcgccatctcgtcttcaccattgacgaatccctccgccgctttttcctcgaagaccgcactctgcttaactgccttttcgaggctgtttctgatgtcatcaaagaatattttttctccctgaacaaatccaaaaactttgtccctgggtttatctgtgtccttcataccttcggtcgccctcccggttggaatccacacatccactgtctccttaccgaaggcgggttttctgatgatggtgtctggcgcaaggtcacatatttcaattattcctacctccgtaaatcctttcagactgttttgttaaataaactggaaaaacgcatcggtccctcttttaaaaagatgaaagccgccgtttaccatagggacagaaatggattctacgtttatgccaagcccaatctttgcgacccagaatccattattaattatgtcagccgttatcttggccgccctgtcattgctctttccaggattgattcctacgatggggagatggtgactttccattacaataagcatgaagacaactcttttgtaaaaaagactcttcccgccattgatttcattaagctgctcattctgcatatacctgaaaaaaacttcaagatgacccggtactatgggctttatgccagacaccgggagattgacaatcagctccataaagcagtcccaaaatccaaacacaggattctcctcgatttcaacacctggcgtaagcttttccttcttaccatggggtacgaccccctgcaatgcccaaactgcagacatgaaatggtctttctagagctgtaccataaacatgaacgggttcctctggatgaattatacaaaaggacaaggataaggcatggcctttatccccggtcccgctctgcttgactttctctcccatctgcttcatactacatttattacagatgggaggcagttgcaaatgaatcaaagatatgtggatgaactcagacaaaaatacatcaaaaatcctccagaaggaatgacacccaaactggtcagaaatatgaccgattctgatttattggatatgcattactttttaactgaagatgacgacctcgacgatgatggatgggaagaagggttctatatcgacctgttctaaatcaccgtctgttttctataccctcctttggcagaatcattagtttacataactttatttcagcaaggactttggtaagtaggtaagccccttacagggcttacccctctcagaaccggacatgcagctttcccgcatccggctccctgcaaagctaatacatctacagttatccgtatatactgacataaatacgtggccgcacaagcgggaactgtctcattagttccttatatccttccttcgtatagctccttctctgacttcttctgttcagccagtagaataacctaaaccataccacattattgaatgagttcaggcttcttgaattgtcagtaattccgtaataatgataataaccagtcagtacttcatttagtttctttactatcctgtttatctccagaaacctcatgtctcttatcatggcgtttatttccctgcttttctttgcaagctttttcttactggttttcctctttactctgaactttcccgtcctgccatgcgaacagtaatgcgtgaatcccaggaatgtgaacgtctccggcctcccttttccccggtctttccggttactttctgcgaatcggccagattcaatcaaccttgtcttgctttcctccaattctagtataactcgattttaataagtttacattattatcctgaaaaccaagggaaacgtgcgcccaaagcacggacacgtaagccaagaaatcagattactaccaatgcttaaattgtaagcttatttaaatcgagttatactagtccaaagtacttcattctgcgctttaagtgttcataaaatatttctgcatctgatttatattggaagcatcccacaaaatcatccgcatagactaccagccccgcatatcctctcatcactggctgtactttctccctgaaccaccatatcagcacatagtgcatatatatattggctatgaccggggagcagtccgagccttggcctgccccttcttctgtctcctcatatctgaaatctctcatgattcccgctttcagcatccgtcttaccagtctgataatggtcgggtcttttatccgcgattctatgaactttactatccattcatggtctaaatggtcgaaaaaccctttaatgtctgcgtccagcacccaattcgtcttttccctttccagcatcccattcagtctccttaatgccatgtggcagttccttcctgggcggaatcccatcatttcttcgtagaaatggggctcgaacactgcttccagtattcgccttagcgcttcctgtactaacttatcctcatagcaggatatactgagcgggcgggtctttccattttcttttggtatttccacccgttttgccggtttgggcttgtatgccttcttcttcattttcctgattaattcatctaagttttcttccaaatttacttcgtagtcctctttggtaattccatcaattcctaccgctttctttccatccatctccttgtggcattctttcagtaactctttattaatcagatgccctatggacgtaaataccatttccggatgttcgcttgacaactgtgatattctcgccaatttcgtttccataatttctcctgtctctgcgtacagattatgtttcctctttgatatgactttgcatggctgacctgcgaggacaggtctctctcgacttccaccgcttttttttgctgtgtactattcggccatccgacttctgccggccatttacggttctcctttctaccgttgttccgtataccgggcttacgcaacctgcccggagcctggcagacctccccagttgacttaaaatccttgattacatgaccagccttaaaaccccggggaagcagctgcattctcgctcttaacgactacagctgtgttgctttcagtgtataggagcacttctgccttcccaatttcattttaatatcgaagctatatacggctatgccctgcaatcccgctgtctacgcttagcaggcaacatcgctgctgtccacccaagactcgcttgatgcggtatagcttgtaccttacaccgtgggactctcacccactaaatttcaagcccttagctgggcgcaccctataatacaagaaagtgccttcggcacctcaactcccctagcccctcattcatgaggggaattagggcttgttttttgcgtcattttattccataataatctcatgaatgtgattcagaagatgctcagagactattacgaaatcattgaatacgatataaaacccagacctgtcgtcatggaaaacattgataaggtcattaactgcggggatccttcttatggtggcgccatgtatggctgtccccattgcggtaacctcaagttcgttcctttccgctgccactccaagttttgcccctcctgcggcgctaagtattccaatgacaggtctaccgctatgtcttttaaattaatacagtgtacccatcgccatctcgtcttcaccattgacgaatccctccgccgctttttcctcgaagaccgcactctgcttaactgccttttcgaggctgtttctgatgtcatcaaagaatattttttctccctgaacaaatccaaaaactttgtccctgggtttatctgtgtccttcataccttcggtcgccctctcggttggaatccacacatccactgtctccttaccgaaggcgggttttctgatgatggtgtctggcgcaaggtcacatatttcaattattcctacctccgtaaatcctttcagactgttttgttaaataaactggaaaaacgcatcggtccctcttttaaaaagatgaaagccgccgtttaccatagggacagaaatggattctacgtttatgccaagcccaatctttgcgacccaaaatccattattaaatatgtcagccgttatcttggccgccctgtcattgctctttccaggattgattcctacgatggggagatggtgactttccattacaataagcatgaagacaactcttttgtaaaaaagactcttcccgccattgatttcattaagctgctcattctgcatatacctgaaaaaaacttcaagatgacccggtactatgggctttatgccagacaccgggagattgacaatcagctccataaagcagtcccaaaatccaaacacaggattctcctcgatttcaacacctggcgtaagcttttccttcttaccatggggtacgaccccctgcaatgcccaaactgcagacatgaaatggtctttctagagctgtaccataaacatgaacgggttcctctggatgaattatacaaaaggacaaggataaggcatggcctttatccccggtcccgctctgcttgactttctctcccatctgcttcatactacatttattacagatgggaggcagttgcaaatgaatcaaagatatgtggatgaactcagacaaaaatacatcaaaaatcctccagaaggaatgacacccaaactggtcagaaatatgaccgattctgatttattggatatgcattactttttaactgaagatgacgacctcgacgatgatggatgggaagaagggttctatatcgacctgttctaaaccaccgtctgttttctataccctcctttggcagaatcattagtttacataacttcgtttcagcaaggactttcctataataaataaagagaagggggggatttatttccccgcctcttcctgctgcctccgccgcactataaacttaaacactccgtttcttccgcatccgaattccaatcaattccttcacatcctccagtacgtccccgtcccttacctctatcatcatccatcttcccccattaaaaggagcggtatcatgatacaactgacggacataagcagtacagccgttaagtgccagttctgcctccggggcttcctttgcccccaccgacaccatgcagataaaatacccttcctcaggatacaatgtgcagaccgccctggatcccttcttatactttacgttccatcctccctgcatggagcatctgctgtactcaatcctgggggatatatgaaatgtgtcctccagccaggccaaaagctgctgccagtagggacttgctatatatcttccgatttgctccatgtccggctgcctgtgagccgggtatacctccatccatgtcattgcgtaccttcctttcattctgacggaggacgaagcgggacagcgccgcccatgatgaaagcccctcatgatagccctccatatcatacatctcatatatctgtcatttcacgattgtaccaagtcgctagtgcgacggctagcccaaggtacataaaaccaccactttttttataaaaaatagcagtttttaaatttatgatgtattgttaagttaccacaccaaacaacttcataactttaagaactgctatgcttatgttatcatggatttctaaactcaacaactatatatcttatttttttactcgtccaccacctctttttgaaatgtaactactgtttttattgcatttcaaaggagattttactatggacaaatatttaaattctttcagggaaatgatttcccttcgcggtcttaccgaccatacccttaaaaattactgtacttacatccgggcgtatctggattacctcgcaaatgttcttcacaaatcgccagaagatgtttcctgggatgaacttcgtgactacatcaaatggctacagaaatccagagacctttctgaccgcaccatcaactgtgccatttcacaactgcgctttttcaccatgtatgttcttcacaaaacatgggatgacacacagcttcccatgcgtaagtttgacgagtaccttccctatgttccctcgaaacaggaaacatggcagtttatttcttccatacctgatttaaagcagaagactatggttacactcatgtattcctcagggcttcgtatcggtgaagtatgccgtctgcgttacgaggatgttgaccgcaaaaacatgcggcttcacatcacacactccaaaaacaggaatgaccgctatgccattctttctaaagcggcacttgacctgctgacacgctactggtttgaatacggcagaccaaaaggctttctttttccaaagcaaagtggcgaggacagacccatcgacacattcttcctttcaagacacatccatgcccatgaggacaggctcggatgggaacgcaggcttacctgtcattcctttcgtcatgcttttggtacccatctgtatgaaaacggaaccgacctgcttaccataaaagcgcttatgggacataaatctttgtcttccaccactatttatgtccatctttccggtaatgccatccgcaatgccgtcagcccttttgaccgattggcaggtgaataccatgagtgattacaaaatcaggcagatatttgagcagtcctatgaagctttctcagcaccggggcactatcagtcggatgtccaacgcaaagccgcccgagccatcttaaactgcaaatccggaaggcttggtgtcaacttaagtcagtgtaccgactgtgggcatgtggaagtccacaataattcctgccgcaaccgcaactgccccaactgtcaggctgtgaagaaagaaatctgggtagataaacgcagtgctgaggtcattgattcaccctattttcatgtagtgtttacacttccacatgaattaaatcccctcatttactgcaaccagaagcttctgtatggacttcttcacagatgctgcgccgaaacacttctggaattatctgctgataagaagtggctcggggcaacacccgggattatccaagtacttcatacttggaatcaggagctggattaccatgtacatatgcactgcattgtttccggcggcgggcttaccggagatggaaaaatccgtaaatcctcatctaagttttttatccgtacggaggtcctgcgggataagtttaaggggaaatatatggcacaccttgtctccctttatgaaagcggctcccttaacttttcatcctcctgtgaaaacctgcgtaattcttaccactggaaggaatttaaaaataagctttatgaaatggactggtgcccctacatcaagaaaaccttcaacggcttcggcaatgtcattgaataccttggacgctacatccacaaaatcgccatctctaacagcaggatcctttctgttacggaagatacggtaacattctctgcccgtggaaaaaagccgggtgaaccaaaacgtcagattactcttggcaacacggagtttatacgccgttacctgatgcatgtgctgccttccggctttcagaaaatacgctattatggttttctgaacaatcggatgaaatataagaatctgaaggttatctttaagcttcagaatggacagcgtttcaagcagcgttacgccggaatgtccctggcagagcttttaaaagcagtctggaatttcgatatctgtgtgtgtcctgaatgtggtcatacagccatgaaacagctgggaaggtgtcatgttccttcttcctgacaggctgctttcctatatattttttaagacctgccatcgggaggtctgcgaagcatacccaaaaatatgggatacagctaaaatcgtcctgcttctgcattgcagaccaccataatccactattttaagcttccctggggaaatactatccccatacagcctatggctaaagttccgcgacttggtacaattggaaagaatcacattcagagcagtttatcttttgcataagctgttcatttttttgtcgctctgaatctgatactttccttaagaattataccacatataaaatgacatctgtatgtcatgttttcaggttaaacaccatgtcctgcacatcccccaacctccaatgcgtctctgttccctgacactgccaggtcaaccagcccttccatatcatacttttccagccctccatagctttctgcctccttttataaagttagagggaagatactgctggtctgtgacatataatatgaaacaatgtattcttcccggccggatgagtgccatttcactgacccaccaaccgcctgactcctttttccgatatcaccatatccatcatctggtcgtggggctccacaggtatgtccgcgcgcatgatccgttccctgcatatgactgccttcacggcccgggtcctgcccagatagcggtcatagtacccgccgccgtaccccagccgcctgccgtcgtggctgcatgacatgcatggcacaatggccagattgatttcctccgcctgtataaccggagcatgtgctcccggttccattataccgtattttcctgcctccaaatcccgaaggctcctgatttcacgtacttccataatccctctggagatgcacctgggaacccccacccgttttcccctccttaaggcatcctccagtatgggcgctgtatcaatctcactgctggttcccacaaagcagaacagggtgcccgcctgttcatattccggcagaccggccacatgccggaatatttgaaggtccgcctcctttgtataccctttatccagcgccgcaaccgcagcttttatctcccggcgcaatgctcttttccggtcctctgatgtattcagttcttccaaagccatagatgtttcccctccctgtgggtatttccctaattatacactgccccatattggaaaacaaccacctggtaagcggacctggaaaggcctgggatgcggacccggaaagcggcagaccttctgacttgtattttttcttattagcggatacaatggtatcaaacggacggacgaaacagaggaagagctttatttacctgtttgaaagctcagaactttcttctatattataaaccacgtatcccgcgtccttaacagcctgtttgagctcattgttaccatgctcctgtttcatccgcaccagggcctcgcccttttccaggtccacctgggcccacaccccttccaggctgttgagggcgttttccacatggcaggcacaattaccgcaggacatgccgtccaccttgagaatccgtgaatagggatagtgtgatttatccttatccctgactttgatttttttcaccgatggctgggaggaggctccgcagcacccggaggttagttttttggcatagctcttgattccaatgattgcaatgacaatcaggacagcgcatataatagctgttgacataatatcatctcccttttgattagctgataaatggtttcgatgaatggtttatacaataagattagcattgactaactcaaatgtcaattccttctttcacccacccccgccttctccccatccccaaagcaaacgtgtcctgaaagccggccctccatataaaaggcagcttccaggacacataatcttactccgcgggctccgggcccgcgaatattttatatgatattctcaacacacaactatttctctttcatcaatgccttaacaagggccgcccccgcaaacagcataatgaatataaaggggaatgccgctgcaagtgaaatggtctgaaggggttttaatcctcccgcaatcagaagtcccacagccagaagagactgtacaacgccccacagcacctttcttccgttcttgggatttaagtctcccttggaggagaacatggcaagcacaaaggtaccggagtttgccgaggtaatgaagaatgtacacaacagtatgagggataccacgcacagaatcattcccagagggtacttgcccataacaatgaacagtcccgtctcaggcttgcttgcaatatccgccagctgggcaacggaaagcgtaccgtccatacccaaatgcagacccaggcttcccataatggcaaaccagagaatggaccccagagccggtgccagcaccacgcctgcgatgaattcccgaatcgtcctgcccttggagatacgggcaatgaacgatcccacaaatggagcccatgcaatccaccatgcccagtagaacaccctccatgctccaacccagttattgtcaccgtaattgttaatcatgaggctgtccccaaaaaagttctgcagatactgccccagtccgtttgtcaggttgttaagaatctcaagttttggccctaccaggaatgtaacagtgatcaggccaatggcaatatataagttagcgtcggaaatgatcttaataccgcggctgatgccgtcaacagcagaccagatatagataacgcttattaccgcaatgataataatttgaatcaccagggtcgtcggaatgccaaacaggtagttaagtcctgcattaatctgcatgacgcccagtccaagggaagtaacaacacccgcaacagtggcgaacaccgccagtacgtcgatggtctttcccacccatccgttgattcccttttcaccgataaggggttcaaatatggagctgataaggcccggttttcccttgcggaactggaaataggcaagacccagtccaatgatgcagtagtttgcccacggatgaagtccccagtgcatatagctggaacgtatggcaaagtttgcggcagcttccgtaccggcctcaattccgggaatcgggtttgagaaatgtgccagcggctcagagattccccagaataccagacccactcccatgcctgccccaaacagcatggcaaaccaggatacggtggaatattccggcttggagtcatccggtccaagcttaatctttccccatttgctgaaagcaatggcaactgaaaaaataacaaatgcggtcatggccataagataaagccagccgaaattattggtcagaaatgaatatgccgaatttgaaacaactgtaaagttggcattaaaggcaaccgcccatattgccatgataatggttattgctaatgaaactacgaatacctgatttttgtctttcatataggccctctccttctcctaaaagcatgcggacagccggcagaatgattctggacagccaaacaaaagctctcaagcaaatacaaatgccgcctgacaggcccccctgccaggcggcacacaaagccactcatcactcatggcatacagaaccgtatttcgtaccgccctgtatcctagatttctactttgaaaatcgtctgctttttaatatctgtagccagagcatccagcgctgcctccactctggatcggcggagcagatgctgctcctccctggaggtggaaggattgccgagaggatatggtatggatatggttggaaccatacgatttacaccaaccgtctgggcaaccggaagaaggttacacataagtacaacagggaagcctgcgcgctcaaattcttttaccatcgttgacccgcaacgagtacaggtccctcaggtggagaccatgataacggcgtccacatggtcctccttcagaagcggtatgatttccttggccattcttctggcctctccctgtgtggttccggttcctacggttgaatagaaataatcgtggagggaaccatatttgccctcattcaggaattccctcataacatccacaggcatgatgacgttggggtccgcgttggcagccgccgggtcaaagcccgcgtggattgtcttaaactcaccgctctctaagcggtccaacttggagatgtcatatctgccccagcgtgttgcagatgcggactgaatcctgtccggattgtccacaggaacaataccgccggtgttggccaatgcaatcctggcatgctttaagtccttaagagccggtgcaatgggtaccaggtccttcttaggaataatcagctcagactgatagggctgtcctgtagccttggcaatgagcatatccactgcgcggtctgctgccgccacgccgtcctcacgccatacctgatgccggattcctcttgcataatacccttctgcgtccggtccctccggtgtctggccctttaacagcttatcagccagctttaccatggcgcctgcatccttcttcatgctggctgcggaatggctgcccatcatgatgtacatatccttcttaaacatctcaacgccggggttctccgcgtgcatggatgtgatgaccggtacgccgaacttggcggaaaccgcctttccaatctcgccgcaggcaacaccgtagcggcctgcctggaaggccggtccggccaggaaaagatcaaactccctgccctttaatgcggtcagaatcctttcaatggcttcatctctgtgtgtgctcataaagttgtcaccacagataatggttgtggtaacccgggcgtcaatctctgccagcatctggttaatggctgctgtgggtcccatgacgccgtctctgacttccggttcgtaatcagccttgtcttctccgccaatgcccgcgaagaactgattgatataacagataacgttcttcataacgaaactcctttcactgattttccttaaaattccctgacagtcttggtggaccagccgataatctggtctccgcagaacatggcgttgttttccatgatgatggatccatccggcctgacagacggccctaaaatctcatccccggcccagcctcctgacagaccatcccttgcaagggcttccagctcgccgattacctccggcattggcggaagttcaaccaattcagaaacattaccggtagaaacaatggcatcttccttctcatccatggaaaccaggggatcggacttgccgtcacggcctgtacactcatttgtaagaccaaccgtcttaacgccggcgtcctccagagccacgatgcagcctgtaaagtcagcgtccggattgccgtagccttcctcagtcacaagggcggcgtccgctccaagggatttcgcaatctgcgccacaaacagcgcggaacgctccttctgctccagtgcaacattcaggtttgacatgatgacacccaggaagttaagggtcttgccgtgctccttgtacagcctcttgataacaggacaattctggaaatcataggttgcccacttagaagagcatggcatgaagcttccggaaatcatggctccgtccaaaacctcgttgggattcatgaaggtgggaagcatatggttgcagtcccatccatagcagaggtcgttgtaacccatctcctccatctgagactgaggctgcatcacgtatacaacggatggaagcttttccgtctcaggagctctcctgataaccggttccagctcgtagctttcaacctcttccggctccatatcctttacacaggaaccaatgtactcggcaagtttgtgaaccgcctccctgatagccctgtttttcttctgctgttcccgtttctcaaactcctcgtctgtatctgcaaccagcacaagattcttaagtttggagaaatatgtatatttagcgccttcccctcccatgtcaatcaatccgtcctggaaacctccccagtgacttccaacagccaaaaggctcatatccttcaggcagtgtgtccttccatctccagcctgtgacagtggtcctgtgtaacccgggaacagtgcgtccccatttacctttaccctgcactctaccgcctctttaacaggtaccagtctcaccatgtcgccaggctttactatccttaaatctgcctccgtgatgtgtgggtctctcttgacaaaggcaaggcaatcctctttgtctaccgtaaggataccgttctcatacttggttttgtcaccaaaaacgatgtccttcacataaaaattacccagttccagtttcataaatgaactactcctttcttatagaaattttctatagttctggctattaacatttaatattttaacattaactgtccggtttgcaaggttttttgtgcattttgacgattttcagaacattgttggataataccatggtaactttatgcatcatgtaagggactcaatattttgtatccattccctttgtatttcaaagcatacccctaattcgtccgacggtgaattaggttccagttcaaagacccggtcccagctggctatgattctctttttcagcatgggatagtagttgccaaacgcctctgtaacaagagccatctcattctcaatcccataccgtttcagctcctcgttaaacgcgcgctcatcctccaggttaaacggcacatacatataattgaccctgaacccccaggcatactcagaaatgacataaaccttttccccgggtatcctgagcgtgagacacaccgtatcctctgtgttcctcagcctgtattcatcatgcatggacagccatatgggaaatgagcacccctggggaacatcgattctctccctgcaccgctcggcgaaccaccggtaaagcctcaggtaatactctgaaatagagtcatttttcatcctgatatactcctcctttacccggtagacacccgtattttccagttcctccagcacctttttggactgcctggtgtaaaccgtataatatccgttttctgtttttctgctcatatcaaatcctcctgacccattacatattttccggcttcataaaaaatgagccacggaagtctcttctgacggccgcggcgattcattctgtttctgatggttttttatctggcatttgccatgtaatcatggcccagggtatcgctggcatatatacctacgatgacttccacatcacgcttaaactcctggactttatcctcgatttcttccggttccagaccataatccaggatgtccttcaggtaccccttatacaaaaggcagaccatccggttcatcttcatggcattccccatcgtaatgacgcccgcctgggcgcagcgctccgccatgaccatgtcgcgttcaaacaggtccgtggactggagcatgacctggagataggggctgactatattgattcgttccggaaacatatcatagtactcacggatggctgtggtcagattccggctggcagagctgaaaaatatgatatcgaaagcctgaggatagcggaaggcaatgcggcagtagcattcccatatgccaatgtgcatgtcccagatatcacgccactccttctcgtgaatattcagctcttccagatactcatccagataccccaggttggcataatagagcagctcttccacattctcaaaataccggtacatgctggtggtgctgcactgaaattccttggccatcctgcgtatggaaatggcctcagtcccctcgtccctaatgatttccaatgccctctctatgtaaacctttctgtttaaatccttaaaatactttctcctcactcgttcattttccactgaaaccatccctttcttctgaagctgaatgggaattaattcccaccacatcctcctgtctgagctgccatacggcggctcccaggtttgtctgttccatattgtctatgtcaaatatacggttccaactcttcttgatttccgacttcaagtatgggtaaaagggagactgaaacacttcccagtaagcagacacacccatctggttcatcttttgttcaaaacgggcttcgtcctcccgatcctttcccacataggaaagattcagaaccttctgccacttttcacggtcaaacaggaccgctcgttccctgggaatggacagctccagcagaaaactgtcctgggacaaatacacccagctccggtcgaaaaaaagccagataggagattcagctccttcaggcggtttgaccaagagcccggccctctgtttgaaaaatccatacgcctccttaaacacccaggcgctctccccatacttcctgtcaataaattccatctttacctgagaaaatccattctccctgatacaatcaaggactgcgtctgtctgagctgtccacaaatgcagcatggaacccggactgaatccgtcctccttattatccctcagcatgtcatcctccgtaggcatattcctgactttaaactatattttcagtgtacattgttttataatatttgtcaaaaagaaaacaaaatccctttcgttctttgtccaatgttctatcatatgtccctatttcatacagtgtaacaggaggtgcgtatgaatatttcactaacaatagccggaattctgtccgtatccctactggggacccttctccatttcacctaccgctggtccggccgcaatccccctatcgcccctgtcaacgagtctgtctgggaacatatgaaactgctgtttttccccatgcttctgtttggactatggagcttaaagggcgagaccgacgcctgccgtatatctgcatttcacgcagggctgcttatgggaacgctcctgataccggtactgtattactcttatacaagcgcgctgggacatagcattttggctgtggatataacaatattttacatctgcgtcattgcggcctttctcatataccgcggactgtcagggagctgtctgttggaaaaatacagccatgtaacatccatggccgtgtttcttttattgatttgttttctgctgtttacttattttccaccgggattttctatttttaaggatccggagggatgatggagtgcgacagaatgatgatggcatgataatggtatgatgataatagatgacagcttttccggaattataatgtgattaagtactgacccgaaaggactttgaaatggccggtatcacccgtaacaggccttcaaaatagtccgttatcatccaatttgaaatgtatatatagtctgtatttcacaaaacatatatgctgatttgcgtaagcaaatgcccgtcaggtatactgcataatcttgatcagccccttgtcaagcagacaggtgaaatatctaaaatttagtgcggacgatgcctgcatttcggtttggagtgcaggcatttttctatgcacaccatttctctttatatttggttatccgtttgtttgcggtagtgtaaaatagtttgtgtctttggaaaaaaatgtctcctttttggtaagaattcagatatgacaattcttatcgaaaaggagcatttttatggcagtagctaaggaacaaattcgacagattatttcacaaaacaacttgaacagtgtggcggatgtctattcccttctcaaagagagctttaaagacatcctccaggagttgatggaggcggaactcgatgcttcccttggttatgaaaagaaccaaaaaggagagctctccttaaacaataagcgtaacggtcattcccctaagaccctcaaaagccagtatggggaatttcaggtggatgtgcccagagaccgcaatggggagtttgaaccaaaactcatcccgaaataccagcgggatatttcaggaattgaagaaaaggtcatttctttgtacgcaaggggaatgagcacaagggacattcatgaccagctccaggagctttatgggatcgaactctctgcggaaatggtcagcaaaatcactgacaagattctcccacaagtcaaagagtggcagccccgccccttggcgcctatttaccctttcatcttcatggactgcatccactataaggtacgggaagatggacgtattttaagcagggctgcctatgtagttcttggagttaccacgcaagggtataaggatatcctcagcatcaccgtaggggcaaatgaaactagcaagttttggcttgggatgcatttgttcttcctcggttgctccttcagcattcaaatcgctattcgctttactatattgcatctttgcagacaaatcttccatatatgattcaagactttctaaatacataaggttgtccctaaaatatttggcaacggttaaatccgctttccaataatctgacattgcatttggaatcattttgtcatacttaatctcacgaatagacgcaacaaattttttctgttcgagtgtagtaattttgtctttaggaacaactgcttttgcgtactcatttggaagtggtgcagttccttttgttccatatgctgttgattgtatctgtagaatttcatcaaatgctgacttggtcacctcccatttatgcgggggttccttaacttttattaatatttcgccaagcaaagcacctatatatccgtctctattttcggaaggaatatgacctacatatttagaaaattcattagatataccgtctattgaagttttggcagcttcaatcgtaaatttatctaatatttccaaaaggcgactttcgtcataagagtcaccgaaaattctattatattgattcctgaatgtttcttcatttttcttagagatagctcctatatcttttaagcgttttaatttctcagtcttttttatattattccaactatgaaacggagaatcactttgaattgtagctgtagtactgagtatataattggaaaagttttttacacgctcatagtctacataccaatttgcaagtgtcttccaaaaatctatatctctgtccaaaatagatttattaccaaaatgatgttttacttctccctgaaagcgaccacccacatcatttataatgctcacatcaccatttgtctcaatttgcagagtatcgccatcgttcaattcaaagcaatctcttaaagctattagatactggtatatatcaccagctttttgcaatgttgcatcattaactgctcttgtcacggtcaatacctcccttcagatttgaccattttctcgcattgcttttccagatattttgccattctttctcattcacaatcgcatcaaacacaggctcaagaaaagtctggatttccgcaataacgaatgaaaactcaagcgtgttatcttttatggttttcaaaaagaatttccaacgcttctgcatatcttcatcatcggcaagtgcaacaacacgcttaaaactatctctgtcatagggagtaccacgccgctgtaaggtttctgtagctgcgcaaaatttttgacaaacgtgagcaagataaatgacaaataataacgcattgatttccgcactaaattaaatagtgatattactgtgctcaataccaataaggctccgcttaatgaatttatttggttgagggatgcttttaatggaaggtataacactgcctttatctccgatgccaatgctgccacaacatcagggttttatcggtattatgccaattcagccaataccccatgggcaggcggagggacactctttacgttagcttttgatggcggaagtggtatcgtgcagataacattctttaacggttcacctgcggcagcatctctcagggctcgatataataatacttggactggatggaaagccttataactaacattatgaccaagctccatttgcgtgtctgattaactgtatgccatcaatgccaagcgcccattatataattgctataagcacgcataaatgcctttggtgcacccgtattattatcaggcgctccggtcgaaagatgtaattgaatcccgaacccaggagcactcatataggttatagcaattccggcagtaagaccttgcgtgagattagccttatagggtgtatttagtgttgatactatagtttcaaaaaaggtaattctgttttcgacgaataacaagttagcatcatttgccggagcgctcccgcataatatgagtccggctctgttattcaaattggtattgagcacagttaaatcactatttaattaagtgacatatttatgcccctacagatggtcaattttcttccaatcccttaaaataagggcaaaggaggattaaatcatgatagaaaagatattggagaacgtgatcaacgctatggttcctcacttagagcccgatcagttagaaaagcttaacaatgtgctgtatatcaattttcatggtgttgaagttatggaacaatgcacggagttaattgctaccggaacagatggggatgaggcaaaaatccggatgtttgtagcatcgaagaaagctgtcaaccgacaagaaaacaccctacggcagtatacccgtgagatatgcaacatgttgacctttctaggaaaacgtttggaggacatcaccggaatggatttacgatactattatggcattatgagggagcaacgtcatatcaaaatgtctactatgcaaaccagattacactatctttcatcattttgggactttatgattactgaggagatggtgcatagtaatccggttaaaagggttggcctcctgaaattagaaaaaaccattaaaaagccgtatagttccgaagatatggaatctttgcggagcaactgcatagagttaagagatcgagctattgttgagtttctgtatagtacagggatacgtgtatcggaattggtatcccttaatgttggtgatatcgaaatgggtaaacaagaactaattgtatacggaaagggaagcaaagagcgtaaaacttaccttacggactctgcaaagttttatcttcgtcgttatttacaagtacgctgcaaagacgaaggcataaccatagaagacttgcaagcgcttcccttattcgtaacattagatcgaccgcataaccgtctgacagttgccggaatacagtacatgctccgccaactaggtgaacggtctaaagtcaaaaatgtacatccacatcgttttcgtcgcacaattgcaacggacttgctaaacagagggatgccaatagaacaagtcaaagaattcttaggccacgaaaaactggacacgacaatgatctattgtaccgtacaacaagaatgtgttcaggcatcacaccgtaaatttgcataaatactttttaatgctctttttcacggctgccattgttgggagccttatttattgtgcctttatgtaaattccattaaaagttctaccttctcattatcagtgagtttcgtataagtttctataatttcgttagcggttccatcacctaactcgattctaacttttatggcctttatgaatataatctttttataagttggcataccttacacccccattatttccgccatagcaaccgcaatagcgtcaactgttttacttgtatcatctattttaacctctaaatcactttgttttaaaagcgtaaccgttaataacgtatcccgtacttctggaactgcttccgtcccttcaattgccggaatcaccacgttaccgtcttcgtcaacctgctcctcctgtggttccaccgctggtatataaggcgatataagatacttgtacctgcaacttgtttcatcaagtttactatagctatgataggtattgagtaaaatgttagattcactatatgtagatagttctccaattgttgttgcatccttcattaaatctattaaagatgttatagtatagtttgcagttagaagctctgactcacgaaatgatatcacaatggaaataggttgattattgttatccgttacctttctgatgttatagaatggcaacctattgttattttttgtaagaatatattgcattttattaattcctttctttaaaaacaagtcaaatagtgactaaataatatagtgatttaactgtgctcaataccaatttgaataacagagccggactcatattatgcgggagcgctccggcaaatgatgctaacttgttattcgtcgaaaacagaattaccttttttgaaactatagtatcaacactaaatacaccctataaggctaatctcacgcaaggtcttactgccggaattgctataacctatatgagtgctcctgggttcgggattcaattacatctttcgaccggagcgcctgataataatacgggtgcaccaaaggcatttatgcgtgcttatagcaattatataatgggcgcttggcattgatggcatacagttaatcagacacgcaaatggagcttggtcataatgttagttataaggctttccatccagtccaagtattattatatcgagccctgagagatgctgccgcaggtgaaccgttaaagaatgttatctgcacgataccacttccgccatcaaaagctaacgtaaagagtgtccctccgcctgcccatggggtattggctgaattggcataataccgataaaaccctgatgttgtggcagcattggcatcggagataaaggcagtgttataccttccattaaaagcatccctcaaccaaataaattcattaagcggagccttattggtattgagcacagtaatatcactatttaatttagtgatacgctccctctcagtatcaagaagtgctgtcaatgccggggcttggtcggcacctaataccatacttgtgttagtgctgtctaatacatgagctattaatgtcttttcaaccatttttgaggccaacttttctaaaaatacatcgttggtcagtaacctcgttaaaatggcattcatttgggcgtaatgaacagggtcatcctgattcaatcctccaatttctgcactaaaatccggatcagccggaatcggtaaattttctctaacagccataagtgtcctcctgttaattcatgatatcgtctatgtaaaattccatttcaatatcatcatctttcaatttgtttccacacacaataatacaaataaaatccccttcagtatcaacaagtcccatttcattaattgtcacattctgaagttcatttttctcaattaagcacttgtaacggtatctcgtttccgataatggctctattgctgtaattgtttttcgcaataattcattcttaagcgcattatctgaaccagttgggacccatccattccctccgtcaccaaatgccatggtagcaattgctggaagtgtctttttacctgcccgtgcttccaataccttttgttttgatttagtagtgatgactgttattgtagatgccattatatgacctccttaatgatttgagcatcccacatctttgttccgtcccatcggctggttccatcccatgtacgataatgatatttctgtgtaagacctgctgcatgggcgattcttgattgctgttgcatctttataactatccgtaaaggatgattcccttggtagttatcccattgtctaataccactccattgaatattgccatcccataaagcgtttttataccattgcattttaaggaaaaatgtaaccctatttaaacagacttcctcgcacatagaaatggaacctagcaacctgattgaataattatcctttgcactcgcgggtttgatttttctaatctccaatcgtaaaacctttatattgaataaggtgtcatcaaacccatatgaaaggcatatcacaaattctgcccagcggtttatgtcagttgcatataagggctgaacctcagcatttttcagttgtagggaatccattactaaatatatggcctctaatgtacctgctttttctgaaatgatagctttcattgatagtcgtgttctgtacccttcagttgtctcacccttaagtcgaggcatatcacggtctttcccgtgttctggtaacataatctcactagcacttgcaatcatactttcttcacgtacacggaagatatcggctttcgtatcgtcaaacagcttcccgacgaccttgaaaaagagatagaattgatttacggcttgccttaccttcttgaggggtgtgaaaagcaagctatacatgtagtcgctgaatttttcaaacatctcagaccctcctcgctgtgacattgaccgccccgaggataatgactttatcactatcgaggaagacatcctcctgagggactgtgaccttaacgtttcggatgtccgggagtttatctttcagcgcgaagatgatgtcggcgtgtgtgagctcgttcaggttgcgcccctttcgtatctgaagcagctcggcaataacggatgccgcccgctcctcaatacctgttgaatcaatcagctccgacacggtaagcataacagtaacgtcctgctcaatggttgtcgagctcatgacaagaatgtcgtcataagggccccggatgctgttcgccgccttcctgacatcctcaaggaggccctccgtcgcttgccctgccgtgcctgtgacaataatgtcgattgtgccctggcctcggggatgtaggtcgtgaacatttacaaagagaaccccaggcaccccttcacacacgttcttgtatttgtcctttatgggaagcgttgagagctccgcccatgcgccgagcgtccgggcccggaggctctcatagtcctcgatgtctgccccctcccggatgatccagccggagagattctcgatcttgtcaatgccttcaatgtgcgtgaggctcttcgttatctgaccgggcgggacgttgtagcgtgcgccctcctgttcggcctccaccaccaccacgcccgagagagcgccctgttggagcacggtgttctcgactgcgaagtagcggagctcctcgccgttaatgtcccggattgtcttgaagatgtgccccttcggtattttgaccgcgtccccgacgatctcctcgccgtctttactttttacggcctcccggctgattgtcacgtagccgcgcgtcttgacggcctcctttcgctttttgctgaagtccgccgccttcagctccgaccatacgccatcggcatgggaaacaaacatattgtttaatacggcccggagtagcactatgagctcaatcctgatctgacagacgatcatgaggagatggtagaagataccgcctgggctgaagtttgtgacgacgaagccctcctccttcagctccgcgatcttctcgtccgctaactcctcaagctccgggacgggaaggacttcgtctaatatctttttatcaatcaatgagtatcacctccactttcacacggtcgagccctaccccgacgctctgcgtctcttcgctgccgacaaactggaaccgtgtgagaatcttcaggacgtccttcccgaagaggagggaaacgctgatcgtctcggccttgatttccttccggcgtctgagcttttctttgacccgctcgctgatctcgagccgggtgaggtcttcatcctccgcctgaaggaactcgagaaggccccatccccattcgggctcatagaagagctccccgggctgtgtgattgcctcgaggcggatgtcctgaaggaagcagtccgtcccggaacagaccggggcgtcgcctgtgctggcctgtgtaagctgccactcgtcatcgaggtggatgtctgtgtcgtttagtcctgccattatttgacctccccgatgatgtacggcatgagctccccgtagagcagcgcaaccgccgccatgcctccggcctcaatctgaatctttgacttgactcccggaatctccgggaagcgcgtgtcgacgtcgccgtcctttgtgaggattttcagattatactcgaaccatttcccggtgagcttcgcctcgaaggttcgcccggtgtctttgtcttcgatcttcagctcgtcatcttcatactcctccgcgagggctgtcgctttcgtgacccgtgccttcataacggcggggaattgtatctgaggaaagtcttccttcagctttttgtccatgacgtcctgcatcattttttccatcgggcccatacgcgccctcctttctttgaattaaaaatttatatacgtcctgacgaagcccgtctcgttggttctgaagacgaccttcttgacctcaaactcacccgagactttcggatgtgtgacgttgattttgtgcgagtgcttcacgaatggagccgacacggtctcaagctcccacgagccgagcggcctgtcaagggtgatgatgttgaccccatactcgaagttgtatatcttttcctgctcgggcttctctccccaatagaagacgccacccgagaaaaaaaacttgtttttaatgccccaaactgtgccgacctcctttatgacggcgatggcatttttctgtgagataggcacgaccgcccggggctggtagatttccgccgagagtttcgcctctgtaacccccgcctgtgcgagacagtaggagatgatctcctgtggcgtcacgtcgaggaaagtgttcgagatgattgtctcctcgaggagcagcatcttgtctttcaggactatctcgtccatgtagccacccccactgtagggcccggaaacatatccctcgaagactgtgtcaagaactccgttatagccgagcatgaccatccccggctccctctcttcgacgatgatgttctcctgaaattgtggtgtgaaacgtaccttcgcccaatcaaaatagctgctttggtcggagtagacctcgatctcgatgcccttctgaagggcataacttccgaccgcgacgctgatttcaggataaaataattcttccgattccatatggtctcactttcttaatagggcatcgctttcacggttgcaacatgtttcgcgccgctggcggtgtcctttgctggtgactttttcagggccggagccttgccccggttcccgaggtaattttgataatcttcgttgaggttgctcttcgccgtcgccgccgctgctgccttctttgagccggatgacccgcttgaggacttcgaggccgtgaccgtcatgacggtgtgctcccaaaattcaagcgtaacgacgagctgcccttttttgttttcggccttgtgcgtgaggttcttgaaaatgacctgtttcacgcctctggccgctgtgtgttcgtttatgatttcatggacggtcggtttctcttgacccggtaatctaaaaatctgttgaatctgttcaatcttctgaattttggtgagaagaggaccatcctcgagaatcagttcaatgtttaccttggcgtcttcgtagcctgtcgcctgtttgggcttcttactctgtccttcgacgtcctgttcgtcaacaattgcatcccccttgatctcaatacttttaaatagaccgggaaggatgatggtatcaattttcacggtgctctcatcagtgtatatcattccgtcatccctccccctgagttatggacccgttcgcgtttgcgtagtcctcgatctccctgaggaacttcagaagcatcgggagctctttcatcttggagaagtcaaccgtcaattgaaactcgtttatgctgaccccggtattcttctccctggtagttgtgttattctctttttctatgctgacattccgacgctcgattgtccgaaccggagcccgtgtcgctgcaattccgactgttttagtatcctcatttgtaaattgcagactgagctgtgctctgacccgggagagtaaaccctccacggcttgggctggcacggcggcggcctgtttgagtcccgcggtgtaggttgttattgtcctttgccctgagagtgtgagtgttgaaagcggccctgttttcgcgtccgagaagggaagcatattccgaatcttctgaagcacgcccttgactgcattgaccggggccgaggctgcgctcttgataccctccgtaaatgtcgtaaggattttcgcgcctgactgccggaaccatgaaaaagccccggtgatgacattcttgacgttttggatgccctgcgaaaacttctctcggatagccgagagcttcccgcctgtaagattgtcaacaaaattgaaaccatcttgagcggttgctcggatgcctgacatcgttgccgacatcgcccccctcatgccgccgccctgctgttcgtagacggcccgcatcccttcaagctttgtcgccgcatactgtttcgcaccctccatcgctgaggaaactgtgttcttaatctcgtcgaacttcgccgacaccttacttgtaatagcggagagcttgccgcctgttaagttgtcgatgaatgtgaagcccgctgtgtagtatccttttaccccttcgattgctgcggctgcggctcccttgataccgccgccgtgttcctcgtaggcccgcttcatattgccgagcttttcctcgacggtcgccttcgctgcgcccatgactttcccgatgacgttgccaatcgcgccgaagatattctttacaaaagcgaaggctgagccgagtttttccttaaccccgctgatgattccgtccactaaatttcggaaccactcgcacttgttatagagcagcacgaggcccgctatgagaccgactatagcaataacgacccatgtgatcggattcgcaaggagcgccgccgtgaagctccacacggagccaatgagtggcccgagggctgtcgttgctgtggtgattgcttgctttgccatcccgacgagcccggtcgccatactctttagggcattaaccccgctgattgcggcggttttcgccatgttcgccatactgaggccaacgttcttgatgccgttgattgccccagtcccggcgctcttgatatacgaaaaaccctttttaatgccgtcccccgcgtacatgccatatatccgtacggtgtccagcatccccgggagttttttaattgtgccgataaacccggaaacaaaccccgccgtctttgtaaacacaaggcccacacttccgacaactgcaatgactgacccggcgaccgtgaggaatcccccgagacataggacgacgagcataatgacccggacgagctcctgatggttctgaacccactcggccccctttgctataaattccccgacttttcccatgactgtattgacagtagggaggaggctgttcccgaggtcttccgtgacattatgtatttgctgttggagccgctggaacttctccggctccgtttcgttgattgctgtcgccatctcggtggcgacgcctatgcctccacccattgaatcgtaaagggagaggatgttatcttgaaggtcgcccgtcttgttatacatgagatcaatgagcgcgacggcctccgtgtccccgaacgccttttgaagctccattttctcggcggcgtccatcgtttcgccgaacttaccccggagctgctcgagtatctcgggcatacttaggagctgattgttcgcgtcggtgaagctcagaccgagggcctcgcctccctttgttgccgatcggaggaacgccttgtattttgtgcccgcttccgcgcccgacatggtcgcctgaagcataccgaggacggagagctgctcctcgaggggaacctgtgccgtcgttgccgacgctccaagtgtcttgattgcgcccgccatctgcgagccgtccgtcttgaactgcttgacagacgtcgcaattccagcgctgaacatctcgccgaactccatgtcggagaggtctccgtagaagtccttataaatgccgtagcctgtcgcgaagaggtctgtcatctgcccgatggttgactttgtcgcttttgccgtgacacccgcgagctctgtatactgtgcgacgccctcgtctgagagggacgcgatgccgctcttaatgtcataggccgcgctgatgaagtccgccttcgatgtcccggcccattggtcggagaagctgcgcgcggcgtcttccagcgccccgaggtctttcacgccgagggaggagagctccccgagtgccctccgggtctcgaaggttgcctcgaccggggcgagggctgcgtccgtgatctgcataccgacgcccgccatgactgcgccgccctttgtcatgcctccgagggtctgttccatactttgtaatttgctgattgagccccccgctgccgacgagaccctcgccatcggctcggtgagattgtcaatcatattcatgatgaggctcaatttgaataccgattcgaggctcatgcttttaatcactcctttcccgtgttataatgggagcgaggaggcggtgaggatggtctttttttctttcatgctgaagattctcgtctttgctctgtgcgtcggcgttggccttgctgtcctcgtcttcgtgccattgactctgtatgtcatcccctatgcattatggataggggcccaaaacacacggggccgacatttggacaaggagaaggagagtgtcttcagggccgcgaaaaacgcgacaaaactttacagcgcatggattcatcgacgggagccgaccttttgaagggtcggctttttcattcctccccgaaggcttccacgacgccccgctgaataatcgcggcctctacctcctgaacataacgcgcctttgcgagcagctcgaggaactcctcaagctcaagcctgtcgacgtcaattccctccaagagagcggaaggcacgaaccgatggatctcgagcgtccctgcgtcgaagatgttcgcccgtacctcccggagcttctcacttagagtttcttcaaatttgacaagtcagtgaagcccatcatcgagagcagcttctcgccgacgctgatcgcgagagccggatattcctcaaggtcttcctcgagctttgccttgctttcctcgacgaccgcgtcaaacatgaacgtcttgagcgcgcccgtcatatccttcgaggcggtcttgacatagcggttatagctcggattcccggggcgcttgaagaaatagcggacaggaacctccgtctcgtcgtccgggtgcaaagtcatcgcgattttgtagaccttctcgccgctgtacttcgccttgattttctgctcctcagtgagggcggcgtccgctgccgccttcggtgtgctgttgtctctgatctcttccatgatcgttacctccgtttgtcatttattttgattagaccgccttcacgccgtcacgggtgattccgttgacgataatgaaatccatgtcgaccttgaggctcttgtcaccctgtgcggccttctggtcggtcttcgtgaatgtgaccgtactgaggatgtccgtcctcgtgcggcttcccggattcgcataagagaccgcgatcttcgggatgacgagcttgtagagctttatattccgccgcttgcaatagtcaagcagctcgtcatagtcatcacggaggaggctgatcttgccctccgacttgtagttgccctcgccgtagccccggggcctttggcccgccccgtatacagcctccttctcaagctcgtcgttgtagctgatttcctgaacctgaatattgaggccgggtatctggaaatcgacatcgccccaatcgtaggccctgccgtttactcttaacatctgtttctcccccttatgctgtgacgttagcccgcccgatattaactcggattgtgcggatatagccccgggacacatagcggacaactacatccatccgttcgtccttgatgatgtcctgaccctccgggacagtgatctgcgcggaggagatttccttgtttcggaccatatcgtcgagcggggcttccatatacttcgcccgacgttcaagctcgccctgtgtatcttcgacgtcaatgtcctcctgaaggagcggaagccctgccttgcggacttcccggacaatcttgttcacaacgcgcacgtcttcgatatagcggaagtctgagccgtccggggacataacccgggcatttgtgacataaaaatcatcgaggccgtcgtactctcggaacgtgatatatttcgcgtcatcgagaagctcaaggtattctttgattcctgccgggcggagctcgatcattttgtctttcgagattcccatgcccgccgcgtcagatgtccttccgatggactgctgcacgttggtctttgccataaggccacacacgatcccggcgttgttgatctcgaccgtcgtgccgtccatcttcacgtagagggagcgggccgctacaacggcgatattcttgttcttgagcttctttttttcttcttcaagccgaatggcatagtcgccgacgttctcgtcttttccgatgttcccggcttccatgatgaagaggagcggcttgtgcttcagctcctcaagctcggcctgtgcctccgagactgccgcccacatagccggagtagattccccgacgatatggacaaactcgaagagctcgtcaaactgcttgagcttcccgatggcattcagcgcgtcggcgtttgtcatctgcggggccatagtcgtaaacgtgaaggcgtccccgatatggaagctctcctccggtgtgctggcgtcctgtgtgaacttcagcgtcacgcccgtccctggaatctcaaactcgcccgtcatagggagcgtgccctcatcggacttgctgaagccgccgtcgatagagtaggtgaagagtgccgtattaaacccgccctttcccgtgaactccacaatgaccgaataagcgttgttcggcttgccttctgcggtgcagctcccggagctgtcgcctgtcttcttgatttcgctgattgtgccctccgttgttgctttgaccgggatgcagtaaatccggcttgccccgttctcgaccgaatccatgacggaatccgcgagaggggagaggccgaggctctcccggattttcgtgactcccatgttcccggtgattgtgagaggtgcgtccgccttgacaggggagacaccgatcgcggcgaatatccccgtccccttctcggtctcaaacccgaggaggccgtcgctgacggttgcaattacatctccgagcatttactccaccttctttcccatcggggcgaagctgaacgccttgactgctgcgtcgtagtccgcctctgagattaccttgcccggcctccaattctgcgcggtgcatacgccgctataaatcggggcggacgtcttccttttggccttgagctcctcgatcttgtagagctccggccctgccttattctctgccggcccctgtgctgccggctcctgtatcttcgccatgtgcgactgtctcctttccgatgatgttctcggcgctgatgccgagctccttgttgctggcgtcaatatagtcggtgtcgcggtagacgccaccgtcaaacctgattttaacttgtacggcgacttgagcctttaagatgctgtcatccttctcgacccaatccgcgccctcaatctccgccgctgtgaaatttccgtcgatatacagaccacgctcgaccgtgcccaggaaccgctcgtagattgcctccgccttttccgctgtgtactcgccgatgataacgtcgaatgtcatgctccgatcgtagaccttccgcctcttttgctggtcgcccctctcattcctaaaaatacgtttcgagccgcttcggcccagggtctcctcatcgaagagtatcgcgccgacgtggctgtcggtgtataacgttaatttcttcaggctggtgatggggggagtatggattcccgcatcctttagcgcgtcttttaaaaattgctgacattgtacaaacatcttttactcctccccgagggcgtcttcgagtgttcccttgatttcatgtaagtcgtcttctgacagtccgaggaacgggcgggccggaatcttgaccctgaccgtaacctgtctcttgcgaatccagcggtcgccaatcttgaagacgagccccttcgaggtctttgcccgtatggtgattttccgccctttctccccgagctgatgcgtcgaagcataaatcgtattcgtgccaaccgtgaaccccgaggcgtccgacttcgcccggatagaatttttcaaccgtgccgtgtcggtgagcgtcttgccgcctttctccattgcccggatggaggacttccacttcttcccctccggatctttctcctgtttgtaccgctcgagagtggacgtcctgaccgcctccgccatcgccgccgtgatgtgcttcttgtcaaggtcggagtaatgcttcaggcgtttcatgagctttcggacgtctccctcgaggcggatgctgtagctcattacatccccctcagtttatcccgcgagaagaggcgggggctcgagctgacgctgaaccctgtccgggccgcctcggtggtatcggagaccccgatgtctacctttccctcggcgagcagcgtgaggaacttaatcgccgcattatagcggttgagaatgttcttttgttcgctgctctcgtcaatcccaatccgggaaaacaggttatagaccgcgatgtccttcgcgaatttgttcaaaatctttggaggcccgaagaggggaaggctgtatctctttgtgagatagccgtcaatctcgccgcttgcgtcctcgaccgcctccgtgacaatcgggcggagcagttcctcccgccgctctggctcctcgatgtaggcgtcgccgattaatgtgttcagggcgtcatccttaatcattccccggacttcgtccgctgtgcagtaggccatctttactgcctcctttcaggcccgtttgttaagtggcgggtgtctctgtgccgcccgaggccggaggcgtctccgggtcggaaccgtccgagccataggccatctgccatagaccatatcccgcattgtcccggctgtctgctccgtagacatactcggcccgcatgaagacattctcgtcagtctccccggtgagctggtggaactgtacttttttgcgttcctgaaaaatgaacggcttaatcgggcgcttcgtacaaagtaaataccacgagttttcattcttcccggcgagctgcgtcgcgaccatgagctccgccgtgcccttgtcagtgttggtcgtgccgttgatctcgtcggcgaggaggatttccttcgcgacgtcctcgttcgcgggggcgacgatcaaaaggtcgggcacgaggtttaagctgtcgccgttctcgtccacgagggacatgatcgccttgcgcgctgcgcggtaggctgcacggctcagacgggcggttcccttgttactgtagctctttgccttcttgccgtccccgacgacatggtcggaggcgaagaacgccttcccgtcgtagcacttattcacgaagccgcccgggagcagcttgaagacgagttcgtcggggtgctgcttcgcactctgaccgatgctctcgacaattggcttgtaaaggccgatccggtcatcctcgatgtcgctgcgggggacgctgaccgtgagctcgaagggcttattcttgatggtgtagtccgacgcgctgaggttctgaatctggcggtcgccaatccattcccgcatgtgaggaattttgccgagccatttgtaattctcctcgcccgtctcggagggcacgagggtcgcgattctctgccacaaggtctcattctggtcgaacgccttttgaaagatgaccttgaagctcgtgtaaatgccccggagggcctgctgatttacaatcatgtgtgtttacctctctttctcccgttatcgggtctcaactgcgacgccgtcgtcgctgaccgcgatgacctttcccgccttcgagctgcctgtgctggtcgccgtgacggtgcagtcgtccacgatgtaacaatccttcaggatgtgcgccgccgtgacgctgccgtcgttatcccatacgaacacgccccgggcgaccctgaccgtgatgtcgccatccgtgccgcctgtgttgtctgcgaatctctcggcccggcccgctgcggtaaggcccgtgcctttcgctgcggccttcgcgtaaccgtccgctccaattaccacaagggagccctcgtaaatcttcacgcccgccgccacgggaaggacaaggaaacgcccgccttccgcgacttccggggtctttctgcctctctcaagtgccattatttatcatcctttccgaagtattttttgatgtcttcctcgctgacgccgagtattttgcaaatcttcagcgtctcctcgctggtctgctgcggagcctttccgccgtccggctcgacgccgatttcgcccatcgggacgacctgcggggccttttcgacgaacgccttaaagccatccgggtctttcagggcgtactcggtcgcccaatccttttgagctgccgcaatcttgcccgccttcagcgccacgaggacggcgtcatccgcctccttgcgctcgatcttctccttcagcgcgcggagctccgtctcagggacgaacccctttggctgcttgagcgccatgatcgccgccgcgacatcgtcggtctttgctccggcctcaaggccgagcagaccacaaacgaccttgttcgctacgaccttcccctcctcctcggactgtttctgactggctgcttccttgagccgcttcgcctcattcagcgcctcgccgagcttctgcatgacctcctcctcggtagcttcttcaccgaggccgaggagggccgcgatctttttgagcaattcgttcatttttttgtttcctccttctttgttgtcgtcctcatagtcctcgaggccgactgagttgataatcgggaacatcccgtcgattgccggggtattcgtgagcgccgccgagtgcagcatcgtcgccctgttgtccttattgacgagcacgaccggggagaggtagcggtattccttatttttgagatactgccgggcggtgtccgtccattccactttagccgcgatcgctccgtcctgaagcatgagctccttgatccagccgcccgcgggggcctgaatgtctttgagtgtctggtgctcgtagtctatgacgatgtcgacgccgtgctgctgcatctgtgctttcatcgccttgaagctctcctcgtcgacctcgaagtcccccttctttgtgctgacatgcccgagggggaggagcttcacaatttcaggagcccccttgagctccgattcgcccccgctgagggcgaaaaatcctttcattctatcactccattccttacttgcttttataatcgctctgaacggcgttatcccgcgttataacggcgttagaagactgaccccgtccatttatcccccgggcccgtaaaatgcgttgtgggggctcctatgggctcatttgctgctcccggacttttgccgtttctggtaagccttcacgagcggctccgggtagccctttaagtcgggctcatacctgacctttgccggattcgttgcaaagtgcgggtcgggtatgatatgggtgaagcgcccgtccgggagctctgcctgagcgggaacactgtcctccaccttgagccccatctgctcgacctgacgccgtgagagtgtccgcacggtgcagcggcatcggaacccgttcggcgggaaccatgtgtcccatacgggggaatctgccgggaagacgcgcccgtccatcgcaaggtgcgagggccgtgttctcctgtcattgacggcgtcatactgccaataggggcggagctttaagacgcccgggtctgtcatctgctcatagtgtccgacctgataggccgtttgtgtgttcgtcctgaagatgttgtcggcctgaaacggtgttattccttcgtatcccttctcctcgaggaagctgttcatccggcccctgaagctctgcatcgtttcgccgtcctcgattgctccgaggagctcgtcgtagaacttcttcagcacttgaacgctcgtatagcctgagacagtgaaggcgatcccccggtattcctccgcgatcttgtagaactgccccggagtgaccgggacacgttcgccgaagtagcggacggcctcctcgaaggcgggctcctcattccttgaaatgatgctctcaatgtcatccatgctcgaccgccctcccctcgaggtcggcgacaatcatcgccctctgaaggagcgcctcaatgtcactggcgtccatctcccggagcagcgcctcggcgagctcctcgtcctcgagctgttttttcagatcttcgagggtctccgcattgtcaattaacttgagaaccggggagaagagcttcccgaattttcccgcgctggccttgaccgccgtgtccgcaatcttgtcgacgcgctgctgcgggtctgccctcggagccgggcccttcagggcgacctcccggcccgcgtcccatttgaagggataggccggagccgctggctgcgctggcgttgcgatttcctcgccgccttccggcttcgggatagaaaacttcttgtaaatgtagcttgtcggaaccttgagcccggtcttttcaatcaatgtgccgagaatgttcgccgtatgctcaagatcttctccttcctcacaatcgaaacggaggtaaggaatccggcgcgtttcgccaaaattgaaaagtacaagcggacggagcaggtcgcgcctcagtgtagccgcgagcgccttgcaatccgcgacggtgaggtcgtgccggacttcgttgtgcgtctttgactgcgcgaagctgccgcctccgctgtccgacgtgagcgtctgccccaggactgccttgctgatctgctcgtcgcaatagcgcgcgagcctctcatataagtcggtcgtcgaggtcttgtcgctgttcttgaactcgatttccgtgccgtccgggataatgcccgccgcatctgtcccaatctgaacaagagcctccatgagcgcctttttgtctgcctcgcttgcgccctgtgcgtattttccgaggcggagcggcatcccgaacacttcgcaaaaactgacccaatctttaaggtcgtaatttttaaagagatagcaccacgcgacgaccctcagcacgcccgcccgtgccggatgccctgaacgcgccttgtaacggtgtacgatgaatttattctccgggaggaggataccttccggtgcgtcctgtgtcctgaccttgaagtcgtcctcgtcgtcccaaaagaatcttttttgatgtctgcatcgaatgtccttgactgttgtccggccttcctcgaatccccacataatctcggagaccgcgatgcccttgccgattgcgtccaggaggtcgagcatgacgtcctcaaaactctcgatgctgttgagctcgccctcaatgaactcggcgatctccttgtcacgctcgtcgtcgctgtcgaagggaatgacctcatagtcgaggcccgtgaccgcgttcttgcgcgtctgaagctgtgaaaaaaggtgagggtctttctcctccatttcctcaaagagctccgcctgacgcatgatgtccccggcgtctgcctccttgaagatgttcgcgaggcgctgcggcgtgagcccgttcgacggataactcgaatatttgtcttgaatctgtgcgaccgcgacctcatggaagtccggcctccgtactgccggggccttcattgcctgttgccgctgcctgtttttctttttgctgctcaatgcctcgcccccttaatatccgccgtgcctgaatctgagggcccggctgatgactgatttataatcgacctttgtcccgactgtcacgctccgcgcgagtttgaccgccatctcgaggccgtccggcgcgtcgtcatgcgcccccatcgggtactcggacatctgctttaagagctccttgtgacgcttcgagaatttgatatagccgttcttgacgaagggctgcaaactctgaatcctgacgtccttgttctggacgctcttgatctcctcaatcgggagatactccccggcctctgccgaccgttgaaccatgatgtccttgaaatatgcctgaaactgtaccgtctcgacgccgaacttcgtgaagggctttttatattcccgtttgagcctccggctcgtttcgattgcgtcctcgatgataacgtccggcttgcgccgttccacggaggcgatgacaacgtacatatagccgcttttggtgtccagcgcgagcccgatgatcgagctcgtgtcgctcttgcgtgtcttgccgagagagggatcgttcgcgccgatgaagaggaacctcccctcgctgaagtcgggcgcgattttgccgtcgtcatcgtagaagtcgaaccactcctcgttaaacgtgcaattctccgggtcgatcgggtcgttctgaatctccgaattgaaggacgcctcgccttcagaaatgcggataaccatgaggtcgtagtaggagagtttcgcttcccatagaacctcggccccctcgagcatctcttcccggtttgcttcgtagaacgccttcgcgtcctcctgccgggcctcgttcgtgaggtcggtgtagatacgttcccatgcgtcccatagctgcgtattgaccgcgaagctgatgacgcccttgtacttgaccgccttataactcggattccgggcgacgttggcaagcagcgcgtcatagtggagtagcgtcccaatatagacgatgtccgtgtatgtgtcgcccgctttgctgactgccttgtaaaaccagttgcggagcttcttccgctgctcggtcgtgttgacgttctcgtcgttctcaaggtcgtcgcacaaaatgaggtcgggcctccattgtttatgacgccgtcctctgattttcttgcccgcgccgagcgcctcgatcttcgtcccgttggagaggaggatgacgcccgtcttccagacacgcccctgaaggtctccgaagtcctcccggatggctccgttctcctcgatttcggtcttgatgtccccgaggaagccttcggcctgttccgtgctgtcggagagtataatctcataatgcttgtagccgtagaccccggcgtgaatactgtccttgaaagtgaaggttgtcgactttgcgtgacctcggggggcctcgattgccctgcggcatcccggggcctggtcgattgccttcgcctcttcaagcggattcttgcccttgaggacgccctccgcccatatccgatcgagctccccgtgaaactccggggattcccggacgaagtagtgcgggagataggcccgcccgaagtattccagatcgaacgccccgagcttcttcctgagccccttttccccggtgagggccgcgccctgccgatacttctgaaggagctgctcccgttccttctggcgatcggttccccggatgacatactcctcgaagagagtcttctgatattcccggttagcgaccgcctcacggtcttccggctcctcgagcttctcgaggtattcgttcagatcaatcgccatccttcagcaccttctccctcgcccggctgagtatagagtgcagctccttcgtgagctccgggtcttgcttgattgccgccatgagctcggcctcgagctgctcgaacgcgagctcggacttcttcttcatgtcctgccggacacgctgctcataagtctccgttctcgagagggaggcaatcaaacgccctgctttatcgagcggcatctcctgaaattcctcttcggcggtgctgacccgctgcataaggccatccatgagtaccatccttgatgcccgggtataatcaagattcggatttttttccacggcggcggcaatcgccttcgtcttttcgagcgtctcgacgacccgctgtgtggcctgattcgcccggatcgcatagcgcccgaccgcgctcttactgatgtcatagccctcagtctttagccactccgcgatgtcctcgtaagtattcgccgtgtcgagtagcttctcgtcgagccgttccttcagttcctccgggagctgcgtgatcttcgaggagaatcgcgtacgtcttcgctccgccattaaatatcgacccctgggtcgtcggttgtgccctcgacgaggtcgacgccttccttcgtgagtttgatgacggcgtccttacggtaggcgttgtaagcgttcacgctcttgtcggtaaacgtgatatagccgccgtctctcagataatcgagatgcttcgagatgtccggggagacaatcatcccgtccgcgattagtgagtttgtgatctgccggacaagcagcgtattttgatagcccttgacaagtgagcgcatgatataaccccggattgctttgttccggctgatctcgacctctgtcatctcgtccataagttatccctcctttaagtgatttttgcttgtagaatcttatcgagttttacattcatgtcgctcatttgcttatcgacattgttaagtgttcggatgaaatcctcgcgaaggacgtagacaagaggaaggtcagacttgagctcgttgatctgtgtcttgagcttctcgacctcctccgtctgcttcttgtcaacttccttgatgtcggcggcattcttttcgtctgccttctggtagctgtcgagggtgcgcttcatgaaaaaggcgagcgacccgacaatcagcgtactcaggaacgaaaagacggaaccgatgaccgcgatgatctggacgacgcctatttccatattcgccgccctccttactgacccgtttcggccttcagctcaagcaccttgacctcaatcagattcgagagatactcgtcgaagctgccgaggttctgtgtgatgaccttctgcgcctccggcccgaccttgcccttgatttcctcgaaggcttttgtcgagagcgtgaggagctcctcccggtctgtctttccgtccttcacggcctccctgagcgccttcgcggtggtctgttcgattgccccgaccgtaactcttgcgaggttctccacgtcgtcaagagcgtcgtcgagctgctgcctgagcttctcgtccttgagctgcttcgtcttctcgtcaagccacacgccgcccttgcggatgtagtagagcccgaaggctcccacgagggaaatgacgccaagcgcaagggaaacaagcacctgacccgccgctgtctgaatttctaccatgacttttcctccttttggaatttaaaatcgagtaggaggaaggcgattatttcgccttccgacctctcacaccaccgtacgtaccgttcggtatacggcggttcaatcaacttaacatgtaacagccttttcggcgtagtagtcttccatggatacaagaccaaacttagctagtctctctttactgatacaaatgtggagattccagcttctgcacactctggcatatcctttggcatatgaaatgccatgtgccgcatttggcggcagaccaagtttgataagattcttttccctgttctttggcgttttccagtgtttccatatgcacatgcgcagtcgataccgaatctgtccgtccatttttgcgcacagccttttcatgcttccgattttgaaataatttatccaccctcggataagccggttgagtttcccaattttataaccattgcccactccccagctcctgcttgtatatttcttcatctgcgccttgaactttgctgccgctttcgggtgtggtctggctttgtaccctttggcaaatgagtcatagtaaaatccaaaccccagatacttaatgccctttggtttatcaaccctgctcttttccgcgttcactttcagtccaagcttttcctctataaaccgagccacgctcttcattacccgctctgccgcctgtctgctcccgaccattataataaggtcatctgcataccggacgaaatccagcctccttgcttccagttctttgtccagctcatttaacatgatatttgctaacagcggcgagatatttccaccctgcggtgtgccgactaccgtatcttcatactcatcatcaatcattacgccgctgaccagaatctttcttaccaccgatatgacatctccgtcctttattgtccgtccgaaaatcgtcatcagcttgtcatggtctactgtgtcaaagaatttcgctaggtcgatatccactatccagttgtgtccgtcattcatcatttccaatgctttaaggactgcctgctgtgcacaccgcttgggtctgaatccatagctgtggtcgtgaaactgctcctcaaatatcggggtaagcacctgtgccaccgcctgctgtacaaagcggtctactgctgttggcactccaagatttcttgtaccaccatcgggtttgggtatctccaccctgcggactggcttcggcttatacttcctcgtccgcaactgttccttaatgttttcgccgttttccgaaagatatgcgccaagttcttcaacggtcatcccgtccacgcctgccgctcctttattccttacgacttgcagatacgccgcatttagattatccctgcttaatatctgctccatgagactgcttgtgtccatgcgttgtttcctttctgccccttttgcctttgccgcctttgaagtcatcgacaggcgtatgctccggctacgaagtggaacgtacttcaactgattgattgttcagcccttcgctccgtccccattacaggaacttcctcactactatggcttctgctgacttctcacaattcgttgttactacggctaatgagaccgcctgtgagacctccccagttaaggtgcgtgttcttttcctccatgtacctgccgcatttactcgtacttccggcaaccttttggacttcagtgccttttgccaccttatccgtatttccgagccttatatgcggttcctgtccgtcaggtcagaggtttgcttacagcttctttcagattccgtctcacggcggacacccttgctgttcggctatgtgcttcgttgttgcctacgcgcacttgggactttcacccattagaaaacgcccatgctgggcaaacaaaaatgacataggagcgttagctcctatgtcataggataaaggtgtttctgtgaagtttacataggaagcaattctaagagttacttccgagcccctcgaggtattcaatgagtccaatctgcccgggcatgtcgtccccgcatatctcccgaacccatcgctcagtgatgccatacttccgcgcgagctgcgcggtgttatatccgttgtactcctctttgattttctcatagagcacgggccttacgaagctatcggccttcggtatgtagatattcgccccgccgacgagctgcgcgagctttatgagattactgaccccgatctcctcggcgaccgtgtgccatatgccatcgggaatcatttcaagcgtgagcttctcggcgagtttgttcatcctgcgcctccttgcctatttcagaatcccgaacatgttcgcgacaattcccatgagctcgccgaccgtgaccatctcattcatgcgcccggtccaatagtccgggtcggtgatgaccccggcctctatgagggccgtgaggccctgctgcttccaatctgggatgggtgtaggctccgtctccttcggtggttccacgggctcggaaacggcctcataggagatatagggacactcgagccatttgagccacttccgggcagagagttttgtctgaacgaagccatccccaaacgtcccgagcgtacactcaacgacctccccgtttccaacatagacaccaatgtgcccctccatccagacacacacgcccggcctttcgggaatacttcctatgtcccctttgaccctcgccgcgtcgagcatcatccccgccgatttgtcggtcgcggcgacatacttcacattcccgatgccgccccaataataggacttaatcatgccgacgcaatcgctcccgatgtagcccttcccgacaagcgtcttcaggtgtgccacacgctgcgcgctgtagtggctcgggtactgcttcgccgccgcctcaatgcgagggactgtgatctctctgccaaactcgccccacatgtaggcgctcggccttccgattaagcccttgcaatagtccgcgaggcccggcccggtgagctccgcgcccgggccgggaaccggggccggagtagaagctgcaccgaatccgttgaggcccttcttcctgataatgtccgggaagtcataataggcgacatcgaggtcgacgttcccggagattcccgggacgctgcccttgctcgtgtactgccacatgccgaagctcccggagtaggtcggggcgctgacttcccactgtgcgagccacacatcgaacctcttgatcttcgcggcgtcatactttgtcgtgagccatgagagattcgagtagagggtaacatagtagcccgctgtctcaagggctccgcaaaacgcgacgatcatgtccgagaggacggtcttcccgaggcctgcctgagagccgtcctcgaggtcaaaggcgacgggataggtgagctttcccttgtatggctcgagggccttcatgacccattccgcctcggccttcgcgtcggcaacgctgagggcgtaactgtagaaatacacgccgaccccgaggcccgctgcgagcgctcccgcgatgttatccttgaatttgatgtcatagtcacacggcccgcccttcagctttccgcgcccgaggcgcatcatgacgaacgagatgcccgcgcccttgacctgtgtccagtttattgttccttgccatttactaatgtcgataccttttgtaatagctttcattctttccctcctgttcttgtttctccattctgcgccgttcgtgctcagccatctcccgggagatttcaagtgttccctgagtctgccggaggttcaaaacttcccgggcgaggttgagctcctgcgcgagctggaacgtgttcatttgctcgagtagctgctgctcctcctttttcattggttctccgagtttctcatgagccgctgcgatttcccgaatcgcgagttgataggttttcatttgatgctcctttctataatttcctgaccgggtggacgaccttatcgacatactccccgatcgtgtactgtttccgtccttcagcttcaagggccctcataaacttctgcgtctcgaccgcaattttcaggagcttcaggacgccgacctgctcctcggagactctcgtcatatcctccgagaccatgcaaccgatcgccctacggaggtagaggtcggcggcgaagacatccatcgccccaaactccgccataacctcccgggcgaacttcttacgattgagccgggccttgtctggtgggaggatgccttccttctgcatctcctttttaatacgggcgttctcagttttctctcgttgagtgagccgtttcttcttcgttgccactttctgcccccttttcctgttcgcgctcgagcatcttcttgagggcctcgatcagcatgtaacactgtgcgaccgtgagccactcgatccggctgactcggaacatcttcagaatgaacccgttgagccgagccggggtgtcattccatccgagctcgcccgtgagcttgtaaatcttgcgccgctgtgcgactgtctgcggattgcctccctcgtctgtccgcttgcccggctttgaggccggggcccggataccatccttcatgtgctggagcacacgacacactttgtcgatctgcccctgagagagctccctcatgtgctgcttgcctgtttcccgctctatgagggcatagaggtcggcctcctcgagggagagctccgggctctttgcaatcccccatatggcacggatagaagatcggggggcggacgtgcgcccccgttttgttgtcatcatgttttacacctcatttccccaatagtcccacccttcagcacgttcccgggcgaaaagctcaatcttcggagcgtctccgaatagctgttctattcgccgccggacttcttcaggcttttcgctgtgccgtttcctaaccacttcgacgagctgctggacgttgttggcttttttatatttgagcatcctccctcttgttccaaaaaggcataactcgcaatttttaagcgtccattgaccgagattcgcgagtgtcttcccgttgatactaacctttttccagacaaacgcgaccgtcacataacggaagccccacgctttgaagagcttgagcgcatcttcaatgtgtgaatcggtcgtccacataaagagcgccgcatccttttctgcaattcttccgacgtcccattcacacatggacgccgttttctctgtctggtagactttttcaagcgggacgaatttcttccctatcgcttctttgctgctgtacttccacggcgggtcggcataaatgacccggtattttcgatctgtactgaagatgtcaactttcattccgtgtctgtgctgtctcctttgctgtcctttactgaatattccgggaagcctcgagcttctcctgatgggcctcataccaaaaggcatcctcctgtttccagcgcgccccgaccgcgatgacaatgtcctcgcccttttgccggagggcgtccttgtttaccttctcctcggtgataatgcagtccgtgagcttcttcaccttcaggcggcggataatctcagcgacaagtcctttgtccttcgggagcacgaccgacgtgctcctcctgaacccggtctcgccgaagttgagtgtccgcgtcttcttgcctccaagctcgtcacgatgttccgtgacgaactccttgacgtccttctcgagcgtgctgattctgtcatggtgaggctttgcctcctgcgctgccgtgattttaatgccgttgatctgcttgttcatctcgccctcaatgtcggcgatcgcgatttcctcctcagcgatttcccggagcgcggcatccacttcttcccacgtcttgaaaacgggggcctctacaattctttttcgtcccattttggaactcctttcttgctatgtgctcggggcgctgtgtccccggctgttcattttcctcctcgacgggcccctccccgtcatagaggacatactgctttgttaccatcatgtaaaccccgagagggagggtgaggagcacggcggtcgcgtcccgttcttccagcgtctccccgttggaggctaggagcagcatgaggacggagatcacgacaagggcgaggcccgtgagccgctgttttgtcattttcattgcttcggcctcctgtccgttagagcatcatcatgtcggacgcctgagcgataaccttgagcgtgatcgttgtttcgccgtctgcgttcaggattcggatgatattgttcagtgtccggtcaaagagacggaagcatcccgtctgactgttgcacgcccgggccttgagctcctcgagggcgtccctgtcgatgtcgtagccgtcgaggtagctttcaacctctgcacccgagagccccttcagggaggcataaaagtcgaccctgttcgcgaagcggttgagataggtcttgatttgcgcctcgaggcggggctccccggcgattacaaggccgacgtcggcctgatcgaatatcccccggagaatctccatcttcttctgtgtgtacttgcttatgagcttgtcggcctcgtcgatgataatgagatagcccttgttgacgttgcaaaactcccggatgccgttgacccgtttccagattgtgccgtaggaggtggggattccgagcgcccgctcaatcgcctccacaagatcgcggctgctcatggtgtcgtcacattccacataggcgacccggggcatctttgcgtaatacttgagggcgaaggtcttgccgaatccgctcttcgcgaccacgatgccgaggccgatgtcctcctgtgctgcgctgcatacgcctataattttcttcatatcccggctctcgaaaatgtctgtccgtttcctcaggagcttccggggagcctccccaggagcgctggcgtcgatttcttcgccctgctcccggaggtactcggagagcttccgctcgaggtcgctcgggtcgctgtcatacttacccgagagatagcgggagatagtcgtccttgagtagttaatctcgcgggcaattcccgcgatgctgccttttgtggcggcgatatagttgttcacgcgctccgcgattgtctgcgtttcgcccgtgtagattgctgctgttgcttccatgtgtaaatcctccttatccgatgcccctcagctttgagagggccgcttccgctttcgcggtgataaactccgaatcgcctccggccttcgcggttgccttccgttttgcctcggcctctccccggaactccttgtcgttcggaagtgtgatgaccttcggtgtctggcttcgttcggctctgattgtgagatcaagcgcaccgaccgcccgggccttcccgtccccttcctcaagccggagctcgtaggggcgtcggaactcttcgagggtttcccggacttccttaagctggcgcttctgattgcggagatgcttctcgagtgcctcctgcgagaccttcggggcaatcatgagcagctcggcggaaactgcctcgcatatcttccgaccatcccgggtgtagacatagagcttcgtcacgtcgtcgatatcccacttgatgccgaccttctcgccgacgtacttcgcgagctcgtagtccgtgtaaagcgtgccgaacttcatgatgccttgattcctgacgagggccgtgtccgccttcataagtaacatagccgcatattcccggggaggcgcggccttctcgtatcgctgcccgtgctggaagagctcgatcggcgtgatccatttctcccggtctttcttgagaccgtcgtgctcccgcttgtggtagacctctttcttccagcgcgtccacaagtcatagaactcctccattgtgagcagctccccacgctcgagcatctgcttgacatccttcttgcgctttgccgaggtcttcgacccggtgagcgtcccgacgtagctgtccatccatttggtaaacagggagcagaccgttccgaaaaacctctcgatctggcccttgccccacggctgatagggaagcgagcggctccattcctcaatcccgattgaccgatagaagcctttcgtctcactgtcaaactcgagctctttgcaagccctttccttgcggctctgaccgaggttcgtctcggcggtgtagtccttgccgttgtcaatgtgcaagtgcttcgggacgccgcccggcgtcgaatagagcatcttgacgagggattccttcagcgtttgcgcattcgcgtcgatacacatgacatcgccgaggatgcagcgcgagcgggtgtcaagccatgcgacgagctttggcctgacggcggcgatcttgccgttcgggtgagtaacctgaacccaacaatcaaacgtgtgctcgtcaccctgtacgaactccatgacctgaagcgcggagacgtttctcttgcccttaatcatccgttgattcttccactcccgagaaccgttcgacgcgaggaatctcgcgctctctccccggaggtcgttcatgagataggagacataccgaacgacggtggaataggaagggtaactcgcccattctctttcgcgtgcgacctccgtgaatttcgtgtagagcatctcgaccgttccgaggttgcgggcgaaccgttcgtcgaaccatatattttcaatgagcgcccgctgttcgtcggtgatggaggggaaggtgtgcgaatctctcggtttcctgcaaagggaaagcgccccgaaatattcgtagtttttgccctcctctttctccatcttcagagcccatgcgttcgcctcgagaaggccctcagcgtagcggtagagcgtccgctgactgaccccgagctttagggccgtctcgtcggcgtaggccgtgcgctctgcctcgtcatgctcgacaaactgctgcacctgtttcgcaagctcgaccgcctcataatattgtttcttgtgtgtctcaatgtaccaattcagatcgacgtccacataccacggcgtcgcctttactctctgttctatgattgcatcgcctccgtccaccttctgcgcggccttgtgtgcccttctcgccttcgacgtgagggacgagaccgcgaccatgacctgatccttcccgccgccctctcggggctgagacttcgtcctaaagcctcccggattgcgttggatccgttttttcattgtttcatacacgacgccctcgagagctgccgcctcttccagcgtcacaaatatctccgacaatctgcgtccctcctttccgctatgctatgtaccgctcaacgcgggccgggtctatcccgaggacttcgatgatcttcgggatgtacttcttcccggagcggacgccgaaaaggatatagctcagatattgcggtgatgtgccgacttgagaggcgagctccgtcttcgtcatgtctttgtctgtgagtgccttcacgacgagcttgccgaatggggtgagattcgtcatcgagtatcctccttcctgatttactgttctgagtacatgcggtatacttatcataaaatacacctaataaaggagatacagtaatggataaaatcgtggatcaattccttaccgagttttcaattaatctcgggcatttcagtgaaacgggtacatatgagcttgaaaatgaagtcaaaaaatgtgcatcccaatactgcgaaaatatcgacccggaggtattgaaacttgtaacccattctgtaaatgaagcttattttagagctttatctaccatagaagcggcattaaagaaaactttgggttgtgggcttgaggaagagtaagcgtctagttttttacgttcctgcgccgaaaaggtcttaaaagccctttccatttgtgcgagtgaccccatgttcacctcactccaatcatttaacaactgaagaagcgagctcccttttagctgctttttcatgaagttttcctgtgacctcttctgaccgtcctggggctgatggggaggcgcaagtgtgggagcagcgacatgccgattgacctcacactttgcacaaaccgcgtcgagctcctcctgcgtgcgtccggggattcgctccttatgaactttgtcgcatatgtaggtgagcagctcctccggtccgaatgcatttgggagaacgaagcaagcatccgcatccaaaagaccgagctcggtgagggcgactttgaacccgtagagctcatgtcgggctgtgttcgcattaacgcccggatagtgtgggctcttgatctgttctttgaggctcttcgtccatccgtcgatcatgctctgaggctcgactgtcacacgctcgacgaccgtctccccggcctcttcaacgactgcataggttgagggctgctcgttgtagtcttcctctgtataaaggccgcgagccatctctacggcctcttcaatggtttcaatgttgtcatactccattgagcccctgtcgatttcaagcttgcccgtgtagagctcctcgtcgatgaccccataatttccgagggccgtgcttccccattcccggagctcccgggcgttaaactttacgactaaaaagctattgattttcttcatctttctcatgttctgctgctccttccatttctgatttatccaagttgcggaatgacccttactcggtcggtgtgcttgtgtatgatgacgagctcgccgttctgcttctgccggatgacgagccaattctccgggccgaggcccgcctgtccgagcctaattttttgagcccttgtcggcttttttccgtgtctcaatttctcgcctcctcttttcttttttattttcatgtgctatgctgtttatgttgtgattaaatttttaatctatttatactatacccgtttatacgggcgttgtcaatagttatacgggttatttacccgtatttttatggaggtattcttatgttctctgatattttaaaagaattaagggcaaaaagtggcatgtctcaaggtcaacttgcgaaggctgttggcgtttctgcgggcaatgtcagcgattgggaggttgggaagacgaaacccggatacgtcgcgctctcagctcttgcccgtttttttgaggtctctgctgattatttgcttgaactcgatagtgcgcccgttaaaacgggcatagatttgtcgacgtataaggaggagcagggcctttcctgtgatggctctccgctctctgacctggaaaccgatttaatagccatgttccgactccttccctcgcttgagaaagaggacgtattcgacatcgttcatcttaaatacaaacgctatgttgagaaaaagaaggactctatcttttggacatatttcgaagagagcgccaaagaaaaaagcggcccctctgaggatgatataacccgcataggaaccgcctaattttttgccttatttgattaattttttaatctttttttgtcccattggttcctctgatgaacaaactcaagaaaagcccgcaaacccgcataaatagggcaaagggacattgtccccttgttttgaggaaaatgtccctttgctttgttgtcttttttttataaaagaggggagcagcggaaatgctcacacgccttgaataacgcctcgtaacgccccccggtgtgctgatcggctgtaaagagaccacgccacgcacgtaaccgggtcaatttccgcacgttgtaacgctccgttagcacgccgggccctctcgacatccgggccgctgtctgttatactacagtaaagggccgcgaggccgtcctctatggtctgctgctgtgacttccgggacgcgccgagcggctcttttgcgccttgaaaacggcagtttgacgcggttttccgggcattgtgtgaaaaaggtcgcgtccgtcactctgccgtctcaagggctatggacgcaaaaaaagagcggcggcgattttctcggcggcgctcgcatcttttttgtcaaggcattcgcggggcatctcccgtaaactcgcataaatacaaggttttctcgatgtctcccggggcgtcccgcgttatcccggttttgtcaaatacgttgcacagtcacagtttcaaatacagctgcctgcaattttgcaccctcaaaatcgaatgtccttgagagataataaatgtcataaaaatctttcattctgcctgtcagttcaaagcgttgcagtatggcatcaaacttctcggcaatggtgctttcaagggaataagttttgattacaggtgcttcaaagtctggaagctgagtattgattgtgcgttcttcggcacgggggactataatatcacccacgcctatatcaacattgaacggcacacgcacattttttatttgagcaataatctgtgtactgataccgtgatattttctttgcggagaaatctcttcaaagccttttgctcgcatttctatataatcgttaccagtcggtgtgtcgatgattttacaaatcaaatctttaacagcatctattgaattagagtatccacggagcaggaaatcgacatcaatggtagctcgactttcaaaattggttagagtataaatgaacaatccacctttgagtattagtgtatcctcacacccagattttgatagctttctcaaaaattcttcctgcacaaaaagttgtaagcattgctgatagctgataccagaagcttttgctttatttctcagctttgccagaacggaagctgctatatctgccattacaaccacactccaatcaattcttttacacgcgtttgtacacgcaaaactttcgcatattctataagattcggtatattctttttcgggtctttaacatagccctgtactgctttattaaaaacctccttatccatcttgttcatatttcgcagcacatcgcaaatagtacggtcacggtcataaatgcggactttgtggaaatcaatttcaccctcggtttcgcccagcgtaaccaactctgactctacacgatatgcctttataaacggataatcgatttttgttcgccgcttagagacatttttatctattgcaaagttccactcagcaggatttctgtcactgtatctataatagaatagggcagtctccatacagagcactgcatcgggaaacaatcgattgataatgacaacttcgctttctccataatcttgagtccagtgatagtaacctcgcctgactctttcaatcaatccttcgtctaaaagttgttttatatctgcatagtataactttgaagctgtaagttcagcagtagtcataacataattatgactgctaaacaacattctcagtgtctcaatatctttattctgaagcatatcttcacctctatttaatcgcccttaatcaaagcaataattgggcactttactatattatattcgatttttctctttaagtcaataatagcaaagtgaacgcttttaattgtaccaatcaggcagtttagtataaaatctgtcctccgcttttataaccagataaaatattggtcagcgaaaagacaaatatgtaaaaaaataagcgtaccactgtttttatgatacgctcatcattattaaattacctcaaaatgcttcaaagcatcctttatcgcttccgctttctccgccgtcggatgcttcctcggttgtttcaattcctctaccgcattaggggcatcatacatcggcaatcctaactccctctttacctctgcgatatatgcggtatgtactttgaagccatatttcgcttctatgtactccttaatcatcttgtatgtaactcgttccttcggcttgtacgcttcggctctcttggctatattatcaagcggcactttgccctcaccctcgccaaactcgacttttacgttgattacactgtcgggttttttgtgggaaagcattacaaccgtctcaacgtgcaccgtaagtcgatgtcaaaaaatcatgtgtgctacacaatattatagcgtaacttattatcttcacgactttacaacttttataaatgccagcactgttgccgaattaactgttttaaagctttcataacaacactggattttatgctggtttcgatatttctcacgaaagtggcataaaatacctgctgccggatttgctcactaagggcaaaccgaaattcctgcacactttctgtacggtactttgaaaatgattcttcctgatatggcagtatcttcatggcacaatacgagatgttgatcagattaaccaacatttcgattcccttccgactgcgtaacatatagctgcataacgaccagaacgttttctgttcataataactcacctcgatattccagcgaaatgtgtaacacaataatgggatgaactgcatacgctcactcccggtctggtttagcggcgccttttcctgccatgcgcagaatatctgcatctgctctggaataatcgtactgaaaaacaggcgtctggagccgccggttttctctgtagaagttacataggcgggaacctccctttgcccgaagatattggtaaggacccggcgtacacccatgtagtaatcccctatcttttcagcagaaagagtgaagtcctctttaatagaaaggcgttccccatgctttgcgggcctgcctcttctgccggttggctgtggggcaaggtcataaataacagagtcagccctggcattacagatcaaatcccgattgaacaaaatcgctacgcgatggcctgccaaggctgtggcgcagtttttacgttcctctaaataaaaagcagtggaaaaatcttccgcaatacggtattgttaagttaccacacaaaacaaccaaatacggaaacctccactgcctatgaatacaatagcattttttggtgtcttccgcaagcggaattatgatgccaatgcccctcctgacaggcagctgccacgatcaacgctgcttatttcaggaggttttattatgtacgatgatatttttgaatctatccgctatgaagcggaaaaacggaacctgcgggaaagtaccataaacttgtactgtgccaatgtcaattactttctccgctgtattgggaaaaccgcctctgagcttacacttgacgatgcggaaagtttcctctctgccaaacgtttggaaggcaggtctcccgaaactcacaaccactatcggtcagcaattaagttcttctacaaaaaagtgctctggatcctttgggatgatgacatagttcctgccatgaaaagggaacggaaccttcccgccgtcctgagccgtaatgagataaacgcgatcattgaggccacccaaaacctgaagcataaagctatcattgcgacgatgtactcttccagattacgcgtctcagaggctgtccatctccattacgatgacatttcccgtaccaacatgaccatccatgtccgtgaaaccaaaggcaggatcgacaggtataccatcctctcccggaagaatcttgaccttcttaccgagtattggtacaaatgcggccggcccagggggatacttttcccaagctcctggactggtggatacctggatataaccagtgtgaaccagttctttaaaaaaagcgccaggcttgccggtattacccgccgtgtctcttcccatgcgtgccgacacagttttgccagccacctgtttgaaagcgggaccgatatcaaatatatccagtcccttctcgggcatgtggatccccgctctaccgatgtctacctccatgtaagcaacaagaccctcctcggcatccgcagcccgttcgatggtccgcaaggcggtgaggaatgaacactgactgcacaatccaggatgtttttaaccgtttttatccttcctatgcatcttcccatgatgtttcccctgcccagagaaaggcggcttaccacatcatgaactgcaagaccggtgcttttggcgtaaatgtgagcgtctgtgaggattgcggctgtatttccatccactataattcctgccgtgacagatgctgccctatgtgtcaggaattcccgaaagaaaaatgggttgacgcgcgcagggaggatctgctggacgcgccatacttccatatggtattcactgtgccggaaaatctgaaccctgttatctacagcaatcagaaacttttatatacagcgctttaccatgccgcgtccgataccctgcgtgaacttgcggctgacccgaaataccttggcgctgacatcggctatatctgcattctgcatacctgggggagcgccatgaacttccatccccatatccatgccattgttctgggaggcgggctggatgcaggaaatcactggaaaggcagcggggaggacttcttccttccggtcagggtggtctcccggctgttccgcggaaaatatcttgctgaactgaaacagctatggaaagatggaaaactcgaattccacggtacggcagagccttacaggaaccattatgccttacaggaattattggatacctgttacaaaaaagaatggataccctactgtaagaagccgttccatggcgcggaatccgtcatcaggtaccttggaaggtacacacaccggattgccatcagcaattatcgtatcaaatgcatgacggattctatggtcacatttactgcaaaagattataaaaaccagggccagtgggaggagattacggtttccggtgaggagtttatccgcagatttctgatgcatgtcccgccgaagcgttttgtccggatacgccactatggcctgctgtcatcccggaacaagaataagaagatcaccttgtgccggaatctcctcggctgtagaaagtatatcgcaaggctgaaagatctggatgcccctgccatgatccggctgctttacaataaggatatctgcaggtgttcttcctgcggcggaaggatcattcctttaccggcagggcagccttgtacaatgccagaaccgcatcttctatgttaaaaaaggcaactgaatattttttaagcttcctttggaggcttatttctgatgccataaacatgacaccggacgccgaatctggctgccatgcatccatatgcagtatacttcgctaaaaggctggggaaattgaaagtccatatataacggctacccggacgcgcctttgttcaaccaggaaaaatcgaaactgatgcaaacgaaagggcagttatcgaaatatcaaagctgctttttcgtttgcaccaccttcgattctttccttaacgatttgtcaatgacctgttcaaactgtcggcgtttaatctgtatgcggttgccattcataatgagccagccagcgtccttgttttcctctgccaagcgtcttagcttgttttctccaatacggaaatattttgacgcttcttcaatggtaagggtatatttttcccatacgggaatatcgttgttattcatcagataccccctttcccatgtttcgtgtcatattgaatataaggaataaggtcggtgcggtttatcctctgtaagtgggcggttaatttactggaaagagaagtgctgtatcttgccttgtcaagcatagtttccacccgttccagtccacctaatgcgtcatgttcttccaagaagtaaaaacttttgacagcggaaatcacgccaccctctgtgagccattgctgtgtttcttcaagggaattatgcggtttgggtgtatgcagtttcaagacttccacagcccctaaaaagcgttcccaaaaccgacacgttttccacctgcttttattgctttcatttctgtttgctacgacaaagcgtaggttgtttgccaatagtccgaaagccagttccccaagttccagcggtctgtccttgaacgtcatggcaaaagcatgagccttatcatcacgcagttgcatttctgtccgtttccaactgccgacttcatcaagcgtcttattatattttgaacagacttccttatccttgtcataaaagcggtaggacaatcccgatttcccagcaccgatataaacagtttttgcggtgtcgaaatcgtcaaacttgctttcatcaaagtggtagccctcactattggagataaattcctctttttcgcattttttctttatctgctctatggtaaagaatggctttttgttcttatcatcaatggcaatatcaagccttgtgaagtggaagttatcccgtccgtatcttcgttcacaatgtttgaacatatccccaaaggtataattcctactatcgagaatacggaaaatatcatcacaacctctgccagtcataacgagataacagccaagcccctgtgggttgtcctctgtctttattgcgtcgcccgatacataaatatctccaatctcccaacgtgtctgataggtcttgaattttacggttgccggatagacattgaaaatatcagtcggtaatcctaaaatgtgcatgattacatcttctgcggttgcagtttcaaatacaatgctgatgtaatcaatcttaacggataaattttcgtgtgttgcgatacttcattactcctttcgtatgccccgattttttgcggggtataaattgcattttttcctttatttatcacagtttctagtataactcaattttaataagtttacattattatcctgaaaaccaagggaaacgtgcgcccaaagcacggacacgtaagccaagaaatcagattactaccaatgcttaaattgtaagcttatttaaatcgagttatactaggtactatgacatgtatacgcagggcgatgttacatatacgccctttacgaacgcctaaaggcgttccctttcttcctgtctctgatccgttcttatcgctcacgagcctttgggaggctcgtggctaaacgggccagccccagtcagaaacacagttttcggtcggatagtccatgcctattcatgctgtcaaagtgaaaatatcttctctaaatgcttactcaagcgtgtgattgacctcattgtgcttaatcactctatctgctatgataataacgccaatagaattacttgtcaagaaatttttcttgactttttcaaaaataataagtatgataggcttataaagtgattgaaaggagaagatgttccatgaattataagcatttgggacaaaatatacagacggtcaggaaactaaaagggatgaagcagcaagaacttgccgacgctatcggtatcaacctacaaagcctttccaagattgaaagaggtgtgaattatcctacctttgaaacactggaaaagataatggttgtgttagaagtcgcaccgaatgaaatgctgtcaggtacatggaaatttgcttctcatatagagaaagaagtctgtcagttcgtcagaggggaagaacgattaaatgctgaattgaaacacggtcattatgataacttctttgacagcgaggaggaatggctggaatatgaattagaacagttaagggagtatatcacggattatatcaatggcaaagacatcacagcgtccgacctttacccaatcaaagagtttgtccagcatttgaaatttcagaagattttagaccgctatgatgagttttacagccttgatatgttcggggaaagcacagagggacacaagcatatgaacccgtatgttccattcggcaaaggcaaggttattgtaaatatgaattttgatgatgaagatgaatagcctttatcctctcacagaagatacagcaaacaaaaagtccgatcaagagtgcaagcaccacctacggtggcaaggctcttgacaggactttttctttactgttttgagataatcaagaggaataaagggggattttattgccatgagaataatgtgaaagtcaaagttgccgtgaaattcattgataatcagacaaagacaacgtaggtatcacagtttgaacttgtgctacataaggatagcaactggaagattgtaaaataaattcataagcatacaaacacataaaattatatgccttatttttatagattatcgtaatattggtacaattcttttgctcgtttcgatacaaggttttttaaatgctctggatagatagacttaatcaattttccatatgaaaggaaataatcagcaataaatctttcttcccctacgttgtaaaatccttttattttatattgtccatcatatttgactaattccattgagggataattttctttataaaataaatccactcctttatctaatatttgaacttcaaaatctgtagcattttcagacttaaatatgtttgtcgaacgttttagaagttcttgccttggcttcggtatatagcactcactttctgaaatatcaataattttatcacaacggaaaacttgaactctttgcctgtcatgattaaaacctgtaacataccattgtccaaaagatgaagatatattaaaaaactgcacttgtacttctgatacaaattcgccttttttataagagatacagcacaccgtatcttttactgccatttctaaaatatcttttagtaaagggctactattataatgcttagtcccctcaaggcttaatgtatgttccatcttattaatagtattaataagttcatcagacaagcaagtttcaaactttttctttaacttttcaatacttaaatgaaaaggagtcgattcataggcgtttaaagttagcatagcaaaatacaaagcatacatttcatcaacagtaaaaataattggtgaaagaagtctatttttcaaaatcccataacgtccatttcttccagtttccgaaaatatgggcataccgatttcttctaaagattgtatatctcgaattgctgtacttttagatattccgtactcttgcataatatctttcaagttaaaaaaacttttatcacttaaaaaaatcatcatgtcattcaatcgtgttgatttacgcatttgtttaaacctccttatttcgttaaatggtgtcatgttctgatacctttttatattatactattcatgtatcaacaataaaaggaggatttctatggatacactaaaagaatttcaaaaaatgatggcagaacagactgaccttgcgttggcaactatcggaacagacggcattccaaatgttagagttgtaaattattatttcaatcccgaaaataatattgtatactttgcaacatttaaaaataacgacaaagtaaaagaaatgaaacaaaatcagaatgttgcctttacaacaattccaaaaaaagaaaacgagcatataaaagcgagaggaactgctatcaagagtaaaaaaactatttttgatttggcagattgtttttgcgagaagatacctgattatcgagaaacaatagaatatggtgggaaatcactgatagtatatgaaatacactttgaaacagcaaccgttactttagatttatcgaatagtaaaactctcaagttgtaaataattcacaacaaatttattaattataggacggatttatagcagtagctcactaaggatagatactgctatagttttaagaaaaaggtggtgtttattatgggaagatattagttttagaatttgcagagcaaaattaaaataaagagagtatgaaaaaaagtctgtaaattgagatcttctatgataagttaatgagaaaggtaggtggatgtcgtgaccacctacctttactatacggatgcttttggattctgtcaagatgtattggaaaatcccatcaaattatggtacacttcttacaggaaaacatcaggaggtgtgccatgaagctaaaaacagacgatccctttgtacctgaagatatcagggcaaagatcaatggactgcagtccctgctggatcatgcagccgacttatacagtgatatctatagctggtatgacagtgaactgaaatcctatgacccgaaagccaccgcagacgatgaactgtttgaccctggcacagggactgttgtggaggggatcgattacctgtctatcatggaatccctgtcagagctgcagacagccaacgaatgtaaaatgcagagggattaaccttgtgtcccatcggcctggcctctggcgatgtcttcccgtatcagggccttgatggccccttggacggaagtgtccctgccatatttgtgctgtctgacccaggccaggatatctgcatctgtcttcatattcagttttaacttcacctgtacagtattatagctgtcgtacctgtcctgagcatcgtattttgaaaatccatacatggaaagctcctttccggataggtgtacacctatgcctgtgcgctcttattccggcagtctgccttcgtacataatggacagttccccatagacctgcccccagttgcggatgggcatggtccacttcttcgtcgcctcgaacgtggccaggtacagagcctttaagagcgccgtgctgcccgggaacacgctccgctggcggttgagcttccggtaggtagagttgaggctctcgatcgcgttggtagtatagatcaccttcctgacctccatggaaaacttgaagatgggggataccacatcccagttgtcatgccagcgtttcattgagttggggtactttggcgtccacttttccgtcaccttctccagcgcctccagcgccttttcctcgtttgcggcatggtagatggttttcaggtccgtggcaaatgctttccggtccttgtcggagacgtatttcagcgtgttccgtaccatatgtacgatgcagcgctgctgctccgtcttcgggaatgccgccgttatggcttccttaatgcccgtgagcccgtccgagcagagaatgaggatatccttcacaccgcggttcttcaactcgttcagaacgcagagccagtacttggagctttcattctccccgatctgtatgctcaggacttcctttttaccttccagcgtaaggccgaggatgacataggcggcaagcttgcggattaccccgtcctcccgcacggaataatggattgcgtcgatgtagaccacgggatagacttcctccagcgggcggttctgccagtcttcaatctgcggcagtatcttgtccgtcacgtccgagatgaacccttccgaagcctcaaaaccataaatgtccatcaaggtatccgagatttggcgggttgtcatgccttttgcatacatggatatgatcttctggtcaatgccggaaatgtccttctggcgctttcttaccacctggggttcaaacgtggacttcctgtcctggggcacctggatgtccatgctcccgaagctgctgttgatccgcttgggcttgtagccattgcggtaatcatccgaatccgaccgttctgacctcccatagccgagatgctcatccatctccgcttccatcatctccttcagggtgctccccagcaggtctttgagggcttcctggatatcctccgcagtctggatgtcatactcttccaggagctgatggacgatgttccttttcccctccgtcatgactactttgtgtacgggctgtttttctcttcttgccataataataggcctccttatgataatagattttatcatagaagacctaatgcttaatagctatttacagaaaaactttcatactctcaaaataaattcataaatttgctataaaggggcttatcgtatgaaacactttaaatataatccgacatctttaactcaactttaatgatacaacttttaaaattgcatacgaatatatttcacctttaatggctcgtacagactttatgttttatgcgggcttttttctatgtttttcaaaagttataaacggtattttcatgatgaaacatttcgtttatatagttttgctttggtagaaaggaggtgaaatcgtgaggatatcttctttcgagcatatcgtcagattacaatttaatgctttgatgatgattgttaatgaactaccccgcagcaagctgcggggtatcgaaggttgcaacctctacatataatcccatatgctatactgctttgttttctctacgtttttatagattgttttataatttttttcctgtccctgttctttcacatatctacttatgatttgctcattcccatgttcactcaccgttgctacgtaatagccatctgtccagaattctcctccccacaattttttcttcacttgtggacatttcgcgaacacctcccgggctatgatgctcttcactatttggatgattttttttggactatatgcaggcactgactggataagaaaatgtatatggtctttatctgtacctacttccaaaaatcttatttcatacctttcctgaattccctcacacgtttctttgattaccctatctacatcttcatctattactactcttctatattttgctggacatacgaaatgatacatgagtactgatacattgtgtgacttgcgtattgtttcactcatcacacaatttctcctttcctttttcctctagtataactcaattttaataagtttacattattatcctgaaaaccaagggaaacgtgcgcccaaagcacggacacgtaagccaagaaatcagattactaccaatgcttaaattgtaagcttatttaaatcgagttatactagtatatcacttcctccatgtcttgaaaaagtttgttacgcagcaagctgcggggaattaaaccctctttttgattaaaggcacattatcaagccatagaagacagattgctagacgttctaaacatgaaattttgttttgtgaattattattaaacagttatcaacttctagtaataaatgtataaatcaagaatatttataacatttcaaccactagtacagcattgccaaaataataatgaatagacgttgcttttttattgtagtcggtgcataataattctatcactaaagaatggatgggttattatgcgaaggaaaacaattgatactatcccggttttatctgatgccatgaaaaacatattatctgctttttcaaaaagccgctcccttccgtcaggactggtcaaaagagccagcattgtcctgcttgcgtcacagggggaactcaaccagaatattgcaccacaggccgggcttcattataataatgctgccacctggcgcagtcggttcctcgcggcgctcccagccttgcggaggattgaaatggacgacccggaaaggcttgaagatgagatacgggcagtcctgtccgataaaaaacgccccggtgccccgtctgtttttacgccggaccagatcatgcggatcatcgaccttgcctgcagcagcccaaatgattttgggtacgaagtaagccagtggagcctcccgctgttagtggcagaaattaaaaagcagggaatcgctgaacagatttctgagaaatctgtcagccgttttttaaaaatgaggtagatttacatccccacagaatccgttactggcttcattcttcggaaaagacggaagccccggaatcttttgcgcggaaagtaaacgaaatctgcggcctgtaccagagtgcccaggaacaaagccgggaaggtgcacacattgtttccactgatgaaatgaccggggtacaggcgctggaacataaatatcctgacaagctcccattacccggccagtgcgccaaaatggagtttgagtatatccgccatggcacggccagtctcatcgggttctttgatgttgcaacgggccgtatggaaatgccgtatttaaactccacacacacagaagatgattttgtggaagccgtgaaagcattggcagggacagacccgcaaaccccatggacatttatatgcgatggcctaaacacccataagtcggaagcccttgtccgctatgtggcagaagcctgtgcccttggcgtggaactgggcaaaaaagggaaaacagggatccttaaaagtatggaaagccgggcggatttcctgcatgacccttcccaccggatccgctttgtctatactccgaaacacagttcctggatgaaccagattgagatatggtttggcatcattaaccggaagctgctgaagcggaaaagctgcctatcaatagaagaactggaagcaagcatcctgcgctttattgaacaatacaatcttacagcacacccatttaagtggacatatgccgggataccattagtaatttaatcactgatatttaagcaatgctgtactagtaaatttattttagcccaatcttttataggatgtagcaatttccattccgcatcatcacgcttatttgttccccaactttgataaggaaatttaccatgagatatatttgcccaaacaccgtcgactgcatttctgggtgcaaaagtttcatctatctgcaaatctgtgtttgtttccgtatgtgggaaaactcctctcttcacaaatccatcataaggatttaaagctaaatttcttcgtatttccaactcgctctcatataaaaagcgagctgttattacatgacaatttcctgaaaatgcctttggtgtcaatgcctttcttttttcgccaaagggtatttcaaaataattgcttttttctgaaacaaatataactgccggtctaagtgcatcatcaaattgaatttcgcaataacaaggggcctcgcttacctccaaactgattacatcgccttcattatatgacgaaaaatacgtaagcaccgccagatttgtactttcacggctgaaagcaacagttataaatgatttgttaagtacctttaatttcatttctgacatttctgttttcctcttttgatcattaccacagcaaaatatgcttccctctcaaacgcataaccgcttctgcaaaaaagtaatctccgtaaataatcggaacatttgcattttctttgctgtgataaaggacggttcctcctgtaacaataccatcttcctcagggttccaattacagaacttactttcacaggctttcaaaattttgactgccgatttatcatacaattccttctcatattcatccacatgttccgccagctcaagcaatcctgccgcaatcgccattcctgcagttgaatcaaattttgcaaaatgctccggagaacggaaatctactaccggcagccagtcattcaatgacagattcgcaatacaatagtgggcagaacgttttgaagcatccaaaaactttttttctcctgtatatcgatagcttaaggcaaatccgtataatgcccatgcctggcctctgctccaagatgaaccggaagcaaacccttgtccccttggattatccacaaactcccctgtcttcgggtttagcacaatgatatgattcgtgctcccgtcttcccttagtccataccgtaagattgtatttgcatggcggacggcgatgtctccaaatcttgaatcacctgtttccaaaccggcccaatataacagcggtaaattcatcatgctgtcaataataacccatcctgatacatcttcttttgtccatgaaggctgattccaggcccgtatgtattctccggtaggattatatcgcccggctaaaattgtagccgcatggagcccccgtatttttgactgcctgttctctgtaatacggtaatcggcaaccgcagataatgaaaacataaaccctacatcatgatacagtccttcgaatccatgaagggccccgtccaatcttgtttcaattttcctggcagtatcagcatagatacaatcccctgtctcataaaataagtgccagagaattcccgcccaaaaaccattggtccacatatagataccttccctggtatctatatccctgtatttcccatctttgggtatatacggtatgatatcattgagcctctcagcttcttgttttactttcgtctttagcttatcaaatacaccgtccagccaatttggaacttccattttcaaagattcatccatctgtaaatcctcactcttttccctttgctatttgaattaacttcccatttaattctctgcactgttcatccgtaacttcttttttcatgtaactcaggatacgctccagcggcatcattccctgccgttccctcatctgctttgctaactccgccgaaaattcttctatcaccgccattgcctgctcactttccaaaagatctttgcaggattccctgatagagaacatacccttgggaaacatcctttcctcttcaactacatccgtaaaccagttctttacatttaaacccgggttggaatcaacatatacataagagagttctttttccgttaccccacagaacacagcctcgtcctcccattccccgcttactgcttttaccctgttttctccctgcccaagagcaatcttataaaaatgaaaaactccggactccgaaaaacctttatagcaattttggtttacatataaatccacttctttttgattggaatatacggtaatgcatatttcaggctgttcccgcttaacgaaccggctctgggctatttttacaaatggtttcgatgaccactgagccatataataatagtatgcgtccttcttaatttttctgtcaaatgtaatgagtccttttccgtttttatgcttcaaaccgccctcatcccgaatctcgctgctaaaatcatacaaattccacacataagtcccccatatgtatggcttgcttttaaacatgggataaacggtttcatggtacaaagcctgaaattcttcggaatagtcctttaccttcggatcctgggagtggaatgccagattgcagtccactccatattccgtgatacccagcggtatatggggattatcctcatgaaacttttccacaaaagcctcgctgtctttcatctctccgtaataccatccgaaataaatattgtatcctaccgcctccgtaagtttatttaaaacgctgtcattttttacgcaaaacagattggcgcaggaactgattcgtgaaggatccagctgtttggccaaatccccaagacgtttcactcgctcatacatcccctgattctcaccaaacatggcaatctcattctggattccccaaaagcaaatagacggatgatggatattctgcaaaatcagttcttccagctgactgcacgcattctccaacaaagcctcactttccgtcatcttaagcatgggaatctctgcccagacaatcagcccctgttcatcgcacaaccggtacatttcctggggatgttgataatgggaaagcctgacactgttggctccaatttctaaaatatcatggatatcctgattccaatgctcctcatttgttgcgttaaacacaccatcataatcctgatgtttcgcaaccccgttgagttttatattctccccattcagaaagaatcctttttctccgtctatggaaatactccgaaatcccaggggtatatccgcactatccaccactctcccatctgccttaagctccgcatgcaggcagtatagggatggtttttttaatccgttccacaaaacaggattcggaacttctatgtggcagatactctcccccaattctgttttgcaggcagttatctcctgtcttggcgacagcacacgataatctatctgaacatctttccctttggcattgtacaaatgaggctctgccaaaatctctcctgttccatcctccagaatttttgtacgtacaatcaatcccgatgttccataataactccggtcaaagcatacattttccgtaatgatcagatctataccccgatacagcccaccgaatacggtaaagtctcctgtaagcggagagatttcctcccaggaacggttatccagaaaaatatccagttcattctccttcccaggctcgcaatactgggtgataggaaacgtaaaagcagaataccctcctttatgttctcccacataatgtctattgacaaataccttgcaccaccggtctgctgccaggaaaataagaaaaacctgattatcttctttataatccagcatcactttttttcggtatacgaccgttcccttatagggattctcctccgaataccatgtatggggcaaatccacctgctcaaatgcctccctatcaaaagaaatctcatccatattgcagattttgtctatatccgtctggtaaagcttctgaaactcccagcctgaattgatattttccatctgttattcctctctttaaccttcatgtcttaactgttccatcttcgccctcacctcttccattctctgaggcgtcagttcataatacttcatggcaatggtattgcacaatgctcccaacacggaggttccgtaatagaaaaacaatccgaatacaaaaagggctgttgtactgggcgtatctacatcaggaagcttgtctgcaaatccaatccaggcaaaggcaattcctactaaagacggagctgctgcagaaataagcttgtcaataaatgtatatacagtagctaccatgcccggcatatattttccgctgcggctggcttcataatcattaatatctgcaatcatcggcggaatggcagaagtacagatcatctgagaaccctctcccagaatagataacaaaaataatgccacggtgaagaacgtaaaacctgtaaatgtctgtccatatccatttacatacccaggcagattgagagttttcggatctgcaaccacaaacaataccatgataatggtattaaagattaccactccccagcttcctacctgcattgccttttttaatcccagctttccaccaatagctccaactccaagggtcatcataaccagccccaaaatggttgtatagagagaccagccgccattaagctgaaaatttccaataataataccaaagaccacaacgctgactgcactgattctgcagctggaagccagtttatccgtggctgccgatacaatcagcatctgcagcggtttgttggttttcaatactcttatgtagtctttaaattttacaacctgcttttctttcgtaatggcagtaaacgcaggaatgtcctttggcgcaatggaaacgaaagcaattgcaatgcaaatacttgccgccacagctgttaagagccacatatcctcaaatactccgatcgatgacatttttccatactttaccaccaaacttgccacataaatctgaaccaaagaacgggacatccgcactaaaattgtcccgacaacacttaaaaacggacgctgccccggatcgtttgtcaggcacacattaccagtatgcatacttacgttgaggaacgtatagccgatatagaacagcagtgcaaatacggtaaaaaagatacctcttgcaactccgccttccggcagatgatgagtgacacggaacatgaagaaactgttgacaaagagcaaaacgccacctatagtcatacatattcttgtcttccctgcccgatatccaaatttgtcaaccacaaatcccaccatagggtcggtcaccccgtcccacaatctcataacggtcgagaaactggaagcaaaaataacagccatacccacaaatccatttaaataataagacatgtacatagttaaacccatatacaggtttactgccagatttacccctgagaatccaacgattctccatggttctaccctatggattcccttctccataacatatttttgcccactctctttcatgacttctcctcactttatgtaatttttacaattcgaattgtctgtaaaaatagtagcatatttttctgttgcatgatagaataaaatcatgtaaaatagtactttatcacaaaaaggagaattttatgatatcccagtcctttcaaatcgcccaacaattaatccatgatatttgctacctgtcagttcagtacctggatactgacgaagttatacagtctttcagtgaaacctatatgcttcataccttacagagtttcttgaatcctgctaccttaaagcggctttgcctgacattagctgccgataaactatactatattatcgaccagtttgatatccattttatcttgtttcttatagatgaagctcctgttgttgcaggtcctttctgtccactaatcatgacgaaacaggactgtatgaaatatattagtcatcatcagctttccccatgttcttctaatgatctgttatcgtaccgaagccagtttcctgttatcagcgaagaaaatgcgatacatatcattcgctctcttcttcataccctgcagccatcctccaaagatcgggagatggaatatatcaatttatcaaataaaccaaatttaccggagaaacaggaatccgacctttcttttcggaaaaattactcggaattaattcaagaacgttaccaactagagcaacgttttatgagagatgttgaaaacggaaatttccacgccgcaattttgaatttaagaaacatgcagagggatgtggcctttttaaaagagcttggaactactttagaaagcgaacggattggggctgctattgtacgtacaatggtgagaatctcggcaatgcgtgccgggctccccgccgccgtcatagatttagtttccactcaaaatacaattacgacccaaaacgccaaatctgttgaggaaatttttagagaaaaggaaaaaatggtcaatgctttctgccaggaaatcctttcccacaaaaaccatcaatacagtaaccttgtatcaaatgcaatgcattatattgaacatcactattcacaaaatttaaccgtgagacaattagcagatgagcttaacgtcaatatcaaccgtcttatctctgtctttcagacagagacaggaagaactccaggcaattatattcaaaatgtacgactaacacaagcctcccaccttttgtcgaatacagatttaagcgttcaaaatataagtactatggtcggcatccctgacgcaaattattttattaaactttttaaaagagaatattccatgactcctaatcagtatcgaaaattttatcgcttataaatcttttcgtaaaggggctgtgaaaaagtttatccaacgattcccaagataactgtttttcttatattctgttgtttttctggaggaattcataacttttttaagcccctccccgcatttttcagattcaatagtcaaatggggacaatatttccttcgtcctaattttagagtcttcctcttatcttgctacatcgtaaaatctataattttttaaagttattcacatatttgtatatcagtaagtaagtaataatccgtatcttgacaaaataagaaatcccccagcacttaccgggggaagatctgttttttactttttaagtttgctgcggcaatcatcaggcagattggaggaccatgggagaagctccagcatttcttcctttgccggaaacgcaccgagttctttcatcttttccatcacatatgtgagatagttgtatggcttcagtccattcagaagcgcagtttctgtgatgctgtacacagtcgcactggcctgtgccccgcggatgcttttggcaaacagccagttgcgtctccctatggcaaaatttttcagtgcccgctctgcagctagattgtcaatactcagatggccatcttccagataccttttcagataggtttcctggttcagcgtatacaggaccgcctctccgatcttagaagatctgtccacagcatcctccagggtatgaagccactcgaagaaagcctctaaaagcggctttgcctgcttttgacgctcttcatacctttcttccggtgacttgtcacggatcatctcttcgatcttatagaacatcccgatccgtgccattgcctgatatgcggttgtttccttcagctgctctttggtaaagtcctttttcaaaacggtcagggattcatcaaatctgcgcctcgcatgggccatgcatcctgtcacggtgatcctttccggaaggctgtggtatgcctggtatccatcgcaggtgaaatatccctggtactgatccccaaggaattccaccggatgatatcccgcccgggttctttcgtattggaagaggaccatccggggtgcgccgctgtattcatcagtgagatagacccacatccagttctgggtggaacctttctgttccggctcatcgattacctgtacacgggtttcatccccatgagcgtaccggctccggaggaattcttccttcatcagttcataaagcggctgcagataccggtccgcacactggatgatccaattcgccatggtctttgtggaaaggttcaggtcgtaacgggcgaattcccgttcctgacgcgcaaggggcatgccgcccacatactttgcgttcatgatgcctgccaccagggatggtgttgccacactgcctttgagaagggaaggcgccttttccggacgtttcatggccccgcattttgggcagctgtaaacataggtgacctcctccgccacttcaaaccgtgcaggcacaaacttcaggcgcttcaccgtctcttttgtcacgactttatatttggtattgcagtccggacagtttcggtccgcgccggtcagcttatactcaattacttccgttgtctcaaaggcggaaagatcttcctcctttttgccggaacgtttctttcttttataggaagacggatggatctcctccatttccggctccggcgcatcaggctctgcttcctgctctgcctcgttaaaaaggttcagctgcgtatagccatccgcatatttttcgctggatgggccaaactgtttccgctgcgcaagagtcagacggtcagaaagcatcgcgttcaggaattccagttcctttgttttttcttcgaggatctggatctttgtttcctgtttctgataatgctcccgcatggttttcatcagggagatgatatcctccctgctcatcttgttcagttgttcctctgtaaaaagcggatccataacacagcctcaactttctgaaatctctaccagaaagtataccagaaaaagcattccgttcctataggaaactgcattccgggacggaggaaaatccgcccaaaacaaagtgattttcggctttttgcgaattgacaggatccgggctcatatgacgatcttcgggtgacgttcttcaaatgcgccgctggggttcagggataaaccatcgcacagccaatggatctctttcagcgtaactttctgcagttcatccggtgtgtcaggccaatggaaggaatcgcggtccagccgtttcatcaggatccaaaaccctgacccgtcccactgaaggatcttgagcaatgtgcgcctgcgattgcagaacgcgaacatacagcgggagtacggatcgagatggaatttcagtttgatgatggccgctaaaccagtgcagctcttccggaggtccgtgcagccacatgccagatagactgtagtacttccgtaaaaatcaagcatagttctttaaggcctgaagcagggcagtcaacagtctggctggacagtccgcagcaacttcaatccggatattttccgggagacagagcatcacaggaggttttcctgtacctgctgtactgaaatggagttcatgttccgaagggagctttgcaaacaccggatcagaagcactttctgtctcagctgcttctgactggagctttcggatccagtaacccagtgtggactgtgggattccattctgctgacaccattctttgcgggataaaccgctttcctgaaaagcatggaaccggtctgcccaaaggtcagcctttgaggttgaattgtcattcgtatttattggtatcacctccatcatttgaacttatcttatcaaatgtggatggaaatttgcagatactgattattacctacttacgaaaactccgtgaacatggaatttttaatgagaaaaccaaccagtacatggtttctgcgccattaatatgacaattggaaaaaaattttgcaaatggaaatgattatcttatatctggtacagatttattacaaatggcaatcgaaaaagcatatttaatccaaaacgaagtcggtggaaagtttgtttatctggaatgcgaagaagaaaaattaatacgattttatgagaaaaacaaattcaaggtctttggtagaaggaaactgtgttgttgctaagctgatttgtcatccatactgctctgcttgaatgtcagggacttgctctgtataatgtcaatgaacattctacagaaagagaaagtcccagaagaccctcccgctaagttgtgtcctctgagactcatgataaaaccatgattattgtatcagagtacacggaatctgacaagggggatggcgtaattactatccattgtaacgaaaattgtatatgccccatatgccggtcccctgtcagccaccgtgactggaaaccgcgaatcatgaagctggatggcggacaggtagtgtggctgatgattgagcggagacggtgtgacaatgagggctgccggaggataccatgaacgaggattatccttgtgatgaaaccatacggcggcggcaccactggcttatggcaaacttttcccggacagaaggttactgtcggcaggctatgagcctcttaaggaatcccggactggccggcgcggccattttggaaacaattaggaaatcctgtgacaggtggcttcccgctgtcctgcgcatggtctataactcaggcggtttcctggtatccgtccgaggacatcttatatgcacccactttgttttggctgtcagcgctttctgcggtatgctgtccaaaaaggaggtgcataccatgcagacaatcaaaaaagatttaaacgggagggataacgaggcgctctcacgctacaccttgatcgcgccactgcttgatgagagcctggatcccgccaaacgcagccagctgcgggaagaagcagcctcaaagtcaggcttatccgagcgtaccatcttccggtaccttgccgcctatgaagaaaaaggcttcgagggtctcaaacccgtcgtgccggctcaggcggttgtctccgggaggctgccggataattaccggaagattgtggagcaggcaatccaactgaggaaggaagtacccaggcggagcgtggagcagatcatcttcatcctggagcaggagggctgggcggagccgggcgtactcaagcgccctaccctgcagcgtcacctttataaagccggtttcggcacgagacagatgcagacatacgcaagcgcacgcgaaagctcgtccaaacgtttctgcaagcccaacaggatgatgatgctgcaggctgatatcaagtatgggtgtaagctccccatagggaaaaacggggcgatggtgcagacatatctgtcctccgccatcgatgaccactccagatacctggtccattcccggttttatgacaaccaggaggaaagcatcgtggaggataccttccggaacgtcctcttgaaggccggggcttgtgatgccgtatactttgacaacggttcgcagtatgtggcaaaacagctgaaattctcccttgccagacttgggattacggttcggcacgcaaaagtccgcagcggaaaatcaaaggggaaaatagaaaaattccatcaggtggccgatgcttttctcagggaggcccggatccataaggtcaaaacactggaagagcttaaccgccactggaaaaactacctggaggaatactgccataagcagccgcacgagggcatccgggagtattatgagagccttggcatgcccgtcccaccggaagggatcacccctctccaggagtggaaccgggactgccggcctttaaagttcctggatacatccgtagtggcggaagcgttcctccaccatgaagaacgccttgttgacaagggcggctgtatcagctttcagggccgcaaatatgagacaaaaccgtcccttatcggattgaagcgtttaccgcaaagccgctcgaaatgaggccgttttgtgataaaaaagaccccctgccgatttccatgcaggaaacggagccggataattcccgtatgctggaggcgctgaaaaagaagagcgcagcatccaaaaagcacatggcagatgccatctctttcggacagtacaggaaggatggtggcagcaatgtataaagctttttacgaattgcagcgtctccctttcgtgcgcgatatcccgtcggggatgctgtatgagtcaccggcgatggcggacacccttgggcgcctgtcttatgcggcggaccgccagctgttcgccgtggtgacggcggatgccgggtgcggcaagtcaacgctggtgcgccgttttgtggagacgctccccaaagaggaatatatcttcctctacctgtcggactccaaactgaccccaagatggttctacaaaggcatgctcgaccagctgggcgtggaatcaaagttctaccgcggcgatgccaagaggcagcttcagaaggaggtggagatcatccgcggcgtgcagggcaggaaagtcgtctgcatcctggatgaagcacaccttctggaaaaagagaccattgaggaattccgcttcctgctgaattataaattcgattctatgagccctatggcactcgtgctcgtcgggcagacggagctgtgggataaactccggctccagcggtatgcggccgtcaggcagcggattgatttaagctgcatcctgccccatcttgaccgtgcgcagacggaaagatatatccgttcccaccttgcgtatgccggaggcaggcaggatatctttaccgataaggccatggacgagatcttccgcgagtccacggggatcccaaggcgcatcaaccggatctgtaacggctgcctgatgtacgccagccagcagggaaagcgtctcacggacgaacatcaggtaaggtttgtcctcgaacatgagatgctgggaggtgaggcctgatggttcagaacaaagaacatcgcccggcagagacctttgctgaccgcatgcgccagtccggcgtattggatctgctggaggaatacatggacatccgggacgaactggaggaagccctcaattccatagaactgctccatggggatatcaggatcgccatggatgacatcagcggacagcttgaagatcttcaggagcatatggataacgtcagcagtaaactgcgcaggttcaaatcgccgcatgcaaagcagtatgaagttgtcaaagatcaaggcgtgcttccatttgactgaaaagcctatgcaggagcactctctatcaaaacgatggttttaagggtggagaaatccacccagaagccaccgcaatgactgacatgagttagagcagcctgctgaaaaatgaacaaatctggtcagcgtcatatcaggaggtcagtaacaacatgttcatcatacacctcatctatttccaaataacaatccttataatgtctttttgattctgaaaatcattcggtaacatttttccatatatacatatctgtactcacacctccattcgtagtagtccgtccttctacattttaatcagccgaatctttccatcaaaagctttacgttttcccttagttcctctgaaaattcgtccaaatcatcaaatacaattacttcatcctgcaaaaaacggactagatcaaatatcatatttcctttactaagttctatacagaccccaggtgttttcttatcctgtctcatacgcttctccattgtccaaaactttgttgaagcaggttcattactgtttaagtaagcaacataatcctcaatgagccgctccatataatgttcctgccaaccagatactttctctctataaagtttccaatcacgtttcgatggttccataaaattatcctcttctatttttctctccgttctaatttcacgcaacattctgtatgtggtgagtggataataatgatgtctaaaagacgtggctcacccttggcggagtttcgtttgtctaactttatttacatcacaaataaaagcaccgtttcatgtcgcatctacttttattcttaccagctttgttctacataaagtggacttgaattaggcaacaagccgttgcacaattactccagctctttggctagagaatactctactacagtttcgtttttaccctttaccaacagcaaaccaatagttggcttattgtccgggtgtcgcagaatatcatcaaccacattttggtacatatttagctggctaataaatcctggttcaaagtcacaggcttttagctcaattacgacaaagcaccgcagtttcagatggtaaaacaaaaggtcgagataaaaatcatcaccgcctacttccaaatgtacctgtcggcctacaaacgcaaacccttgccccagttccaacagaaagctctgaatatgttcagtaagttgccgttcaatctctatctcccgccgaggcatatccgttccgagaaaatcaaacagatacggatctttaaacacctgattaaccatatcggaatccgctggcggaagtgcttccgagaagttattaacactcctaccagaacgctccattagtctgctttctatttgcaagtctaaaatcgttttactccagccattttcaattactttataagcataccaaatacgactttcttcatctttcagtttgtccattaaagaaatattagttcgccatggtatttgtgcaacgacccgttgcacaatttcaaagtcaggacaactatccgcaaacttcctcatatattttatgtttcttggagaaaaacctgacatttccgggaaggcatcctttaaatccttggccatacggtcaataatttttgtgccccagccttcttcctcctgcttttttagaatacctctgccgatattccagtacaggcaagtcatactggaattagcatttaatacaacagaaatccgctgtttttgaatttccgattttacttcttctataaatttcaaataagcatcactcatctcggaaagatttggagcaacagggaatattactccatctttattctttcccatataatttcgattatctaatttctcacctcgctattccctttagacaaattcctctacttatattatacgcttttacaacatccaaattatagtgatcaacccgtctcactacggttctttccccgtccttttgaactatcgcaaaatttgtgacagttgcaggttggtcttgcaattcctctctcaaagcgttattaatatgttttccaattgttttttacattgcgctcaaataatttggccatctgtaaataagataatttccattttatccattgtaatccacctgtcatagctattttatattgcctttctgctgcaacagaatgatactttccgcatatattgagaaataattatgattccccccaagcgaaatacaatcttggctgaaccataagattttaagatgtcctacctaatttttaactgtattcccgcctcagttttgcatatcctccagcaactctttcagcatattttcctgatatccggccagctgcttttctttcatgcactctgccgttttcttcaatataggatgacctatattttcgagctttgctcttccaatatcccctattctttcttttgagaggcttttatcataatcctccggcgacattctccatatatgaatacgatccccgaatttcttccatagtctatccgcaatacagagcccatccggatcaatatctccattatagtagatttttgacccactggccaaaatataggtaatcagcacctgtgccacagaacggggctgaccggaagtacacagaagggtgtagtccgaatttttcaaattatgaatcaaatagctgaagaccatctcattctcaactatatacgccttctcccccactgcctgtacaccgataatccctttcatattctccatggtaataacatagggttcctttcgctcacagaacgtatcataggccccatgccatccctgtttagtaagcagccggagtccataaccatgaaccatggaagatatattgtccggaacaatcgaaacctgcgtcagcagtttccgccactgatgtgcgtcttcgggcaattccatattttcgcagcagcagattgcatgtacaaaaagcaatccggctgttgtgctgcggtcaaagtaatggggattatctgttatctcagcagccagcacggctaacggatattcatcttccttatccgtcagctcttttagcttcatcactgcgttccctacattccgcaccagcagttccgcctgcttctcatcttttgcgtactccctcatcaacagctgatatccatattttttctcagagatcattttccgcagccatgcaagcgccgcagcttctcttccggcattttcttcaaaatatccgcagcttctgtccagaaacttttttcttctctcctgctcttctctctgccgcccctgagtggtaatcagcggctccccgaaatattcctccagcaccgctttcatatccaccggcgcgaaacgtgttttttgcagtccctgttcaaattccaagaaagaaaaccgaattgtttcctcataaaatactttgccgattatgccgcccactgcccgccgctcttcctccgaggtctgtttaagcgtaattcttcccgcagcttttccgtaagatttccatttttttctaaattcttcaaagcatctgtgatatgcccgctgacttttaaagtaatttgcacattctttattattgcacatctaatatcttctcacgtccattccatgtataacggatcactgaaacaatctgcgaatcctggggccttgaaagttctgcaatccgaagtccttttaccgtctcaaaacatccccataaagcctgggaattcatgatataatcaaaatccagcttatgcacaagttcaaacatactactgatatttttgtcatccactcctgcaaatgcctcatccaaagcaatgattcgcggatggtcttcctgctccgcttttttatactgtgcgttgactgctgcaaaaagaggaacatacatggccatagccttttctccaccgctgaaacggttaaacgccgcattggtcaacagcttccgctctccttctccacgcctgaaatacatgtgaaattcaaaccatttgcgataatccagcgcatccctgacaagatccatgtaattgatcatgtcgcctttttcttccagtttcagcttctccatgcggattcggcttctaaaatgcgccgcaaccttctctatatcctctatggtcagaagcatatgatctctgagcagaatctgttcaagctccgcggtgtctaactccatatcattctctgctttacagggtttccagtccagtgaaaagatcagacccatagaggtatccatctcccgcatgagctgcgacatatccgaaacccatttccggctttctgcaatccggtccgtaagctgccggctgatggtctgggacaaaatatcctcaaacagctccctgtccttcttctggatcagcagctccgtctcatcaatgccctgtttcaagatgccgtaaaattcctccagatatacccttttcccattccatgaggaaacgacccgcacccgctttcgtattgcgccagcagcctctgtttccagagctgcctccaccggcgtgtcaaaacattcctccaaagatgtaccgtaattgaccagacttccgttatggcgctgatatacctgatgcagcgcctgcagcaggtccgttggctctctgttcttatcgctttcccgcaataccgacaccgctctcttagcacattcaaagattccctggctttctctgtcaaataccagttttagcgcaagctcctcttcaaaataattcctcaggcaggtttctgctataattttctggcgcaggctttcctttagttttggcccatcttccagaatcacccgtagcctttcccccagaataaccaaatcttcttttaaagtatcacactcggttccaatttcttccagctctttcttcagctgctttaagcggccagccttttttgcaatttccggacggtttaggtactcctcaaactgccgaatctgaatctcgctctctttttctttcgcactccagctgcgtttctctgcaaaagcatcatccatcagctgttcactttgaacgttcctgtccttctctgtactgagattctcctgagccgtccgaagctgcagcattgcctgcctgatctcctgccagatgcggctatattcttccagcgcatcattggcttcctcataggcttcttctgttctgccatagggaaatggcttgcacttttgcagcattgtctggtattgctggttctttttaaatatcagctgccgctcctgcgcctctttcttcccacattcctcacatgtcctttgcagcttgtattcacattccctttcctggtctaaggcagcgttaatctctgaaaagccagggagcttctgatattcttcctgcagcctttccaaatgctcctgcacctctgtaatctctttttccaagcttacaattatttctgtaatttcagaaatccggccttccagctcgcggattttctgttccttccgtctttttctcgccagaactcccacaaactcagcactgccggttttgcctgctttaccagccagaatcccctgtttaaaagtcccgtctttcccaaggtaaattccttgtccatcctctttatcttcataaatattgctgagaatcctctgaacggtctctttcagagcaggttccagctcttcgctgacagtcagcccggaaaagccggaacctccattccctttcacatacaaaaccgtatccaaaaaaccgggacaccgctttctgatattctcaaaatcatccgcagatactacaagtgcatctaaaattcccattttctggagctgagcctccagccttgcacagtacgtctcatccagattcttagaaaattccacagttttataaaaaggtactgctttgataccagccctcttaagcgcctttcttgaacgctctatactctcgtccctctccggctccaattcccctgaattccgcaggcatgtaagcttttctttttcctgatccagttcttcctcctggattttcttctgatattccagactgctttttagatccatgagtccctggcgctggcgctcataatcggtgcgcaaaagcgcctgtactgtttctgcatctgctgcagactgatactcccgaattttctccaccagtattggaagaatcccgctgtcaggactccactgagaagattttttctctgctgcatagatatctgtgatccactgatccacacagcggacaacatcttcctgtgcagccttaaagttctgctgagcctctgctttttcagtatgaagtttctccagctgcgccgcaagttcatcatactgtctggatcgctcctcatactcacgtatttcccttttacattcagccagcagttttttcagcgaatcaaggctttttacaatttcaccgcttttctcatgttcgcctctgtctatcatctgaagagccgcctcgtgctgatcccactgaataatctcctgctgctctcccagttccaacttggcttccccaatctcctgctgtatttgttccaggtaggccatgatctccttcattctgcgttctccccgccagatcatttcctgataatcccggatcttactctcccaatcggcaaccttcccggcagcttcttctttctctcccctggcctgctccaacttgcggtcgattccctccagatccgcatccagaagtccagcccgctcaattccttttagctttttttgctcctctaagtcagccagacgccggctcttgctgtttctggcctcctctgtctcctgccgcttctgctcctgtatgtcaagctggcactgttctgtctctatcttctgcttcattgcaatataagcctgtgcctttttcgcaagcatatattgattataccgggtatattcattccgtatgattttcacatcatcaaaggctcgcttcaaaatctccaggctttcctgaatctcatccattttttccatagcatccaccatagcgcgcagatcttcatctgtcagcgtctgcaaagaatcattcaagatctcatataccttgctgggtttaaattccttggaaagtttgggagcgcggaccttcacaagcaatttaataaactgctcatactgctccgctttccggaatccaaaaatgtactgattgaccgattttttatattcactctggctcgtcgtaaaaaaattgtcatctccaagctctgttttcatttcccttctgtcataagggattttgcttgaaccaatctccttgtacagcttcagatcatagccaatccttcgcccgtccaaaataataaaaccccaaaagtccatgggttttcctctttttgccctctgtccaatggcaatggtgcgatattcttccgacctctcttttttgaattccaaaaataaatatcctgtggattcatcctttccttcttcccccaggaaataatattccattctcctgtcgctggacccaaagggatccagccggctcggcgtacggtcaccgtccaatataaagggaatgaagctctgggttgtaatggatttaccagacgcattttgcccacgcaggagaagctttccatccacaaattcaaactcttcttcatcatataaccagaaattcacgaaccctatacggttcattttaaagcggtctttcactccccggtacctcccttaaaatcctccggataaactcctgctgtccttcccacagacggaaataaggcaatctgcgttccgtcatttcgaatcatcagccaggttttcatatattttaacacatgctccacaagcagctcctcatccatttcccgatattctttgctccacccgctgctccactctctgcggcaggacaaaatcacgtctgaaatgcgtttccttgtcatgtaaatacattcattttcctgcttttctaaattcccctctgaaacctctttttgtatcctcccacagaccagaagaacaatctccggaagcatggcgtctctcgggtgaacagaaccatagcagtcgtccccgtccaatgagatacatgccatatttttgtatagatccagatttcctcccatgttatcattgatatattttgcaacccactgacgctgattttttaaatacagcgaatctgcgtcctcactgttctcccagtacatagacggacacaccgccaactgcctatacacacggttgatgcgcaatgcgcctctgttttcctgaaattcttcaaaatctgtcttttcaaaatcctcccaggattcaaatatagagatgccagttggaaagctggttgcaaaatactttgaatatccggtattttcatacaaaacttcctgtcctgcctccgagccaaaggcctcgctgcgtccctcatataccaggagcatctgtagtttctccatatattgcagaacacgaaccagggattttctctgtgtaaaagaagtccaatctatggatacataagatttcagctgcgcttcaacataatcaatcagctctgacaaaagaaactgctcctgttcctctttatcctccagatacatcagcactacacacaaaatacagtagtccctgatctccataaattccccgattcccataaacgcttccgcatgagccggtcttttctctagttttaacaaattttcagtatgaacaagcttccagcccagctgctccctgataaagcgctgaaaattcggaatatccctcttcactctgtaatacgtttccttatctgtatccttacagatccagaaattctctaatagtgttctgaattcattcataatgttataaactccaatacaaacgcgggcataaccagatctccatcctcgcaccttaacacacattttcccttcgtctgcgtcaaacgatattcctgcccatattccgtccttcctgttttccgggaattcatattggcctgcgtgatccactgcaaaaatgtaatccttgtctcctccgaaataacctcttctatttctgaaaatgtgatcttgttatccttgatgtaatacataacaatctctttctgccgtttgatcttctgcagatacttctccctctgcatgtatttctccaaagacttatctgtaaatcctctccggtcttttttctcccgataagctcttgtatgaggtttcagcaaaaaaacagcaggctcgtccttataaatactgtcattgataccctccccctcgcgaggttccaatgtcttaaaatgctgtattttctgtactccaaaaacatgagccgatagcttctgagcctcttccaaatcctcacattgcagaaacagttccaaaaacttgcggtaatcatccttcctgctgattccgccattctggagctgtacgatcagcgctgcattctgaataatacttcttattacatcattcgtgattttcaaaacttttttgcactcacactcatttccctgtgaatctataaaccagtttttcagagaattccatttccccatcacattttcacgtatgcttggctctgcatttccatgaagctgcaaaaccgcatgtggaatatccaattcactctgtatcacttttgacagaatatattcttcaatcaccggcatattatctgacaaaatttgctcgatccgcttggaatgacgctgcaattcctgcacaaattcattcaaatacttaataaacttgtccttatgtactacaaattccactgacttcatgagctgttccgtttttccggaataaaaatcccgcagataatcctgataattctggttaagccttttaaaatcctcctggagcaatccccaccactcattaatctccttcagactgctatcttttatttcttctgccttttgcaggcttttttccagccgaacaaaaaaattcgtggataaattgccggattccaaaaaaagattttcaagacgcacagtgagacgttcaatctcaaccgcatactctgacatggtatagcgatactgcttattcttgtaatccgctatggtataaacccttccagggtcctggatcggagtaagatttttccacttgaccaaagcttccagatctgtcatcaactgttccatggtatatcccgtaaacgtctcatcctgtttaagcagctggaaaatatcttctttgtatatctggaaatgcatcttctcatattcacggtaaaaacaccgcataattttacggtataccggtgcattgggaacggataaataagatgtctcattaattggttcaaaatattccatttctatgaattgcctccgaatatgtatttacaggaaattctaaacattctgtaaaccagcagaaatgataacatcaagattataaaatccaaatgatatcttattccatcggatccggttgttgcaaaatttgcaacaactgaagcccagcttagttcaccttctaaaaatatttttatgtgtcaggatatcatattggtaattaatactccaataatttttactaataattcataatcttaagcataccataatctctaaaaataacaactataaaaacacagtgtttttaccaaatccgctatattttgtggttaaatggtgagtggataataatgatgtctaaaagacgtggctcacccctggcggagtttcgcttgtcttatttattaactcgtgaataatatcaccttttcaactcttatccgttttatgttccaatatttttatcgaatccaaataatccttctccacatcactgagggttctggttttatattttctgtattcactcgttgctttatcaactgcttgtttatgagtaacacttccgtttccttgaagtaactgttcgccactcattgtaagtatacgatccaaatgcgctgcccaatcgctcatagtcattacctgttcccgctctgcctgacgttccgcaaaatcaagataccctgaaacaagttgtcccatcgcccgaagctctttttcattcagatagtttttggcaatgacagcctcctttaatgttggctgatttcctgcaaatgtcataagtcccataaactctttttcagcatccgctctggtataaataacttctgctgcagtttgtccatgaatcgcatagtgaatcttattctgaacctttttaaagaactgaatggatatttcagctttcggatcataatcaatacttgtagcataaatttctaagacttgcctgtaaaataccttctcagaagcacgtatatctctaatacgttcgagtaattctttaaagtagcctccaccacccaaattcttcagccgctcatcgtccagcgcaaaaccttttctcatatattcttttaaaatgcctgttgcccatattctaaattgtgtgccgcgctttgacttcacacgataaccgaccgaaataatcacgtcaagattataataatctacatcataaacttttccgtcagccgcagtataggcaaattttgcccatactgcttctttggacaattctccttctttaaaaacatttctcacatgcttgcctattacgcttctatctctttgaaacaactccgccatctgatcaattgacagccagaccgtatctccatcaaaagttgtatctatctttgccaaaccatcttctgttgtgtagataataatatttgatttcctattaatatcaccttgactattcactcagttcacctcctcgccttttctatgcctttacttttttaatgtataggttctttgttatatgcatttccttaatagccttaactgtatatttatttttaccttattatagtgagcaacctgcctcattacggatctttccccttctttttgaactatcgcaaaatttgccacagttgcggtctgagccagcaattcctctttcaaagcattattaatacgttttccaatcgtttttacatcttgctcgaataattcggccatctgatttcggttttaaccatacggtgccctgttccggtgtaatgggtacctctaatgcaacattgctatcagtaaataaaactatttcttttttatccactctagccccatgtcctaattattttgcattactttttttctgcaacaggacaatactttccacatgtgttgagtgtataaaaatgatgttcacagagcagaattggccctgggcggacatgcggtcttccctgctgcataagaacgtatccttttttgatattccctttgctctgccattgaactatatcagagatttaaaaatttaaagaggcttttcgtatcccaggataagataggtattgctggatcaactagtaccaacaccccctcagcccttcctctgaagattccattcttagcaataatatcatccctaaaacgcaaacaaattcttatcctatgttcaagaatatctattaattataagcaatttgcctcttacaattgctactttttcttatggtgaatatcttttattgtgtgtacatcattttttattaataatcctgtatgtgcactttttctacgcaattgatttacgtcttataaatctgacaaatataaattataaggatgtatattatttgacgaaattacgccgattatctgtccgagcatgtgcatactgctagatatttgaattcccaacagtattactatttattccaaatccaactttttcttaatcatcgagtgcgtccacgattcatctttttcctttgtaaagctttctataatatcttgcattgtttcagcactccagtatatcttaagtttttcctttgcacgagttattgctgtatagaaaatagaatgcgatattttttctgcgttataggaagggataattatctttacagatttatactctaaaccttgcgccttatgaatagaaacagcatatgcaatttgaaaaggaataattgtcttaactctttcttcatcatcttctaattcttcaatacttgcaatcacctctaaacagattcgcgttccaaaatcggtaacatcaacgaattcgaaactttcattcctgcattgccgttctgttagaattgtatctatatcaagcgtgaataaaattgctgaatcgctttttgaaatgtctacaattcttccttttaaattgttatataataaggatgaacgcttagtatccagaaaaattattggatctccaactttgaatgtccactcagcccatgaatatacttcacttttggtattggcattttggaaataaaggttcatattgtttaaaccaaacttcccatcgtaatttaagcacaatacaatctcatcttcatccttagatacgaatatttcttctcctatgtcggaagaaaacggaccgtctattgccaatttttcagtaataatgggttcaatttttctaaccccatcccataaactctttaactcttctttttctgtcctccaagtgtttaaaagttcaacattagcgccatccgttttaatgatatctttagcataataaaaccagttaccaaaatcgatagactcaatttgataaatatcgcctgctaaaacaagcagggtatcatcatcgattttttccaacattttccccatagttctattatctatagtactgcattcatcaataaaaatcacatcataatccgtaagggtaaccatctttgtaaagctatcgatacttacaaaatctgactctgaacctggattctctatacgtctttttaaattttgcaaagcagtatgtgtttttgtaagaaatagcttctttgattgcatcatcatatttgaaacataattaatcaatgtagtttttcccgtaccggccgctccgtatatgagcattacttgagattttacaaataccttttgcaacgcaaccttttttaagggatcttcaaattttaaattgctttccctaagatatcttgaatttgactcctgttgtcccctattagacacttttgaaagctttaataatttttcaagtataaataaagtattagcttcataggagtcgatagataaataaccattttcttcattaattcgaaaaccattactacactcccatgcatctaagctatcattatattttttaatcttctccatgcttgccacagaatccacgtcaaaatacaattctcctgttttatatatcagactttcaattgtcaaatatggatatacagtattatattgttcagaaccattagttatttcaaggatatcatttatattgcctttacttgttttcctcccagcaagatttgaaatgaagggctttttctcaaatggatagcatctgctcgtaatataaagttcctctgtaagacactttttgtcaaatgtatttggcagtactgattctaatatctcttcccgcaaatttagtaatatatatcgtacagtgtgctttcccatcttatttgaagataatgcatagtctcttctcagtttaaagaacacctcctcaaaagtattcgttttggtcccaccataaatttggtgtaaagcattttgatacctgttttcatgtaaattaattaaatctaataaattgatacccgtcttagtaaggaagtccatcaatgaggtatactcaccataattcttgtttaaattagtacttatatgcaaaactttacccagtttatttaaacatgaaggatttatggatactttccaattagtcactactttaattttactatttgcaccccagagattgatttctgcatcagcatatgcaatctgtattgaataattggtcgatatattctgcttcgtatatacagtaatccgattaaatttagttgcatacaatccggccaattgtaatgtaatttcaaaatatctttccccattaacaaagaacggtgtctttttttgaatataatatcgagaggttctaacattctttggagataagtcaattgcagcaatacttgagactaccatttcataatactctgtatcaagagtatcagtatgtaaagggaatgattctaggttttctagtactaaaatactaaaattatttttcaaaaattttctaatctcccaaagatagctatagtatttcaacatcaacctttcggattgaccttcgtcaggaattcttgagccaatatatttaagacctttcaaaaatttgctcaaatattgggtttcaatattaaattgggataactcccatgctaacctttcattaacatctgtatatcctaaatttattgcatttaaaatcaaagtagcatatcataaatcatttagcccattcactatccttctcgatatattatcgcgagatttattctcattattgatcctatcaatttctaatgatatatcctcacatctagtctcgataatttttatggcatcttcttttttgaggttattcttatttaatttatttaggaacagatgaaaatctataattcgtttgagtttattacagaatatattaacgctttcgtctgtatcttttatctcatcttcagcattcagtttaattgttgtgctattcttttcaaaatctattgatttgataaaaccaggagatacatatttccaaaaaacgcgtttttctcctctaacatctgggtttaacacaataaataaaatccctggatctgcagttacttctttagcgataaatgccggaaaggctaaactttttaaactatacgaaattatgccgttagtttctgtataattatgtgttccttttatctggactataaaattttgttctggacatctagatatttcaggattcgaaacaaattcaaatgtaccatcatgattgggccatttatcatcacaggaaaagttagtattaattttcccatctgaggccaaaaatgtttctaaggctgaaacagccgcacgatcttcagctgaacgttcagagtgagttgaaatatgacgtctgattaaatcactattgtttaaatgcaaaatggtcacctcgttttaaatatcatttgaacttccactattttttagtccgtactaattcgacacaaacctcgcagtgtggtgagtggataataataatggcgaaaacatataattctcccttagtggaaacctttcgtcagaatcctaataattattttttccctccaacttatctaattcccctatactctctaaaaaatgacattccaccggagataatatatattcctgatttcttttatacttttcatactccaaatgtgctttctctaatgcttgctgatgtgttactttcccctttgttgttaatatatctcgtctggtcatcctaaggtaatcatcaatcgtctccagccagtctttcatatacattggttcctgatttaaagcatgtacctctgcaatatccaaatatgccgcgacaattttattgagtgcatccaactctttttcatcaagataatttttcgccacttctacatcagagcgttttatacggttgccgctccatgtagtcagccccatattatctttatccgcatctgccctttggtaaatcacctctgccgcagtatgcttatgtgctgcccaatgcattttattctgcacctgtttaaaaaacaacactgaactttctgccttaggattgtagtcaatactggtcgcatagatttccagaacttttcgccaaaatactttttctgaagatctaatatcacggatacgtgatattagttcttcaaaataattgccgcctccaaggttcttcaagcgatcatcatctaaggcaaacccctttttcatatattcttttaaaatattcgtggcccagattctgaattgtgttcctctaagggactttacacggtatccgaccgaaatgatcacgtcaagattatagaaatcaatctgtcgttcaacagttctatttccttctttttgaaccgttgcaaattttgcaacagttgcttccgccaataactcaccttctgaaaaaatatttttgatatgcctggatattgtagacttattcttttgaaatagctctgcaatctgatccaacgagagccacactgtgtcattatcaaatgtaacttcaactttagtgattccgtcttcagttgtgtacattaaaatacttgatttttccaaatttcttctcccctcaaaaaatttgatagtaattatttcacattttcctaataatcataaatataatattccattcaaattcgtccacaaatattgaccgaatacagtagcataaatatatttataattacctataagataaatttgaccttctgatataaacacatctctgatcatataaattatctattttcgttggattatatccgtatgtacttaaaataaattcaacatcagccgttgttgttcttgatttcgaaccaataacgatttcacctgttaaatcattcgctacatttgaaaatgaaagttcatagtatgaacatatattatctttagtaactcgatatttcaattcacctaattcaaaattattatttttgtaagctaccttgctctattatctttattttctcatcaatcacaaaatcatcaaatttaagatttctaatcgctttaaccgtattttttcttaacatatctatttgtttttcaggtgcttgtagtagtaataatggtaatactacagaatccatataagctaaattatttttttcctgaactaaataaaaggtgtgttttaacaatgcaaaatccgtatcctcattaatgataattcccaaaatcttcttatattcataataataactttttccgacctcgtcatagaaatcttcacgaatttcatcacttatctgttggcagaaagcaactgcagtatctatattctttttatatacttcataaatatgaatggaaaaaatcatcaattcacgaacaatccagaaaaactctcctctggtttccgcttctggacgttcctgtttttcatgttcattacccagaatatatatcaatttatctaattcatgattctctaaaaatttgaattgcaagtaagaatctattctatacatgtattccatatttttagaccaaaaatccctcttacgtgtcatcatatgaaagaaatccatacccaaggcactcagtctatatttatctgcaaactttgcacataaaaggcatagtaattcacgtttttcgggattccaatatggtattatttcattttccttaacatcgttccaaaacatacgaagcttaggtctcgaataatcactgccatctgccaacttgtctggtacacgattattcaacaaatctccatatatatatcccaaagcatgcatcattttcgttagaatacaatctaatggaatactatcttcaacatcatattgacatattaaccgttttatgaattcaaggaattcttttatatataactctattaatcctatagtatatagcttcatccagtattccgcttccattttttcctttattaagggatattcttcctgtggttgtattttggcagctataagcagcatgcattcatatacctgctgtatttctgatacgtcatctgcatctaagatattcaaatacataagacaggaatcaatcataattggtcccgttacattcatgacaacctgtggaagtaatttcatttcccattggaatgctttacgttctaatttttcatccttattatcatgcgcaatacgagccatttcatcaataatctccgcaaaaaacacagggttgctctctattatatattttttagaataatataatttttttaccccctcgtaatcctgagacacatgcaaacaatacatatttgaatgaagaatactcttccacaaagttggatatgaatcaaccttaattcttttaaaaaaacaatctaattgattgataaatcttttttggtctttacaactcttacgaaccttctccaacatacattgaaaaagtgcatctatattctcaatctgttccagttccatccactgcttattactaaagtattgttcagaaattttaaagtaactctccaattgctcaattgaatctatattaagcatcagcatctcattataaacagaaaatgctgatttattcattaaagaatctggaattaaattttctatttgttcttgatttagttgaaaaatttcatcatcataaatattgttgcccttgcattgcttcatataattttcaaagaaaatcaaggatatattgagattaatcattgcaagcttaataccaaataaaataattacagtccatactttattatcttcttgcgcatacttccatattttttccaatctatcatttagatctgctacttctccatcagttttccagactataaaatatagttgtactactcttaacaaacatttcataaatagcgacattttttcaggcaatggtgtttccttccaaaaagattctacctgtatagaatagttttttacttcctgttctatcatttcttccattaattgtatgcaaaaccaacccatagaatcaaaatcttctagtctgtagaaataggatatcaaattcgagatgtctagcggttctaatacttgttttttcagattttgtatcatatattgatcaatactgtttttttcttctatctgtaattgttcttcagcataagattccaatatattattggagcaataataatcatctccctcaagataaatccatctgtttttcagcttttcgagacacttatcgctatcttcaacttcttccggtatagatgcaatctgcgcaacccacgctttattaacacgtctatttatataaagcattcgataatagagtcttctcgtttgttcatcatctatcgcttcaataaacattaatttcatttgttcttctatcgacacagtcttccttgaaataactgtcaggaatacttcatcatcaattttccatccattcctctccatccgatacaccacttccatgacaacaggcggcaaagagccacacacctctataaagctctcataccctctagttttcagcaaattgtctggcgctccatgttttttcattatttcagtaatttcttctttatcaagtccctttaattcgatagatataatttcttctttattgatatatccccttatataatcttcaagattttcatatccactagaaattaatttacagtttactttcttgcattcttttaagatctgcaaacatttatccttaacttcgatattcgcgatattaggaatcccatctaaaattaaaacactaccatcttgcaaattcaattcctgtacatttatgttaatgaattctttttccttaactgtaatccacaaatatgtagatagtttttctgcaatacgtattaacgtttgagtttttcctgtaaacatttttccgtaaatatgaatccatgcatatttttttaattttgatgttataccttttacatatagattcttttcactaccatcaaagtacttaaatggttgcgtccctactatactatttttttgtactgttatttgtatcctatttaaactatcacttcccatagtattttgttgcatatgttgctcatgttcatgtaaagcacgaataatattctgttcacttttttgtacgtcagcttttgatgccatagatgcttttacactattaaactcacttttcatatcctggtgcaatagatttgctaaggctatactctctgaacccagaaaagaatgcgaaataaaattacagatatcttcaattttactataaaattcacgaatatctgcattttccataacgccaattgtttttccacgctctttcagatattctgctgtattttgacatagtttataaattaattcatcagatgtcattttaagtgcactatcaccctgaaagacatactgaaagatttgttcgattggtttcatattttttaaataggattgcattgcatctgtatcaaaaatcctactttgttcttgcattcttgctaattctctactgacactctgttttgcattttcttttatctgtttgagttttttggattctaaatttattcccttaccaactacatcatatatgatagaagaaaatatattaataactacagaaacaattaatccattcatattattatttcctcctaatatctattaatcaattttatgcacctactttatagaaccaagcctattttcgacataattccacgcagacttcacagtgcaccgtccccggaaacatatcacaacacctccccctctccaccacataccccccatctgccaaatacctcaaatccctggccagcgtagccgagtcgcagctgacataaaccacccgttccggtctcattttaagtatggtatccagacaaaccgcatcgcatccttttcttggtgggtccaccacaatcacgtccgcctggacatgattcttttcaaactgttccggcagtacttcctcggcctttcccacaaaaaactctgcattatcaataccgtttatctctgcatttctcctggcatcctctatggcctggggtacaatctccacgccatatactttcttagccttctgtgccaggaataatgaaatagtgccgattccgcaatacaaatcccaaacaatctcattccccgtaagtccggcatactccagcgctgtcccataaagccgttctgtctgaacaggattcacctgataaaatgaaagtggcgatatctgatatttcacatttccaatataatctgttataaatccagggccatatagattcacaatctccttccccataattacattcgttctttcctgattcacgctataagaaatactggccatacctttaattccattcctgtttacatgcctgtttgatatatacccttttgcttcattctcacttgtctcctgctcttttacttccagcccctttgttccctgctcacttactccctgtccctttctatccttcccatccccaccggtcagcatctccaccaaacgctcctttccgggaagctttttaccatttatcaccagacataccattatttcacctgtcttaaatcccttccgaatcaggacatgcctcaccaatcccttatgtgaaatctcatcatagggctcaatcttcatttccctcataaactgctttacaatatccagaatctccctgttttcctcaactcccagcaggcagtcctctgcttcaacaatggcatgtgtccgccctgcatagaatccggcaattacatttccgtccttatcctttccaaaggggaactgggccttgttcctgtatctccagggctcctccatccccatgataggaagcatatgaatctcatcctcagcaaatttgcctatacgaaccagattattcatcaccttccgctctttaaatttcagctgttcttcataactcatggcctgaagctgacagccaccacattgccttgctaccggacatgacggaatgacacgggaaactgacggttccagaacttccatgagcctggcaaatccatatgatttctttatcttcatggcctttgcccgcaccacatcgccaatcaccgcatccttgacaaaccagatgtagccatccacttttcccacgcctgctccgtcctcattcatatcctctattgtcacaataaattcctgattcttttccatacaattcacctatcctgtcattcaattattattatgagcgattattgctctccattatttcatcctgttatcttatcctgttatttcatcccatccgcccaccaacacacttcttccatccccgccccattatcacaaaaggccgaaaacacactggtcaaggacacatcctgcaatcccgtacccaaactaaatgttttcagccttatatattcggtcccgttatttctctttattatccaacctcaacgcctattccgttgtcttcctgatattagactccagcagccggttgtaccccagccatcctttattctccccgccggactgcagcgcctctatcatggtctccatcttggcatctgtgttatcggcaaagttaagggccaatgcctccaaaagcgccggcttcttgggtgagccgtactctaattccccgtgatgggccagaatacagtgtttaagctctgtagccagcttctccggaaatcccggtatagagcggatactttcacccaccatctcagtaccgatgataatatggcccagaagctgtccatcgtcagtataatcattctccggaaagcgtgaaagttccctggtcttaccaatatcgtggaagatagcagctgtcagcagcaaatcacgattaatcatcgggtaatatccggcatagtaatcacacagctttgtcacgctgagcgtgtgttccaacaggccgcccacgaatccgtgatgcacggtcttggctgcggaatggaactggaacgctttcgcaaaagccgcgttctccacaaaatagccgcacagcagcttctgaagatagggattcttcacacttcttatgtatcccagcagctcctcatacattttctttatatccttctttgacatcggcaggtaatccgcctccacatactctccctcctgggccctgcgaatccggcgcacattcagctggaaggagttctggaacagagtcacatccgcctctacacgaacgtaatccatggtctcaaattccccgactcccggagaacccaaatcccatatcttggcgtcaatggtacctgtcttgtcctgcattaccagattgccgtattccttgccattcttcgtgagggcaatctgcttgttcttgcacaggtacacatctgcaatgtgcataccttccctgaaggtgccgatatatctcatgttcaattttcctcttctttctatatttataaacctattttataaacctactttaaaaacctaattattaccctatctatacgcctggcagtccataccgccatccataccgctatctgtcatccgtccaacgcattccactccctgacagcaacgcagccaggcggttaacactgcctggcccctctgcctgacttcttacgctgcctgacgtaaactgccgcctgtccacagccgccgccgggtaccaaactctccggctatcatctttccccggttccagttccttccaaaaccccagccgctacctggctccaaccgtcactgaaaactcaatttccttatattcatccttaccgtttctcaggaccgccaccttaatcttatctcctgcgtgcaagctttccacctggttctggaaatccttcaggcttcccaccttctcgccgttcatccatgtgatgatatcccctggctgtatgcctgcgttatatgcggggccgtctgtcactgccgctatcacatagataccggaaggcattccgctgtccgccatggcctggcttacttcctgtcccttaatgccgaaatacggagccggaataccgttgctcatcatctccaatatgcctttataatcagatatggccaccaccgtggtcatcctgcacacgccatcctcgtcgtacttgtccgtgacccatccgatgagctcacccgaagtgttcagcagaaatgtccccgcctccgcgtctccgctggcgctggtatagaacaccctggagctgccgtccaccgtatggacattgcgcgccacataggatatatttccataatcgctggagtggacaatacctgccggcgcgccgatggccaccaccatgtcgccctgctttaccccgtaagagttgcccagattgatggcctccaccttcttaaactgctcgctgtccatctgggccgcgtccacgcttaccacggacagtcccataatggtatcgctctgcttcactattccggccatcatggttccgtccgggaacgccacctcaatggaatcagctgcctccacggccttgtccggcgtaagaaccagaatctcagtgcgggtcctggctatgaccactccggagaactgtcctgatgtctcgatgggattgtcaaaccagtctttttcatgctgaatggaatggaccaccaccagactgtcatccgcgtcactggcaatggtgcgcaggttgctgtacagtttattcaaatcatcaatggaataacggtatttctccatctcggagcgtaccatctcatccactgcctcggtcatggccggttctgtgggctcagtctccatcaccacaggtgccgtggtttccggttcatcctttggtatggtaatctggctgctctcctcaggagtctcctgacctaaaattctctcagccacaggtctgctcacaacaaaacaaatggccgacaacacgccaaacagaacggcacaaaaaatggtcaacaggattttccgggcaatctgccgtctggtcatgggctgccggataatcttctcattaataaaacgatgagacttgtccggagtctgctcctgccggtctaaatctctatgctggtcagcacgtttatccgccatagtactcctccttgcgaagactcttatcctctattatacgtttcttcccagtattatgcaagattttatatatgaaaagatagtaaaaaagatagtaaatatcgatttttatggtataatttaaatgtcggcttttgggaaaaagtccttttaaatccagcatttttacggaaatcacaggtgaaatcaatgaatcagaaagcgttaaaaactttagaatatgataaaatcataaaccagctcacagaatatgcggcttctcctctcgggaaagccctctgccagagcctctccccttcctctgatttggaagaggtgcgcacctggcaggcacagactacggatgcagtgacacggatccgtcttaaaggttccgtgtcattttcaggtatcagggatatcggagattccctgaagcgcctggatatcggcagttccttaagcatacccgaactgctctccataagctctctcctgaccgtggcagccagagccaaggcctacggacgtcatgacgcagacgaggacggaaggggaagcggcgaatcccaggatgacttcgactctcttgagcccctgttcgcgggtctggagcccctgactcctctgaacaacgaaatcaaacgctgcatcctctctgaggacgaggttgcggatgatgccagtccgggattatcccatgtgcgccgttccatgaaggtgacggccgaccgcatccacacccagctgaactccatcctcaactcctgccgttcctatcttcaggacgcggttatcaccatgagggacgggcgttactgcctgcctgtaaagtcagagtacaaaaaccaggtatcgggaatggttcacgaccagtcagccacgggttccacccttttcatcgagcccatggccatcatcaggctgaacaatgagatgcgggaactggagatacaggagcaaaaggaaattgaagcggttttggcctccctgagcaaccaggcggctccctatacagaggagcttcgtatggacatggagctgctggcgcagctggactttatttttgccaaggccggcctggcccgccattataaatgcagcgcgcctgtgttcaatgacaaaggctatatccatatcaaggacgggcgccatccccttttgaacccccagtccgttgtccctatcaacgtatggctgggcagggagttcgacctgctgattgtaaccggcccaaatacgggcggcaaaaccgtgtccttaaaaacagtgggcctgtttacccttatgggacagtccgggcttcacatccctgcgtgggaggggtcggagctggctgtgtttgaccaggtattcgcggacattggggatgaacagagcattgaacagagcttaagtaccttttccgcccatatgactaatattgtgcgcattttaaatgaagccgattcccggtctctctgtctttttgacgagctgggcgcgggtacggaccccacagagggagcggccctggccattgccatcctttccttcctgcacaacatgaagtgccgcaccatggccaccacccattacagcgaactgaaggtatttgctctcagcacgcccggagtggaaaacgcatgctgcgaattcaatgtggaaactctgcagcccacgtaccggttactcatcggtattcccggcaagagcaatgcctttgccatttcccagaagctggggctgcccggatatatcattgacgacgcaaaatcccatctggaggccaaggatgagtccttcgaggacctgttaaccagtctggaatccagccggctgaccattgagaaggaacaggctgaaatcaacgcttataaggatgagattgcctccttaaaaacccgcctgacccagaaggaagagcgtctggacgagcgcaaggacaagattctaaaaaatgccaccgaggaagcccagcgcatccttcgggaagccaaggaaacagcggaccagaccataaagcagattaacaagctggccgccagctcaggcgtgggcaaggaactggaagctgaacgtgccagactcagggaccagctgaagaaaacaaatgagaagctggctgtgaaacccaagggacccagccagcccatttcaccaaagaaactgaaaataggagacggcgtcaaagttctgtccatgaaccttaaaggcactgtaagcacgcttcccaatgccaggggcgatttatatgtccagatgggtattctccgctccctggtgaatatccgtgacttggagcttctgaatgaaaaggacataagcgccacactgggcgacggaagctccataagctatggcggaaagactgccaggggcaagggaagcggcagcagccagattaagatgtccaaatcctccaccgtgtccgctgaagtcaacctcataggtatgacagtggacgaggcagtgcctgccatggaaaaatatctggacgacgcctatctggcccatctccagacagtgcgcgtggtccatggccggggaaccggagcccttaagaacgcggtgcacaagcgcctgcgtcagctcaaatatgtaaaggaattccgtctgggccagtttggtgaaggcgattcaggcgtaaccgttgtgacatttaagtagaaatcagcagcaaggaggaactatagcatggcagagaagcagaggattctgattgtggatgatgatgcaaatattgcagaattaatctccctctacctgatgaaagagtgttatgagacaatgattgtgggggacggcgaggaagcccttaaggtatttccggaattcaagcccaacctggtactgctggacctgatgcttcccggtatagacggttatcaggtctgcagggagctgcgcgcttcctcccaggtaccggtcataatgttgtccgctaagggagagattttcgacaaggtactgggactggagctgggggctgatgattatatgataaaaccctttgattccaaggaactggtagcccgcgtcaaggcagtgctgcgccgttaccaggcagccccggccccggctccatcgtccaccgagcagcagggcgaatacgtggagtacccggacctgattgtgaaccttaccaattattccgtaatctatatgggccactccgtggaaatgccgccaaaggagctggagcttctgtattttctggcggcttcccccaaccaggtatttaccagggaacagcttctggaccatatctggggctatgaatacattggggatacacgcaccgtggatgtacatatcaagcgtctgcgggaaaagataaaggatcacaacagctgggccatcaccacggtctggggaataggctataaattcgaggtgaaacgatgacccgttctctttattccaaattcatactgggatatctgattttcggtctgctgggctttatcgccattgccacattttcatcaaaaatgacccgtgactatctggtccagagtaaggcggacgcgctgtatgacgaggcaaatatcatcgcctcgtcatgcagcaccatgtatcagggaaaacggctggattccgaggaggtttccacccagatacgggccttgtcccactacctgaaggccgagatatgggtggtcaaccgtcagggcaccgtggttatggacagcctgggcggttcgcgggtccagtcctccatagacggttttgacccggcatccatcgggaaccggtcctataccataggggattactatgggatgtttaacggaaacgtgctcagtgtgtcagctcccatcacagggaattacaacacctacggctacgtgctgattcaccttcccatcagcgaaatcaaccagtcccagaacggcatcttaagcatactttacatcacatccgctgtcctgttcggcctgtcccttattatccttctggtattcacgcagaccgtgtatctgccccttcgcaagattacagtgggcgccaatgaatacgcggccggtaacctggattaccgaatcaatgtcaaaacccacgatgagatgggttatctctccgacaccctgaattatatgtccgacgagctgaataagatggaggaataccagaagaatttcatagccaatgtatcccatgatttccgctctcccctgacttccatcaagggctatctggaagccattctggacggcaccataccggctgagatgtatgaaaaatacctgtccagggtcatatccgagacagagcgccttcacaagctgacagaaagcatgcttaccctgaactctctggatgccaagggctatctctccaggaccaattttgatatcaaccgtgttataaaggatacggcggcctcctttgagggcacctgcgagtctaagaacgtaagctttgatcttaccttctcggatgacatccagatggtttttgccgaccttggaaaaatacagcaggtcatgtacaatctcattgacaatgccatcaagttcagccaccacgattccaccatctacatccaggcatcgggacggtatgaaaagatatttgtatcggtcaaggacacaggcatcggcatacccaaggacagcttaaagaaaatctgggaacgtttttacaagaccgacctgtcccggggcaaggacaagaagggcaccggcctgggcctgtccatagtaaaggaaatcatacaggcacacggcgaaaacattgacgtggtcagcacagaaggcgtgggaaccgagttcattttttcactgccccgttccaccagcctttagataatgcctgcacgaccggattatccgcactgccgggaatgtttaccaatataaaaatgttttataatatcgtaagatatttaccagaaaattgtgatatagttatattgtggagagatatacgattcattccaatatgattagaaaaagaaaggacaggcagacatgattacatggaaaaaagtgggcaccgcattgttagttgcctctcttatttcttccgtcctggctcctgcagccatggcggcaagcaagaagaaggtgggcaagatttaccttaccattgactctgacatacgtaccggacgtgatgggggagacgtggaggtcactgctaccggagacaataccagtctttattatgtagactcctgggaggtcaccaatgatgacggagacacctggagcagctccaagccgcctcaggtagacatcatcctgggtgtggaggatgaggaagaatactatttttccaacacctcttccagcaacttcaagctgaccttaggttcctccagcaaataccgatttgataagattaaatttgtaaacgccaagcgcaaggacagcaacgccacccttatccttacagtccagctggtatttgacaaggacgcggataccagcgcggcagctgccccgtccaaccttcagtgggattccgctcacaacggaaacggttcctggaacgaggtttcaagcgccaaatattatcagacccagctcattaaaaacggagctgccataggtgaaatcaaggacatctataacacctcctataatttcaaggaccagattacggcgcccggctcctatcagtttaaggtccgctccgtgaagtccagcaacagcgccaagagcagctggaacacatccggctcatggacagtaagcgaagcagatatcgctgccctgggcaatactgtcacggataattcccagccggcggcaggcacctggcagacagcagcggacggccgctggtggtacagcaatgcggacggatcctacccggtttccagctggcagcagattgacggccagtggtactattttgacgcggagggatatatggccacaggatggattgaactggatggtaagagttattacctggatccttccaccggagccatgtatgccaatacacgcacgcctgataactgctgggtcgatgaatccggcgtatggattcccggaatgtagctgaccgggtgtttacaggggaaagatacgttacagttaaaaaattcctttatcagacaaacagggagcaggcacatcgagacaaacgtgcctgctccttattaatttactaatcacccctgcagtatcagtcctacagtaccagccttgcggccccgtatatacctgcgtcatttcccagggtggcaagtcccagcttccccttgtatttggatatgggggtaaaataatcataatgcttctggacaacatcaatcaggaactgtcctgccttggatacgcctccgcctataacgaaaatttccgggtcaactatcatgacggccatggataaagccagtcccaggtagcgtcccaccacatccatcacttcattggccagctcatcccctgccttggccgcgtccagcacatccttggctgtgacgttcccgccatgctcccgcagaaccgagggcttatcgctggcttccatcttccttctggcctccctggcaatgcctgtggccgaacaaatctgctccacgcagcccactccgccgcagttgcagtgctcccattcctcatcccttacgtggatgtggccaatctcaccgccaaggccgtgacggccggcaatgattttctcatcaataatgacaccgccacccacaccggttcccagggtaatcatgaccaaatccttatatcccttgcctccgccctgccacatctctcccagggcggccacgttggcgtcatttccgctctttacagtggctccgtccagcagattgctgagctcctcctggggattcatccggcgccaccccaggttcacacatacctccacgaatccatccggcataaccggcccgggaactcccagcccgattccggccaggtccgtcttaaggctcaggcccatttcctccatcttatcacggatggaccgagccacatcaggaaggatatactttccgccctcctctttacgggtccttacttcccacttgtccaaaagctctcccgtaatctcaaaaagtccgatttttaccgaagttcctccgacatctactccgatacatttcatccccatggtatctatacttcctttcgcttttattcctgcatcactgcagcttaatttccgtcattttctgcggtcccatgacaagaagggttcccgggaaccttcctgcggataccttgctgaccgtaaagtcaaatgttccgttgtatttctccgtacctgtcatgttgtaaaccttgcaggaactgtcattatacaaaagaatcaaatcaccgtcaatatcaaaaccggtatactggtagttaaaggacttttcaaaaacagggcttccctccctgtcataaatcctcagtctgtacggatctccgccttccacattatccgtaacaatgccaaccttgtcctgagcatagctgatgcttcttatattctcctctatgggaatctggctcaccagctccggcgatgtttccaccctggttgaaaagaactgtattcccttatccgcgaatatgacggaatggctctcatccagaaacctgaccctgcccgccatggcatctcccaggtctttgggaaagaatatacccacaacacggttgggatcattcttgcccagtccgaaattgtaaaacacaatcttgcattttatcataccctggtccagatacatataggatgtgataagctgcgtgccattgggcgaaagacttaagtccaccggatacccgtcacctgacagcagagacttcaccatgatgtccagagggcttccatcccttttatataaatagatatagctcgccttggaatcctcctgaagggcggccaccacgcccttggcagacaccgtgaccctcaatatgggcagcagcgtggtagcctgcccctgggtcccgttttgatcgcatatgtagatgctgttgccctgctggtcgccaatagccgcaaaatcgccgttgaccgatacaacgggagacctcatttcatagctctgtacccataccaccttgcccttggcgtccagataggcagccccgtcctttgtatatttgagaactccgtccccaaaatctctgtacccgcagaagcttccttcaccctgggcagcggcttcctgggcctcagccaccagatcccgctcccaaaccgtctgataatccgtaaaggtgtggtagcgttcatagcgggacagcaccagggctgctatggctgccagggcagcaagcactgccagaataatcaggcgcttcctgactacgcgccgatgcgccttgtgcacgatttcccggctgtcctcctcttcctggaagggactgccggaaggtacgatttgacgtttcagctgcttttttttattttcacggctcattgaattggtactgcccatcctgcgttctcccaaaattcgtcttttgcgtatatgcattagtatacaacaattttggataaaacgcattatctttttccgccagaggtttccaggcatatgcttacggaaccagaagcttttgtcccgcaaatatgctgttttcatctgtcagggaattgacccggcagatttcatctatatgctgcagattatgatacagcttaaagcagatgccatacaatgtctctccgtccgccacggtgtacaccttgtagctggcagcggacacagtctggtcgtcagcttcccctctgcccccggttggcggaagtgtggaatcatcggcaggagcttttgtctccgctgccgcctggctatggccggattccgtctgttcatttccctttttggctgagtcagtcttggacgcgtcctggctggatgcctggccattttcctggcctgatgccgccgcctggccgcttccctggcctgtccctgccgtctgaccgcttccctgacctgatgccgtctgaccatttccctggcctgtcccgcccgcctggccgctatttggcggttccagggtttccggagtcaccctggaaggtttctcatctccattctccggtgacggagccgtggtgggatatacctttcccgatgcctcctcaatcacataatcaggctggtccgcagcggaccagccctttccggaaggattctctgtaccgccctttccggcaaacgccatcaggccgtcctttatgtttccttccggtaccacggatgcaatcacgctttccatctggtgcattttctgatagttgttgaacatagccacgccgcctgccagtactgtgacagccagtacactgcaaaggcctgacaaaactcccaccgtgctccggtgacgtcctgcctccaccctgcgctcgtccattttttgcttaaaattctggatgaccttatcatccactcctgtttctgctcttggcacatccttgcgcagtatcatgtaatcctgcatcatctgattccgctcataatatatgctgtatcctcttaatttgtaaaatccgtcggaggatgttatgtaaacagcttcctcgccctccaggccgcagttcagatacatgagctggttctttccggtaaaatactggctgtgctgcttccaataggtcagggggcttaaggtacagccgggtcccgcgcagaggaaccatccctggaccgtgcgcttgggaaacatctgctccacatcctggtaggcctttttccaggcgtcctcggtgaatgccacctttccgccttcctcggtgaccgaatccatttccagggctccatccacaaaaacaaaaggtatgtcttcatgggtctccctgcttcccaaaagcagacccacacgcaaatcagccccctttgccggctggaggcgttttaaataagtatttacataatcctccagatataactttaagacctggtccctctcacctatctgccggaaattcttcggcagcttagggaagggttcatataattctcccatagaatcaccccgctgtttttaatccaaacaagcatagcagattcccggcgcagaatttgtcatattatggcagcattttcccataatcgttcgacaagaaaaatgctttcgcaaatacagtccgccattttcataaccatggacagacgcacgctctgcagcatgaccgggtcccggctgcccactccgcccactattccggttatggctatgtcccccacggcctgcagctccttggatactcccaatcccggctgaagcgctccccggcccagggtcgcgtatcccacatggtccagacttcccaccgaagcatcaatggcaaccaccacataatccggatagtgaagccgtatatacctggcgtacaaatccaggttcatggcatggactggcttgtcaagtgttccgatgaccgccgctcccttaagccgccggctgcggagcatatgtcccaccagagggcccagactgtctccggtggaccggtctgtgccgatacacaggaacatgatgccatcctttcccttggccgccatctcctccctgataagccggtccaggtgcatggcaaaaccctccgtttcaaaaccttctgatgtattataataagatatgtcttcccgtttttgtacgttaaatgtcttccataatttcatagctaagttgtccacccaaacatgttataatcatcgcccggcttaagtgggctgtttttatagtataggcttgggtatttgaaattatgcatgaaaaaaggacacacggattgacagtatccgcatgtccctgtctgcctgacagccatatcgtggctggaccaggacctattgggccattttagccaggcagttatttgttttataccgcttatatcttcaggttataaaaccccttatccaaatagcttctcctcataaacccccgactcaatcagccctctgatggcatctgtcacggcctgtttatcttccctgtaggtaacgccaaaccatttatccggggtgtcaaggacggtcactctcgccttcttattctgtaccagattgtctatgattttaggaagcaggtattctgatttaatatccccttccttcagactgtccaaaaatacagggaatcccttctccagctcctggatgaagctggccggaagcccccacatattcatggaaacaggctgggacgggctgatggtcacaggcgcaccgctctcgttcgtggcatggagtccgtcttccttcatctggatattataagtttctgtcacgttcgtcaaaaatccatctccatccacctggcacacgcctctggtgactgtgccgttgtcgctcagggtgttggacagcacaaacccccccatgcagatatcatatatctcagactgtgaatccatatgctccgccatgtaatcatgaatcctgcgaaatccttctcgtccatagtagtcatccgcattaatcacaaggaatggtccgtctaccatacctttcacggaaaggaccgcctggcccgtaccccatggtttggttcttccgggtgtcacttcatagccggccggaaggtcttgcagttcctggtatgcgtattccaccggaaggagcttctctatcctgtgtccgatgatttccttaaaatccttttccagatctctcctgattatgaatattaccttattaaatcccgcttccatggcatcgtggattgaataatccatgataatctcgccgcctggccccacaggctccagctgcttgatgccgcctccaaagcggcttccgataccggctgccatgattaccaatgcagtatctttcatccttaacttctcctttgatttaaactggttacactatagcacatttgaccttaaaaagcaaagggaaagaatgcctcctgccgtgccagttcagtcagaacacgtctgcaccggcacacatcctcatacggcacgtactcattgggcttatgggccagctccaggctgccgggaccgtaggacatgcagttgcggttgcccagggttcccgcaatgactgctgtatctgtgtagccgttaaaggaaccgatatatgtgtcctcccccgtcacacgatcgcagacagatttaaggctggccaggagccgggaaccgctgtccttttccacatagggacggtcacctgtgacggtgtaactgcccctgactcccgcaatctcggcttccgccgcctttacagcttcctctactatatttttcgcagccgctgtgtccgtaggcggcaccagacgcatgtcaatccataccttacaggaatccggcacaacatagggacggtatccccctgttatctgtccaaaggtcaccgtagacatacccagatcttcatgaaccgggcagcttccaatggccttgcggatatggcagactgcctctgccatggcggcaatggcatcagcgcccttccacggattgctggcatgggccgtgattccctgcatggtcaactcaaaccaggtcctgcccttatgggctacctgaatctgcccgtccgttggctccgtgtctaaaatccagtcttcccggcctacccagccgtcccggatagcacattccactccccgcatgaaatcttcctcgtccacggttccgataaatacaaaaggccgcaccggaagctctcctgtacttccggccagctccgccatgtctgaaaatgcagacagagcacaggccaggcctgacttcatgtcacaggcccctcttccgtacaggcggtcttcctttaccactgctcccagggccggggtatcttcctcccatccctctcccagcatcaccgtatccatgtggcatatgtacacaagggaagacgccgcagcttcttctctccctggtatgcgggccataagattaaagcggcccggcattacttccttttgaatcagttcaatccggttcttaagcgctcctgccttttcctctatctcctttgtaagccattcatatatccactgttcaatttggctctcataggctcccgggtcagagctgtcaatctgtaccagctggcctgccagctcccaggtcctgcggtccccttcttctactgtcacgttttcgctcctcctgtcaatcatatggttggataccaggcgtctgatactgtttctggtactgcttctgatactgcttctcatgccggtatccctgccccattatacccccatatctataaatcatcaacaatggcggcactttttgcgtaagccgtgctctttgcctcaaaaaagtctgttttcaccatatttgcattggaatactggttaacccatttcatggattccggctcctcgtcatacccctcatacaaggtgccgaagcccagcccgctccagcgcaggtttcccaggtaccgtatgtagtccgtaaccatttcgctggtcagacccgggacatcatcgccaatcacatagctcccccactggatttcctgcgccacgccttcctccagcatggacttaagcatacccaccatctccggcgtgaataactgcggctcctctttcctgagctccccaatcatgttgcgaaacagccacaaatgggtattctcgtcccggttgatatagcggatttcctggacgcttccgggcatctttccgccccttcccaggttataaaaaaacatgaacccgctgtaaaaatagatgccctccaggatatagtttgccataatgaccctgagaagggtcacatcgtccttcctctcctggaattcattatacagatttccaataaatgtattgcggcgcagaaggtgttcatcctccttccactggtacaatatcctgtcccgctccaccgggctgcagatggaatccagcatatagctgtagctctggctgtgcaccgcctcctggaatccctgaatcgtaaggcacagatttacctcattggctgtgatatactgggcaatgcagggcaggttggctgtctggatggaatctaagaacaccagaaagctcagtatcttatcataggcagtcctctccggagccgtcaggttcttataatcctttaagtccgcgctgaggttgatttcctccggaatccagaaattattcatggcctggcggtaccagctgctggcccaggtgtatttcatattattaaagtcgttgagattggtggtgtttccgcctatcatcctcctgctgtttttatccgtgtcgccctgagggttaaacaggggcttggccgataatatactcatatcaaatatcctttcttaatatatacctttcaaaaaccgcttagctggaacagctttcacactcctccacctctaaagacttgctgcgcacatagtacagggtctttacgccgctctcccaggccagtatatagaggttcagcagctggcgcatggtgtaatcattggtaatgtacaggttcacgctctgggcctggtcaatgtgcctctggcgcacgcctgcggcccgcaccgtccaggtctggtccatggtgtatccgcttttatacagccagaaggtccgtggtgtcaggtccggggcaaccctgggcagtatggcgttctttttctcttccagataaaaccgcttcatcacggggtccaggccagccgttgtaccggaaagtatgctggtgctgctggtaggcgccacagccagaagataggcgttgcgcattccatactccgccacctgttccgccagcgatttccattccccgctcacaagcccgcgcttctcaaagtatgctcctgtctgccattcgcttccctcaaaataccggtaacgtcccttctccgccgccagattggcgctggccctgacagccgcgtaatgaatccgctcaaacacccggtccgcaaaggccagatgctccccgctctcccaccggatgccgtgctttgccagcatatggtggtaaccgctgactcccaggccgattcccctgtaattccggttggtgattccggcataggccagcggataaaaattcaggtcaatcacattatccagggccctcacggcactggcaacaatatgctccacttcgcccggatcatccacatcaatggcccccaggcagaggctggccaggttacagaccacaaaatctcccggccgtgtggtctggaccaccgtggtctccccatttacctccagcacctgagtcgatacactttctatgggagacatgttctgggcaatctcggtgcacaggttggaacagtatatgatgccccggtggctgttgggattggccctgtttaccgtatcccggttaaagataaagggtgtgcctgtctccaccgcggacttgataatcaggcgcaccacatcctttaacagcacggtgcgcttggatatcctgtcatcctccacacagtccagataccgttcctcccacagctccccgtaacagtcctccaggcagtatccctttacggtctgaatctcgtgggggcacatcagatgccagttctggtccagattctccttagccatcctccagaacaaatcaggaaaacacacggccgggaaaatgtcatgggccttcatgcggtcgtccccgttattagtccgaagctgaaggaactccggcagatccttgtgccaggcgtccagataaaccgccgcagcgccctggcgcatgcccagctgatccactgccacagccgtatcgttcaccagcttaatccagcggattacgcctccggctgccccctcaaagccccggatcctgcttcccgcagccctgacctttccgaaatacaagcccatgcccccgccgaatttgctgacctgggcaaagttgtccacacttctgtaaattccttccagactgtcgggcacagtgtcaataaaacagctggaaagctgatgatacggcttcctggcattggacagggtgggggtggccatggttacctgcatccggctgagcatatcgtaaaaccggcgcacccattttatcctgcacgccttatcttccttcatggccaggtgcagggcaatgcccagatacatttcctggggcgtctctaacggatgatggctgtggtcctggatcacataccgcttaaggagcaaatccagtcccgcataggtaaagagcttatttctctcatcatccagaaatccttccgcctcctctatctcctcccggccgtaatgcttcagaatataatcaccatataatccctggtctgtcagatatgaaatcttttcatagagccccctgattcccagccccctgagctgttcctccatctcacaggcaaaacggcagtaccgcagcctggccgctgcaaattcccacataggtgcttccttggaagtcagttccgccgcggaacgaatcagggcttccatgccctccgcaggttccatcccctgcttgtgaaaggatcggtacctttcaaacaggcgctccagcccgtatccctccccctgaaaatcccttccgattccttccaggcattgttccagccctttatagtccaaatctatatccactttccttttcgccatgatgaccttttgctctccttctctaattcctgacatccgtgcattccttttccagatgtcacgcccaccattataaaccatatatatagtggttacaagctgtttttgcgccacctataccccaaatactgtattctcctttattcacaaggctttcccggctacagttatatacttgtggctgtttcaacaaaaaatgtgattgcacttgtagtagtttcagcctattatatggatggaacaacaatgaatacgtgaccttcaggtcacaaagggggtaaactttccgcgtatccgttactcggttcatacaagggaagcagagattatgagcgagataaaaagtccattttggcgcacggcagccgaatatggcatcattacagtaagcatctggattatggtggttggaatctactttttcaagtttcccaatcattttgcattcggaggcgttacaggcttttccacggtagtaagtgaaatcagccgttggtccgccagtgacttcacatttattgtgaacacctctctgctggtattagggttcattttcctgggtaaggggtttggaataaagaccgtttatgcaagtatggtcatgtccatcagcctttccctgctggaacgtgtctgtcctttaagcaggccgctgacaaccgaacctctgctggaactgctgttcgccattttcctgccggcagtgggcacagccatcctctttaatctgggcgcttccagcggcggtacagatatcatcgccatgatacttaagaaatataccagtcttaacataggaaccgtcctcatgctggtggatgtggcggccgcggcctcctcatttttcatcttcggacctgagacagggctgttctccaccatcggcctggcggccaaatccctggtcattgacgatgtgattgagaatctgaatctgtgcaaatgctttaatattatctgtgacgacccggagccgatctgcgactatatcatcaacacgctgcaccgcagcgccacggtataccatgcagagggagcgtttacccatcatgaaaagacggtaatcatgaccaccatgaaacgcagccaggcattaaagctgcgcaactatatccgcgccattgagcccaccgccttcatgctgatatccaactccagcgaaatcatcggaaaaggattcctggccgggtaagcttagctgcgctcttccatatcatatataataataacggcagcacaatccggttgaccccaatcagattcgctgccgtttttccattccgcccgtttcagtcaccggttaattccatcccgtatccaatggtccccaggcgttccagcagtccaaacatataatccgtataccgttccgccacctcaatcaccactgcatccggccgaagctcaagggcggctgccccgcagtcctctgtccggtaatccatcagcgtcacgtccgggtagttcctggcaaagtactcagccatgtgtaccccgaaggaatccctgcatataaggattttttctgccttcccctctgcgtctgaggagtagtgggtaatggtctcatgttcattctggtaatccatttcaaaggacacatcctccctgtagcctgacaccttgaggaacggatcatcgtcatagtacttttgaagattcagcatggttgcaaggtccccgctgaaggttcccctgttttcaatatcataagagcggtatgattccgggccgaacggctccccgtctatatcctgtatcaccatccgggacgccataaatgcccccatatcattccaatgggtatcgtacttcctgtatatctggcaccagtcatccttggccttcctgaactcatccaggggatagtacacatcgcagtccgtattctccttcagatatgcgtacagcaaatccgccttggactgttcctgaaccactttcacggaggagggcataaactcactgtacacctgctccttgtttggaaccatatagaaaaccagcttcgtccctccggaagccaggttttcatcggcctgcttaagcagcgcggcaaaccgttccagatcctcttcactgtagcgattggttccctggtagtccgcaatgctgtcctccatttcccccttcagcttatagaacatccatccgtcctttcccataagcacggcatcggatgtaacctccccaaacacgtggatgtccgccagttttccgaaggccacaatgggattcttaaaggccagatggtcattaaagtaggcgtcatactgacccggataggatttaaggtccgccgccctgagattcctgaaattaagaaccggcttttcctggtaaatccggttttcgtaattctccgtatccacatagtcctttagaggtacgaacaggagtctgggaagtatcatcatccccaggaacatgcctgcaaatatatatgcttttgcgcgttgtctcacctgcatcctcctctctaaaaccggaaataaataaacggattataggtgctgcccacagccatcacaatcgagtaggcgaacagcaatataagtcccaggccttcagacaggtaaatgttcctgccgtcctgcatatatttcctgaaacaggggaccagggcctgaaacgggccgcacagcatcattccaatcaccatatagactatggtcttatggctcatatacatggccgtatcatatatccccggccgcagaagaaacatctgcccaagcagcatgagtcctctggtaagcgaatccgcccggaacatggtccatcccaccacggtaacgaagaacatataaatatagctgacagcggcaggcagcctatccagccgccgctttaaaaacagccgttccgccacctgaaggcagccgtaatacattccccacgcaatgaaggacaggccggcgccatgccagaatccggtacaaaggaacacgatcatcagattgcggcaggtgaccagcgtccccctcctgcttccgcccagaggaatatagaggtagtccttaaaccagccggaaagagaaatatgccatctgcgccagaactctcccacggttctggccagatacggataattgaaattctctgtcagctcaaagcccagcattttgccaaggcccaccgccatatccgaataacctgaaaaatcaaaataaatctgaagtgtatacaggattcccgcgtaccatcccaaacctccgctaatctggtccatgggattggccagaaccttgtccaccacgcttccgaactggttggcaagtataaccttcttgcccagtccgtagataaaccgcctggctccgcaggcaaacagctcaggcgtcacatgacggtttctgatacatgcccccatcccctgataacgctcaataggtccctgtatcatcttagggaaaaaggacatgtaaagtcccaggttcagcaggtttctctcggcccgtatggtcccacggtacacatccgccccataagagatcatctgaaaagtgtaaaatgagatgcccaccggcagcagcaggttctttggctccatcacggtgcctcccgccagcttatttaccaggccggtcaggaaatcgaagtatttaaaataccccagaaaccccaggttcaccgcaaccagcgccacaaggagcagcttatccggggtgatgagcgtctgcttagaggcgccggaagtggtctgcctgtctgacatggcagcgtccccggctgcccccgcatcagctccggctgtccccgcgtcagctccggctgtccccgcgtcagctccggctgtccccgcgtcagctccggctgtccccgcgtcatgccctctgccccgcacagcctccatccccatggcgcctgcgtaattcactgccagtgacaaaaggagaagccatatatactcctgttccccccacgcgtagaaaataaagctcattgccagcagaaacaggttgcttaaccggattggcagcaccagattgaccaccagcacaaagggcaggaacagccataaaaatatcatggaactaaatagcatgaaatattttccttcctgaattcattcttccgtccgcaggatcccggaaaatgccctggaaatgccctgcaaaacatcggcatccgtttccgtccatttccctgcggtggaccatggcgatattataacatgcctccacgggttttaaaaggctgatttgcatggccatctgtccgggcgctgcctggctcctgtttacacgcagctgctttcttgctaactttaaacagactttaaatagcccctttaaatgtccaagtgcatcattgtaccaaaaggccatctgtgttataattatctcattaaaatttccccgggcggaccggaaacattttttgtctcatactgcccggctgcaatcatcaccttatgagatatcacgaaagaaggaagtgttatggacctaaaattacaggtaaaacagacccagactttgtcacagcggatgattcagtcagctgagattcttcagatgacttctcaggagctgaatacttatatcaatgaactggcattggaaaacccggtaatcgacattgtggagccgcccacggcacaagaacagcgcgagtccatcgaacagcaggaatggcttaattctttcaatgaggagaattactatctgtaccagcgccagaataatgacgatgactacgactttaaatccagctggaatataaacacggacgacggagagacccttcaggactatctgtggtcccagctcatcacggaaaacttcacggaccaggaaacggaaatcattaagttcatgctggaatgtctcgacaacaagggctatctggaagagagcatagagaccattgcctcctactttgggaccgataccgagcttgtggaagatcttctgtccgacctccaggctctggacccctccggcgtctgcgcgcgttcactggaggaatgcctgaagctgcagctggaacgcaggaatatgctgaccccggtactggaatccatcattgacaactgccttgaaatggttgccaagaaccagattccggccattgccaggaagctgcgcctctctcccgctgaaaccgccggttactgtcagattattaaatccctgaatccaaagccgggcgtatccttcagcagcagggaccagctccgctatattataccggatgtgaccattgtaaaattcaaggaccattttgacatactgctgaacgaatccatgtatcccaccattgagcttaacagctactaccgccagatgaaccagaatccggagtcctccgaactgaaggagtatctgggcaataaaatccggcaggccgagtgggtgaagcagtgtgtgacccagcgcggaaaaacacttatgcaggtatcccgggccatcctggaacaccaggaggaattctttacctttgggcctgcccatctgagtccattaaggctggcagatatcgcccaggaactggacatccatgaatccactgtcagcagagctgtcagcaagaaataccttcagtgttcctggggcgtataccctatgaactacttcttctcgcgcagcgtggctgtccaggaaagcagcggcaatgaaaacggcgcccaatccgtgactgccgcggatatcaaacgggtgctccgggaaatcatagaggaagaaaacaaaaagaagccttacagcgaccgcctcctgggtgaaaagctggcagaacgcggcatatccatctcccgccggaccgttgccaaatacagggaagatgaaggcattgcggatgccagcgggcgtaaggagtatgtgtagcaaaatattctcagagacatggccggtctgccatgtctttttgtttcccccaaatacgcaggaacgaattaagtttattttacgcaaaaatcatcttgacaatgtcggagaaatcttgtaaaattgttgatgtcgctgatggagcagagcttgtaaggatagcggctgatgattcctgcttgtttcagataggcaaatgcccagatagctcagttggtagagcagaggactgaaaatcctcgtgtcgttggttcgattccgactttgggcactgaccgtgtgacagaacggtcgtcacgcaggtgtagttcaatggtagaacactagccttccaagctagatacgtgggttcgattcccatcacctgctctgtaaatgcaaaaagccttggagaggctttttttgtttacccgatgttcataacaatcggataggggagattttaacctccccttccacaccacgtagcgtaccgttcggtactacgcggttcaatagtttactcggactttcagatagtgggcagtcatatcgggataaccaagtctgtccactatgattcttttggtgagtgccgagttgagcattcccgccgctctccacactccctttcggcagttcgccatctcatgcaccttccactctggtaaatgtaacgcccgcaacattttatatcttgtgcgtaccttcttccattgtttccagtacaccgctcggattctgtggcgcagccactcatccgtctgttccatcaggcttttcatgtctgcatatcgataatagttaatccatccccttgcatagcttcggagtttttcttccctctcctgattgctccatttgttccctctggttgtcagctcccgtatccggttcttcatttttgccaccgacttcgggtgtatcctcatgcggcatttccctttatgccggtaaaagccgtagcccaggtattttatcttgctgacgtggctcactgtcgttttctgaagattgactttcagaaacagttttcctgtgatgaatggcacaatgttttccattgtcctctctgcgcttttcctgcttttgcacagaatcaggcagtcatccgcatacctcacatacttgtgtcccctgcgctccagttccttgtccaactcattcagcatgacatttccacataagggacttagcgggcctccctgcggcacgccctcggtcgttgcgtgaaatcctccgtcctccattactccggctttcaggtacttgtgtatcagcgagattaccctcccgtccttcaccgtcctcgacagcacctctatcagcttgctgtggttcaccgtgtcaaagtaggattgtaaatccatgctgaccacgtagacatatccttcgttgatatatttcctacatctttccagtgcgtcatgcgcccctctgccgggacggaatccgatgctgttgtcagagaactgttcttcatataagggcgtcagttcctgtgcgattgcctgttggattaccctgtctaccactgtgggtatccccagtttccttgtttttcctttctcctctttgggtatttctacccttcggactgggtttggcttgtatttgccttccctcacctgctcgaccaattcggactggtgttctctcaggtagggtagaagttcatccacctgcattccgtcaatcccaccaacgcctttgttcgttttgaccttcttataggcggcatttagattgtcgcttctaagaatcgtatctagcaggttgtccgtccgaaagtccgtgttggtgtcggggttcccggtaatcctttcatgggcgtactctcctgtttcccttccctgttccgcaggtatctctcgcaggtagtcctcaatatgaagttgtctgtacttaattccatgtccggtttccatttggtaacgacacctcctactgttcagtccttcccggtgcgtttgcgaccgcccggtactatgacctctgctgacttctcacggcaagctttactccgtgacagcgaatgttttatcgccactttcacgtccgtgagacctccccgggtactcacacgttctttcccacttatacctgccccgtttactgctggcgttccgtgcagttattggactttagtttgttaggcaacctcatccacgcttcacagcctatccggacaacttttacaggccagtggtttgcctccggcttccttcagaccccacctcacgatgacgcccttgccattggctgcacccttcccactgccgggcgggtcagggactttcacccgttagaacgtgcgcccgccgggcgcaccagtaaaaggcagcagagaaatgcactgctgccttttatgtttcttattcttttatgtttcttattcttttatgttcccattctctcttataacccgctatttaccctgtccataatgatttttggcaaagtccttcatcgccgctacattttcaggggatatccctgccggttttccgcctgtggcttcaatcatgtaaagaattctggctgttgcctccaggacggttgccactttaaacgctgcgtccatactctcccccacgcagacagctccatgggaatgcagaagacaggaatttgcttcctttcccaatgccttttcacactcagccgccagtttttcagaaccgggcagtgcatactgtgtacatttgcaggtgtctcccatggcctgggctgcctcatctattatcagaggaatgtccttaccctgagtggcgtataccatggaatacatgggatgggtatggatgactgcgtttacctcttctctgtttctgtagacagccaggtgcagccctgtctcaatggtcggtttcctgtgcccttccacgattgttccgtccagcctgcagaccactacatcgtcttctgcaatggtgctgtatttcatggcgctgggcgtcaggtataccagcccggtctcaggatcgcggatactgatatttccccatgtctcaacagtaaggcctgaattctccagctttttcccgctctctacaatacattttttaaagtccatttctgcctctcattccgctgctgccggcagctctcattttattatggcctggagtatgttcggatcccatatgaaaaatcctttgcaagactccaaccctgctcctactcaaaggtttttaagtaatccttaaactcacctacattgtcctttgtgataacttccgttccggtgtcaatataggattctgcttcgccgccatcaaatattttaagcatattatccacacccagttttcccatttcagccggatactgtgccacggttgccaggaattccccgttttccaccaggttcagcgcttcgctgacagcatcaaatccgataatctgaatctgctcctgcatattagcttccttgatggctcttaatgctccgatacccatattgtcgttgcagcagaagaaaagttcaacatccggattagcgcttatgatattctgggcagctgtatatccctggtccacttcccagtttgctgtctgttcagccacaacggttaccgtattcccggctccttctataaatccattgtaacggtccgctgcattggtctgtccttcaatccccttaagtatggctgtctttgttccctgctcaaagtttttcgccacatattcacctgccagtttggcgccttcgtagttattggttccataaaacgggatatccaggcccacattggcaaggctctcatcggtcagctttgtatccagattgatgatagggatgcctgcttccttacattttgtaagagcggattccaaaccatcagaagagctgggaaccagcaggattccgtccaccttgttggcaatcatattttcaataatgccaagctgcgcatcagcgctggcatgctgatctccggcctggacctcaatcttgacgtgctttgcctctgcttccactttggcgccgttggccagggtaatatgatattcgttgtttaaagtcatccccacaaatccaatcgtcttatcctcatagctgcctgatgctgcttcggcgctgctttcttcgtcccttccgctttccccagtagtatccgcggtccggacctccgttttttgttccttggctgtctccggcgcagtctccttcggagtgccgccgcatccgcttagcaccgctgacgtcataaacgtgctcattgccaatgccatcactgttgccgtcatgtttcgcttcataatcaatttcctccttttatttgcaaatacttaatgtatttagctctcctactcgctttggcgttctttcttcttatccgcaaacactgcggctatgatgacgatgcccgtgacaatggtctggtaataggtggcaacattcataatctggagcccgcaggtcagggtgctgagaatgatggctcccaccaatgtatttccaatcttcccttttccgcctgataaagaaattcctccgatgaccgcggaagctatggcgttcatttcataaccagagccggcatttgggtctgcatatgtaagacgtgacaaaagcatgatgcctccaatggcagcaaatatgccgcttaaaacatataccataagcacggttctgtttacattgatccctgaaagcctggcggcgcagatattgccgcccgcggaatagacatgtcttccaaactttgtatatgccatgacaaaaataatgactgcgtagaacacaaacacatatatgacagataccggaacagtcccaagcacctttgaagccatcagacttcccagtcccttaggaaaactggatatgggctgtcctccgttaatcagaagcgctaatcccctggcaatctgcatggctcccagcgtcacgatgaaaggcggcacctttccgtaactgaccaggcagccattgaccagaccaaaggcggctcctgccgctatacacaaaattcccatggcaattaagggcatgcctgccttcaaaatcagtcccccaaatatacccacaaatcccacgatggacccaacgcttaaatcaattccgcctgtgacaatgaccagagaggcgccgattgcaattatggaaataatgctggcctgggtaataatattgaacatattattaagggtcagaaaattctttcccatcatgctgcagattactgcaaatacaataaaaataacaaccagtccaatatataaagtcaaggccggcagctttgccttaacaccatctttgtagctctccatacctatattcctccctgcatcgcatattttaatatggtttcctgcgtcaaatccggggcattgtccagtatggcctccaggacgccttcccgcataaccgcaacccggtcgcacatcttaagcacttccacaaggtcagaagatatcataataatagaggccccctgattgaccaggtcatacataatattgtatatttcgtcgcgtgcccccacgtcaattcctctagtgggttcatcaaatatatatacatctgcattggaatacagccactttgcgataaccaccttctgctggttccctccggacaggttcctggcctccgtgagatgtgtatgggtcttaatccgcaggctcttgatgtaatcctttgcgcgatccgccatctcctttttgcggatgaacggtttggccagctgctttaaattgggcagtgcaatgttatccatgacggagtgcataagcaccagcccctcatccttcctgtcctcgctcagatagacgattcccttttcaatatttctggacaggttgttggacaatgtttcacccttataggtgacagtacctccatttttcctgtaagcgcctatcacacacttcgccgcttctgtcctgcccgcacccactaagccggcaaatcccagtatctcgcctttgtgcagctcaaatgatatatcctttaaaaagtccttatatctcagattttcaacctttaacacaacctggttcatgtcaaccgcttcattggcaatcttttcaaagctgaccgtgcgccccaccatcatctttgtcagctcgtcctctgaggattcggacagtcttacggttcctatatactccccgtcacgcataaccgtgcacctgtctccaatctcgaacagctcgctcatgcggtgggaaatgtatatgattccgatgttttccttctgaagttcccggataattccaaaaagcatgtttgtctctttatccgtaatggccgctgtgggctcgtccagaaccaggatctttacgtgattggatatggccttggctatctccaccagctgtttctgggccacactcagctcacggaccagagtctttgggcttacctccaggccaacccgcctcatatatccctccgcctcttttatggcccgcttgtggtccacaagaaacccctgtccgtattccttaccaatgaatatattttcatatacaggcaaatccggcacgaggttaaattcctggtaaatcacgctgatacctgcatccaaagcctccttcggcgtcataggcgccagctccctgccatccagccaaatgtccccgccttcccgtccgtatgctccggatagaattttaattaatgtggatttgcccgctccattttcccccaaaagaacgtgaacctcccctggaagcacctcaagctgcgcattcttcagtacaggaacaccaaaaaagcttttgttaatcccgcacatccttaatatacatccgtccatggacaggcccccttacccttttagtttttgataccgtttcaacgcttcaccggaatctttcccgcggcaataagttgtactctcaatgccctttcccaaaaggctcctgatttccctcactgtcagatcaggttcaaaatacttgagctgggctcccaggtttcccagggacgtactctctttcccccctgtcactacccttttacccgctgcatccgccgtcatctgacataaccttgcattccgtgagcctccgcctaccatatagacagtgtcctttttctttccgctgatttcctccaggtcttgtatcaccgaggcaaagctcagcgccatggagttttgaaaaccgcatatgattgtaccccagtctttttctccggaagcctgaccggtcttaacaaaataattccaaatctcgtcagacatatgtacaggattaaaaaaactggtatcgttcacagggaacagcggtactatcccctcatggcggtcaccaaggctgttaagctcttcccagccaatgttcccatgttccccttcatattcctccttaatgcgttggatgataaacataccagcactgttacgcagcagggtgattttattaaatgcccctatttcgttggtcaggcatctctttctcacttcttcattcacgattggctcctctaactccatgccgataagcgcccaggtccctgtgctgacaaacagaaattcatcctcctctgccggaatcgccaggacagcggcagctgtatcatgggacggcacgcaaattaccggtacatcatacgatatgcccagaatttcctttacattagaatgaagcatgccaatggccgtaccgtgtttcccaatggcggcaaacagatcggagggtatttccatcgtcctcaatacttcttcactgagctccctttttctggcatccatcagctgggtcgtggacaattcgctgggctcattcaccatacagccagtaaagagatagtttaagatatccggaatcatgagaagcttatggccgcagaaaacaatggactgcattttctccatcattccctttatcatattgaccgaattaatcttatcgcacaggattcccgtctgcccgaacagatatgtcctctgctcctcagacatctgttccagaacctctgcccctatgccgttcctgtatgacaatggattctgaatcataagcccctgtttgtcaaacagtgcaaaatccactccccatgtacagataccgattgagtggatggttccggcccgctttaccgcctcttttaacccctctaataatttttggtaaatcatcagtatatcccaataaaaatactgatgaaccctgaccatataatttggtatccgggaaatgacttctgtggttatttgttccccgtcatacactcccagaataaccctgcatgacgaattaccgcagtcaaacgctaccatattccgcttcatcaacacccctgcccctctcctattgaatttttatctccagaccaaacccttccgcccgctgtacaaggaatgataagtccgccttcttaagggacggcatattccccatctcatacgcccgtcctaacccctgatatttgggcagccccagcctgtgataaggaagaaatacaatctcggatatatgatttaaactcttaatgtacctgaaaaaaccattgatggacgcctcatcatcattgcagcccggaatatagggatatctgactgacagttccccgttgtaatgaccgcacagccattccagattgctgagtatcagggtattgtccacacctgtcagctccttatgcttctcagaatcaatctgtttgaagtcataatatatataatcaacacgcccgtttatgtcttccaatgccttttgggggacatgcccgcatgtttcaaccagggtattataacctctccggtgcatctgctctccaatagccccaataatttcactgtaatataatggctctcctccgctgaatgtaacgccgccgccggacattccataatattgccggtccttcagtatctcagcaagaagctcatcctcgttgtattttctgcccattatctccctggcgtccgcatagcactccctgatgcatacaccgcattgcctgcacttactctggtctgtaatatatccgtaaccttccttgtagcttatggctttttccggacacagaacactgcatcttgcgcagctgatacaaacatttgtcttcaccagaacctctgtcccagctctctgggattcggggtttgcacaccatctgcagcggagggaacagccctttaaaaatactacggtgcggataccgcggccgtcctctgttgcataccgttctatattaaatacattgcaaacccccatgtttgtgattccccctattcatcatccgccgtttcactcaccgcattgcggtacttaagctataattccagctcagccctgcttatcacatccatctggcactccggggacagtgacgtaaacaatgcactgtagccagaaaccctgaccatcaaatccttatattcatccggatgctccatcgccttcttaaacaccttgttatccaccacattaaactgaatctgctgcccgtagttttcaaacaacaccttaatcatggcaattaccttctctttattctcatccgtatccagcgctcctttggacagacgcatattgaatatggcgcccttctggaaccatatgctgggcagtttcatgactgaattgcaggcagccgtggcgccttttttctccgaaccattggcaggggagattccattatttaccggctgtccgtccttacgtccgtccggtgtggctccaatgctctttccaaaagcaatgttacccgtcacaggactctggctgtaggagtaacagcatggcaccggcccttttccatacttcgaacttctgtatttatacctgtagctggaaccaatgtagtcctccagttcaactaccctcttatcagctctctcatcatcgtttccaaatttgggtgccttgtttaacagtatcgccctgatttccggcccggcaggcactgtctccatatcctcataattggtgctcatggcatgaagtacctgttccatggtcagaagcttctgattaaatacaatctcgtctaatgctgccagggaatcccctgcactgatagtacctgccgtaggcccgccgtccgccgagtatacggaaccgccctccacaaggtccatcgctctctctatacagtcatataccagggatgatcggaatgcgttgatgtcctgctgtatatggatttcatcattgatatgctctgtttcaacctgcagacccataaaataatccagggtctgcttatacagttccatcagttcccttacactgccgcagtcctccgcacgtttttccaaatccacaaagtggtatccggtcttagggtccgtgccgtcgtgcagtgtgatttccagcaccttctccacattcagccatggacctttggccgcaaaatcccatttcccgggaatcgatgcctcgatacatccgtccggcacccagtccacccggtcttcctcagcaatccccatattttcaagcgtcctgataaatgccttatcattataaaatgccggctggccgccctgatgcctctgtgctgcctttaacgccttcatcatgaacgcatcactggttccctcgaaccatttaatggatacggacggtgtaaacagccttacattttcacatgcttccacacacagatgggaaacttcatttgttgcatcctttccgtccactgtctggcccgcaatggcaagattaatgaacatctggtaccccaggaaaaactctgtatccggccagctcctgagcttattaagttcattgcatttgatgaagaagcattcgactatctccagagcctcttctctggtgattctgccttcctccaaatccttcttatagtaaggatacacatactggtcaaaacgccccagtgaaatggcatgcccattggattccagatggaccgccagcagaatcatgtagatggactgaaccgcctcgtggaaggttctggccggattcaacggaacattcctgcatatgccctccagcttgagaagttccctcctgcgtgtttcatccttttcctgctccgcctgctctttgcagcggtcagcaatacggcccgaaaacatcaccacggcctgattgccctgaagggcggcctcaagaaaccatctttttcttgtattgcccggctctctggggtccagcctcttaagcttattctctatccgtctcatgacatcggataagcctttatctaccacacctttgtaatcaacaattacattgcccaaaccggcagcggacacccatgtatcgtcaatcacattggcgtcccaggcctggttgattttatcaggaagggtctttctcagattttcatataaggacttccccttccagtattccacacattctaatattttgtctttgtcttcctgtgtgtagtaaaacctatcgcctggtcttttatccggggaaaaaggcgagccgtttaattccgcttccagccagtccgtggaatactccggatatatcggggatgctttaggccactgcgcctggtttcccacaatcagctcgtctgcattcacataaaccgtcatgcggctcagcacatcataaaatgcctgggaccgcctcagcgcaattggttttccctctgtctccttcatagactcagtaaaatagacgcaccgctccggacaaatacgcgggtctgcagcaaataaccgttctctcaacctttccgttcttttattcatgttccgcccctcacattcgcttcgtgtatgtaacttgttacattttcaatatagcactttatggtcttgttgtcaataatacatttgtgcatttttcatattaaatcattattttttcctcttttttagcgattattccttgtctcttcctcttgtcaattgcaccagtatgatgtgttaagtaaaactgttacattttttcgtgtttacaattaattttatttaaactataatatgatatggtcggatgaagcttattttttctttttatgaaacaagtttcaccccttcaggaccaggaggagaaatcgtatgaacaaggaaagccgtccggaaaataacggatacatcggaatcagggatattgccaaaatggcgggagtctctaccgcaactgtatcccgcgtcatcaataatccagaaatgacatctgaaaaggtcagaaagaaagtgcaaaaagtaattgaggaatataactatatcccgaaccagcctgtcaagaaaatcttttccaagacaagcaataccattgccgtgtttatatatgacatggagaacccctttttcatcagtctgattaaagaactgaaccagatatgtctggaacacaactatatgcttcttatttgtgatacaggaagcaacccggaacttgaaaagaaatatctttacttctgcctggctaaccgatgtgccggtatcattctgacagaaggcgttgattccgatatttttgaagcctgcaggatccacattccaattgcatttctggaccgtaagacgcatggcaaattctcaagcgtacgttccaacaacaggcagatgatgcagccaattgtggactacctttacaatctcgggcacagaaaaattgcctttgtcggctgtaaaacacccatggattctgttatttccagacagaatggctacatagaaacaatggcaggaaaaggactccccattatccaggaatatatttatgacagaaaccttcaactgacccttcaggccggaagccaggctcttaattatttcctctcccttccggccgcccctacggcaatcatctgctgtaatgacatcattgccttaggggccttgaacgcagcatattccctggggttaaaaatccccgcagacatgtccattgtaggatttgataatgtaatcagcaatctccatcagcctcagataaccactgtgcagcagaacctgcgggatatatccctcgaattatttgagctggtggtcaatccgccggaagagcctgtatccaaaatcattgaggcctccttcatagaaggcgccacctgcagcagaatcgaaacaccccaaaagtaaatacttatgcctggaagccatccgaaaaagcggaaattgtacggtatgcttttgcggatggtctttcagtcaaacttcagtcaaactatttttaaccaacagacaaaaaacctcttgatttatcagagaaaatatgatagactataccacgtcaaagtaatatcatactttcatgcgcgagtggctcaggggtggagcaccaccttgccaaggtgggggccgcgggttcgaatcccgtctcgcgcttttttattacacgccggagactgcgctgccagttctccggccttttgtttctttcagattcaaagcttatataaagcaatgggaaggcgccctcacgcgggcagccttcccattttaaaactgtttttctgattgccaggccgaatcactggcctttaatgtttttgttttaccgtattaaggtactccatgattcccatatgtatggtccaggccatcctgtcctgatattcctcatcctccaggcgcttggcttcctttccattactcaggaatccgcattccactatgacaataggctccttcacatgaagcaggagataatagttgtcattggccttggccatcctcttgttggcctcgcccagcacatagtcaaagcgcttctgcaaaatttccgccagaaactttcccttctccgatgtcttatagtaaaagacctggcctccggatacatattcctcatggtaactgttctggtgaatgctgaccaccaaatcaggtgccgcctcatttatgatttcgcaccgttttctcatgtccgccatctttttatgactgtccccagagctgtaaagtccctggtccgagtccctggtaaggatcacctctacgtcggaggcctcaagatatgctttcagctgctctgatatcttcaggttaatatccttttccagctgaccatttatccctaccttacccggatcgctgcctccgtgtccggcgtctatgaccaccaccggccttgccttgtctgcctccgctgcctgattatggacagccaccagtgttcctgcctgccatgatatcagtgccacgatacaaagcagcagaatccccatcactgtctgccatgctgaatgcttcatcaatgggcgctccctgataacctttattccagtatattcacccgcctgatgaaaatgaacctgtttttactctatactcagaacgttataatcctgtaccgcgtcttctatgatatattccaggtattcatacagaatgctgggatagcagtactccttccacatggagtatccgggctgcttcacagcctccttcaccacctcatacgccctgccgccatagcacgcggcattgatatccccatacacctttgccatctgctgcttctccgattctgtcagcttcacaaatatgctgcccgtctcctcctccgcagaattcttcatggcatcatatgcctgattatagaatatctgttttaaaacaggcggactgtatgtgtcgaagttcagcaggttctcatccgtgctcttgtttttcctggcccatttctccatatttaccttgcgtgtatagtaataaaatgtctcatcctccatgtaatccagcacaccgtactgacagggaggcgtggacagggagctggtgaccacctcatagataccgatatcgttattcctcataaagtgctgcacatgcaggtgcccgctgaggaacagcgggatattctccccttccagcatctgtataagctcctcactgtgctcgatggtacagtcatccgcatataccttgctctcctccagcaggttgtgatgggccaccggtagaagaatcacgctgtcccgggcagcctgctcaagctgctcccttatccactcataggtttctgtctttatcatccccccaaccttattgcggggttcatactggcaggtatccagcatgagcagccgcatggacggtcccaggtcataggtgtagctgagggaattggcatccctgctgctggcctctgagtatccgaattccttataaatacgctcaaaatcctccggagtggtaggttctgccgggtaccggtctcccccggaatacacggaggcgcttggattgttaatgtcatggttgcccggtatgacaaaaaccgtgataccggctttctccacctcgtccagctttttcgccagttcttcatggctcttcttttctccctgaagacttaaatctccgctgataatcaggacatccgggctcagaagtttaatttcctccagtgcggcatccgttatctcccatacgtaattggtcagttttccgtcgccgtgctctaccatggcctgaaacatatccccctggtctgtcagggattctgccagataatgtatatctgtcataaggataatgcgttttcctccaatcagcggctctgcctttgtctccttttcaacatcgggaaaaggctgtatctgcgaaggctcagggtgtgtgggcttttgcagctctgtttcctgaaccgtttcctttgtctgctgtttttcggcggtgggtgccgcctggtttccagtctgtacgctgcaccctgccatgactccagccatgaagacagctgtcataattcccgttatccttgttcttcctgtcatttccttcctccggcgtcacccatttcgtttatttaacctctgacacaatatcccagatgtccgctggttcaaatcccagcttccagcaggcaactcctgccaggtcaaactccttaatcaggtcaatcttaagcttcatggaatcttcctcttccatccatatatactgctgtccgcttccgctaacagtctcaccgtaatactgccccaaaagcttatcccagctaagctccacctggttctcctccacccactgcctggcatccgatatgccatatgcctttgaagaggtctttccctcattcacggtccatactctggtatagaaggggaccgcattgatgaccttttccttggggacctccttcagagtattctcaattccttccctcacatagggaatggatgatacggaaccggcttctcctcctgcatagtgttcatcatatcccataacaatcacatagtcagccacaattccctgttccctcctgttataaaacgcagtataggaggatggtacatagttgtccacagacagcacaagtcccttattgcggcaggcaaccgacatttcccttatgaactgcacataatggggccccgcctctgccttcaggctctcaaaatccaggttgaagccgtcaaagccataggtatccgcctcattcatcagtttttcaatgagctttttcctggtactggtagaggacatcagagtcttagtgtttagatttttgacgctttcctccgtactcacattctccaccatggcccacaccttcagtcccatatcatgggccttatccacgtaatccctgctggccagtgatgtataagtgccgtcgctggacaccacattgaaccaggtgggcacaatcacattcatccccctggcattggatacatagctctcaagagtattatttccctccggccgtgtgacctgatgaaatcccagccttactttcccgtccatggaaatgctggtatacacaggcgcctcaaaggtgctgacaggcgcaacctgctctcctgcctccagcttccggttttccacatatccgatataaccgtccgacgttcttaccctggaccacttttccatggtctccagtacatccacagtctctcctgccgccgcctctgtgataatctggctctttacaccgcccttgaccctgacctgtcctgtttttttcagcactgccgtgtcatagggctgccaggaggtgtcgataaacacccgcttgatctggcttgtggcaaaggcctgagtgcggatatctgtataattcaccacaaccccaagggacaggtacattccatcctgtgtgaccttaaagagaggtcccttctctccctgggtactttcatccgcatacacaatggagtcaggcagtgcatacaccagcagtttttctccctcatcccagtaaaagcgctggttcagatgttcatttacccagtccacgggcaggtacacctggccgccctcgtagattcccttctcctcctgcacctggttatccaaaataagggccacctggccgtccttaataccaaatatcctgctcttatccgccagctcattgctgggcatgtatttcttggcaaaaagcactcccagaccaccgcctgccaggataaatatgaacagcagaaccagtaccgtgattccgcagccgtgaccttttcttcttctgctcatcctgtcctccagtttcctaaagattgtttttattctaccacaaaatagagtgcatgtaccaattaattgcttacaatttacagtcattatggaggaaacaggaacaaaagcccggtatgtgccgcctgctttggctgcacaggctgagacggtactcatggcagcgcataatccgggcttttgttatctgctctgttatttgctgttgttatctgtttttattatctgctcatgaatccttatcttttttctctttgggagggtcgctgagatacactttgtcaaatctgatttccttcagacagccctgctcggcgccaacatagtctcccatgtaaaagcccccgtcttctcccatctcgaatatcttctcccattctttttccgggcactcgactccgtcaatggtaatccgaacccctttgttcttgtatctcttcaatccgtccagataggttctctggtgtttcttccggtctccatactcgacatttcttatcatgctgataagccctcccctattaccgcaaaacagccggacggcagcaccaaggagttgtttccgtgacatacttttgtgcgccgtttccttctgtctcttttttcttcacaaaatcccctcaaaccaccgcatggtctcataatccactgaaaacgcatctactgaaagaggaaccctggccagagaaatcccaaactgcctctctatctgttttctggtgtcctcactgccaaaggcagccgtatatatccaccctgttctgcgtccttcctcctctgataaaagctccaaaaatgcctccagcttccattcgctcagtgcagccatgacaatcttcacttcgcatctgagccattccgccctgatggatggcctcaactctccaaaatcaattataacttcgtcatatgttccatccagacaggacgccagcacgcggggggccccctgcatataatatgtaaccccgaagattttgtatttgtagtccgcagaatccgcctgctttgcggaaccggcctggcatatatcctttatggtcttccatgcgccatggtcattccactcaatcaccgcagtcctgcgctgcagggcactggccatataattggccgccaggacgctgagatgagtcacccctgttccccgtcctgttcctgtgattccgacaaccctgcacccttttgcaggctcccgtctgtttttaaaaaagattctcttagaaaatcccatcttcttaataagcctctttttttcttccacctcccgccgccggtcacggcagaccataaagactgaaaaaaggcatcttcgcttttctggctgaaaggattttcgtattccggcgagacaaacagctttattccctttaaagccttgtctgatttggccatggccttcagttccttttgacatacggcccgtgtgccccgaaatataagcacacggttcccgctgcaccgtcccgtccaggcctgattcatccaggatatataccgcctgatgtatcggccgtcccagacgctggcgctgcctgtcccaattaaatctgccttcgccgcctttaattccagttccgcctgctgccagtctgttccatagtctttcactatgatgtcaaatcctgtcccttcatccagctttacggcaggtccataccacggctttaagcagcagccgttcatggtatagattccaaaacggtccggacgcatacctgccctttgagccatggcggccactgcccgggagacattatgttcctcataaagcgcccggtacccgttcctgttcagaaaatataccagccctaaggctaaatgtgtggtacccgtcccagccttcatcccggtcagaatcaaaatatgagatggtatcgccttttgttctttttcttctgtcagcttcctggtacacagcgcctgaagcgcatcctccacctcgccggcggaagcgtaccgtttctccatatcggagtccatgcattttctgataatccgctcaaaagcctccgatagggcggcagactgtccggcgtcctctctcagggttcctgctgtcataaaacggaggactgcaccaatggcataaatgtcggtcctttgatccaacatgcggtcagaatcatactgttcaggagccgcgcagcccactgtgccgaatcgctttggggcaatgtttgcccaacggcagcctgcggcatgatcaaaatcgatcagctttacggtgccattgcagattatcaggttatttggttgtaaatctaaatgtaatatgggtatttcacacgcagaatgcatgtaagccacaagcccgcagacctgcatcccgtaacggactgcctctgcctcttgaataggcccctgattcgcaatcagggcatatagagaatatccttcaagatattcctcgattaaataaaaaaattcggaatcttcttctaaatcataaatcatgggaatcccaggatggtgcagttcttttagcaccagtgcttcccttcggaaggagtcatagtcggcatcccttttagagatacgctttatggccctgtattcctccaggccaatgtgcactgccagccatacggttcctgcccggcctgttcccaattggtgcagcagacggtatttgccaaataaaatggtattctttactcacccctcctttgtcacaacatcatctcacatcccaattttacccttttctttatcacctgtctatggtcgttatatcttccatggcttttcatatgctatttataccacctgaaaacatcctgcggcacgatattttttaaatttttattaaatgattgatatttccgcctgtaatgtagtatatttaaagtgtagaagtctactttcggcctggagtttccaaaaagcaccctggtccagggcagatgctaccacatttgacacagaacaggaagtgatcctaatgaaaatagaacgtatcaatgaaaaccagattcgctgtacattgaccagctttgatttaagtgcgcgcaacataaacctggtagaactggcttatggaacggaaaaagccaggaagctgttcagggaaatgattcagaaagcctccaatgaagtgggctttgaggcggaggacattcctttgatggttgaggcgattcctttgtccagcgaaagcatcatgctggtcatcactaaaatcgaagatccggaagagctggatacccgttttgccaagttctcacctttcacggacgacagccagaattctcttgtgtcccagttagccagcgagttcctggaaggcgcttccgattccctgaattacctggagccaggttccgtggaacaggttggggatgagagctccgcagacagtgcctctgaagctgccgtcaagaagaatacaggctctgttgccagcagccgcattttccggttcaacagcctggaccgcataagcgaggcttcccgggccgtatccggaatctatgacggcgtcaacaccctgtataagaagcccggcaccaggcagtattatctcattgtaaaacgcctggactgcggcgacctggatttctcccgtgtgtgcaatatattggcggagtatgccaccaagctctcaggtgaatctgccagcgaagcatattttaaggagcactatgaggtcatcattcaggataatgcccttcagaatctcgccaaaatttaggggcgtagcctgctataaatatatggaaatttaatatatcaaaatattataaaacacccctgcggctgtattgccgcaggggtattatattgccttagacttctgccttagacttctgccttaaatatttacttaaaaatttacttaaaatatgccggataccggtttctgaacatctgctcattcaacatccaccggttcagatgcagttccataatctctgcggcctgctttttatcgcggcgccgtatggcctccagcaatttcttatggtcctcaattatcttatggtccttaaccgttgccacggacaggctgcgaatcctgtcatagtgaatcgccagtctctggcacatctcataggtaagctccttacggcagatggaaaacagcttccggtgcatcttattgtccagctccaaaagcttctgggatgaacctccctccaaataaaactcctgaagtctgatattctcatccagccaccgcaggtcctcttcatccgcctggccgcagaccagttccacagccgctttctccaggaccaggcgcagaaagcgcgcctcctccaccagctccacatcaatcaacgcaatgcgcatccctctctggggaaatatctcaatgattctggattcctcgctgagctgtatgaccgcttcccgcacaggcgtgcggctgatgcctatcatctgcgacatttccacatcattaaagggcgcccctggttccaaatccagagatatgatattcccccgcagggtccggtacgcatactgtctggcagtctctccatgtcttttttcctctatcttcatgggtaaaacctcctaataccggtccccaagcctacagggactgtatctccttccagacatcatcatccacataaattcccagactgtcatgctcctcatggaaccgggcgcttccctggcccggcgccctgacactgccgccttcctccgacggagccgagctttttacataccgcacggctgcatccacgatttccttcatatgggcatccgtggtggtcctgcccggatccaccacaatcatcacctgggaacagccgccgcagctgccgtatcccttctggtccatgccggctgctcctatgccgtccgtgagcactgcccccaggatatccagcatgaaggaaaaggccgatcccttccaataccccacaggcagcacacggcgggaattctcgatggcacccggctcgtccgtcagattgccctcgtcatcaaatccgccgggatacggcagtttctccccggccagccgtgtaacctgcagttttccgtaggaatactgtgacatcgccatatccagctggagaggttcactcccgtccgcagacggcacagccatgacaaagggattgttgcccagacggcattcccttcctccccatggcggcatgcaggactccgtgttggtccacatgattgccgcatatccctttcttgcggcgtacagcccgtaggtgccgccccgcatccagtgggtggtattcctgattcccaccatgccgatgccgtactgatccgccagttccatggcccggtccgcgcagtacagggcattcaggatgccgggacccatgtttccattataaacccggagggcgccgaattcacgttccagggaaggctcagcattaacgtccacccatcctttctgaatgtagttcacaaacctggccacccggttagtgccatgagaatataccccgtcgtaggcagtctccgtgtgaatacgggcgcaggtctccgccttttcctctggcatcccgtatttaaccagcaccctcttaatctcactcttaatttcgtcaaaggctaatctcatcgcatccatcctttcctgctgtatacgcctaacggttctgcttccggattgcctcccacaaaccattcaggtagcatgccccaagcgccctgtcatagaggccgtatccgggcatggacacctctccccagatagcccttccgtggtcagggcgcatgattccgtcaaaaccaatgtcgtacagcgctttcattatctcatacatatccatgctgccgtcttctgagagatgggcagcttcttggaaatctccaggagcattatactgcagattgcgcacatgtgcaaagggaatccttccttttaaggaccggatgatatccgggatgtcattttccggattgcttcccagagatccggtacacagggtgacaccgttaaagtttgcgtccacggctttcatcagtttgagaagcttctccttgccggttatgattctggctaatccgaatacgggccatgccgggtcatcgggatgtatggccatcttaatgtcatacttctcacataccggctggattgccttgagaaaatacaccagattgttaaagagacggtcctcatccacgtccttatacatgtcaaacagctctttaatgcgcgccatgcgctcaggctcccatccgggaagctcaaatccgttggacttttctcccatggtctggaacatattctcaggattaatcttatcgatctccttctggctgtaagccagtaccgtggagccgtccggtcgctccttagccagatcggaacgggtccagtcaaagaccggcatgaaattatagcacaccacatgaattccggcctggcccagacgctccagggtcgtgatgtagttggcaatgtactgctccctgtcaggagttcccaccttgatcgcgtcgtgtatattgacactctcaattcccaggacctttaatcccctggattccacctgttccttcatctgaagaatgcgctccatgggccagacctctccggccggaatgtcatacagggtggtaatcacgcctttcacacccggtatctgcctgatttgctccagagatacagaatccacgccctcaccgaaccaacgcaatgtcatatccataactaactaatttcctccttgaaatatatgtgcagtacttttgtgtttttccggctttccggaaataaatattttaatatactaatatattactatttgtgagacaaactgtcaataccgcaaaacataaaaagaacccggcccagtcacatatcccctgagccaggctcctccaatcactgcttcagactatcatcaggccttcgctgccagaatttcgttaatctgggaaaccagtgtgtcgcagtcaatgccgtgtaccatacaagcctcttccagagactcaccctgggaagccgggcagccaaggcagtgcattccggcacgcatcagaatcggcggtatgctctcatcgacctggataagctggccaatcagcatgtctttactaatctgcatctctttgtcctccttatatttctgctataagtataaccaattaatcggtttaccacgcttctaccatcataatacgtttttcgacatttgacaagtcctacataagcttacatatttttcatattaaccataattatcaaggcttgttaaaaaatattatcactatgccctcttgacgtgtatacaatgtgcataatataataaatgttgcaaaagcaacagcatatatcggacttttctagtagactatggatatccggtaaatccggtatggctgtgaaacatttggttaacaatagtttttatatatagattcacgcatttcacaggaggaaaagtctatgagaacagagtggaacacatttaaaggcggtgtatggcagcgggaaatcaatgtacgcgactttatacagaaaaactacaccccctatgacggcagcgacgagtttctggaaggtcctacccagaatacaacggagctctgggaccaggttatggagctgtcaaagcaggaacaggaagccggcggagttctggatatggataccaaaatcatttccaccatcacgtcccacggcccaggatatttaaacaaggacagggagaccattgtaggctttcagactgacaaaccctttaagcgttctcttcagccatatggaggcatccgcatggctatgaaggcctgccaggacaatggatatgaggttgaccctgaaattgtggaattctttaccaagcacaggaaaactcataacgcaggcgtatttgacgcgtacaccccggaaatgagggcttgccgttccagtcatatcatcaccggactgccggatgcctatggacgcggacgcataatcggggactaccgcagggttgccctttacggtgtggacgccctgattcaggagaaaaaggaagaaaaggattccacacgcaccatcatgtactctgatgttatcagagagcgtgaggaactgtctgagcagatccgggcattggaagatttgaaggagctcggacgtatctatggttttgatatctcaaagcctgcttctgacgtcaaggaagccatccagtggacctacctgggttacctggccgctgtcaaggagcagaacggcgcagccatgtcgctgggacgcacctccaccttcttggatatttactctgagcgtgacttaaaggaaggacgctacacggagaaagagattcaggaattcgtggaccacttcattatgaagctgcgtcttgtaaaatttgccagaacaccggaatacaatgagctgttctcaggcgaccccacatgggttacggaatccatcggaggaatcggcattgacggccgccacatggtgaccaagatgtccttccgttatctgcacacccttcagaacctgggcactgcccctgagccaaacctgaccgtactgtggtccacaaagctccctgagaattttaaaaggttctgtgccaagacctccattgagtcctcctccatccaatatgagaatgatgatttgatgagagtgacccacggcgatgattatgccattgcctgctgcgtatccagtatgcgtatcggcaaggaaatgcagttcttcggcgccagagccaatctggccaaatgcctgctctacgccatcaacggcggtgtcgatgaaatcagcggcaagcaggtgggaccgaaataccgtcccgtgaccacagagtatctggattttgacgacgtgatggacaagtacaaggatatgatgaaatggctggccaaggtatatgtcaatgccctgaacatcattcattacaatcacgacagatactgctacgaaagacttcagatggcgctccatgataagaaggtgacccgctggttcgcaaccggcatcgcgggcctttccgttgtggcagactccctgtccgccatcaaatatgccaaggtcaaggtggtgcgcaatgataagggtattgtgaccgattatatcgtggaaggtgatttccctaaatatggaaataatgacgaccgggttgacgagctggcagcagacctggtgcatacctttatgagctatataaagggcaaccacacctaccgcggcggcattcccaccacttccatcctcaccatcacctccaacgtggtgtatggaaataatacgggcgctacaccggacggcagaaaggcaggccagccatttgcgccaggcgcaaacccaatgcaccacagagacagccacggcgcggtggcatccctggcatctgttgccaagcttccgttcagggacgcccaggacggtatctccaataccttttccatcataccgggcgcgctgggcaaagatgaccagattttcatgggagacctggaagtggagctgaacggctgcggaggcggctgtgaggcacctaccctttttgaagggctggattccgaagccgacatcgaggaatcctgataagcagcatgtaaaccatcttcttgagaaagcgaggattaatattatggtaaaagcaagtgaatcacagattgataacctggtagctctgttagacggctatgcccaggaaggaggacaccatctgaatgtaaatgtattcagcaaggagacccttttggacgcacaggcccaccctgaaaaatatccccagctcacagtcagggtatccggctatgcagtgaactttaataagctgacgaaggcacagcaggatgaggtcatttcaagaaccttccacggctccatctaaatcctgtctgtaaactggtttggatgccgcctggacaggaagatattccgcatcggcggcatccatgtttctcagaaaggagcacagccttatgattggacgcgtacattccatagaaagcttcggcaccgtggacggccccggtatccgcatggtaatctttttaagcggctgccccatgagatgtctctattgccataatccggatacatgggaccccaagggcggcacccccatgacagcggaggacatactgaaccagtatgagcaggcccgtcccttttacaaaaaagggggcatcacggtcagcggcggcgagccgctgatgcagataggttttgtgacagagctctttgaaaaagcaaaaaaaagaggtatacacacctgcctggatacctccggcattacctttaacccgggttcacaggcagttatggcccattttgaccggcttttggcctccacagacctgatactcctggatatcaagcatattgaccctgaggagcatgtgaagctctgctcccagccccaggataatatactggctttcgccggatacctggagaaaaagcggatacctgtatggatccgccacgtggtggttccgggcataacggaccgggaggaatatctgtaccgccttggacgctatctcggcacgcttaagaacgtaaaggcattggatgtgcttccttatcacgatatggggaaggctaagtaccatcagcttggaatcccctacccgttagaggacaccgcccccttgcctcccgcaaaggcggcagaggcccgaaaaattattcttcagggaatgcgcgacgaaaggacccattgctcctaaatttatacaatattcgctggtttaggaacgattttcctcttgaataattagacgttatagtataaaataaaataacaatgtagacaaatcttaaggaggtattttatcatggcatatgtaatcagtgatgcttgtgtaagctgcggcagctgtgcagctgaatgtccagtaagtgcaatttccgagggagacagccagtacgttattgatgctgatacctgcatcgactgcggaacctgtgcagctacctgcccaaccggagctatctccgaaggctaattaagtattacataagggtctcttccagacggaaggggctctttttcatatattcagcatatattactcacagagcacatggaggaatccaaataccatgaaaaaaccagtaatcggcataacaccatcccacaatacggataacgacgatataagtgcgcgccccacctacctgagggccattgaggcggcgggcggcctgtccatccttcttcccctggaggtatccggagaagacttaaaacagctgtccaagctgtgcgacggctttctcttctccggcggcccggacattcatccattccttctgaaggaggaaacacatacccagtgcggcaatgtatccatggcgcgggataccatggagctatccctcctgaagcttgccgtggacgcccgaaagccggtgttgggaatctgccgcggagcccagatcattaatgtggggctgggaggcgacatctatcaggatattcccagccagacggaaaccgtctttcccatcgcccacaagcagccctattcatgctgcctgccttcccaccatgtggatgtgcgcagggatacgctgctgtacacaattgcggaggggaaaacggaaatcgcagtaaacagttcccatcatcaggcggtgcgcaggattgctccctgcctcatggccagcggccatgcgcccgacggcatcatcgaggccctggagatgccggattatccctatcttctggcactgcagtggcatccggagtatatgtggcagacagacactgtgtccgccaatatatttaaaagctttgtggatgcctgtcagggatagcgggaagggcggcccgcaggaagattggataacgggaagatcggacaacaggaaggccctgcatgattcaggctgtggaatgcgagtgtgtgaagaaatctctgtaaaagcagatcttctatgataatggcagggctgaaaacttctctatgagcgttcagcccttggtttatatataccgcacaatactgcatatgtcaagaacaggcggattcccgcctggcctgaacggttctagatgttacagttcacagatcaatgtcatttagttaacgctttgcaatattatggttagattcttaatgaagggtgtctaaccatatttttcccttttttcataaaaacagttgacatacaccacaaaatgtgcggccgctctcgctactgattgactttaataggtagcgagagcggcccttggattagaatcataaattcattctaattcaaggaggtacacacaatgttccatcaaaaaattaaacaatgcttttcccattccgtccatcttgtttcatccgtaatctccgaatttacctattcggacaccgatctgacaaggaacaggaagttccccgccgataagcttatcactttccttgtttcccaaggctcctccagcacaaaaaatgaattgctggacttcttcgacatggatccacagtcgccaactgcttcggcactcaaccagcaacgcgcaaagcttagcccggatgccctggaagctgtatttcggcattttaaccattttgcttctttttatgaccaaaaaaagctacgctaccgctttcttgctgcagatggctccacctttacctttttcagtaaacctgctttcgccccagaagagtatcatgtctctgaaggacattcaataaagggcttttacagtatgcatctgaatgctttttacgacttacagaagcacacttattccgatgcgctgatccagccgatccatcagaaagatgaatttagtgctttctgtgaaatggtcgaccgccacgatttactgactggtacaaaagatgtttttatcggtgacaggggctattgttcttacaacaacatggcacatgtgaaggaaaaaggccagtattttttatttcgcaccaaagatatccattccaaaggacttgttggaaattttgagtttccagatgcagactcctttgatattcaggtaaatgtaactctggttcgcagtcataaaaagaagatatcgattaaagaaggttattacaaacgctttgtggatgcggctgcatcgtttgattacgttgcatatggttccttggatacctacgatttatcttttagaatcgtacggtttccgatatcggatgattcttatgaatgcatcgtcactaatctgccttcagatgaattcccgtcggaacaaataaaacttctatactatgccagatgggccattgaggggtctttccgtaagctgaaatatacggtcggattgagtaacttccatgcctacaaaccagaatatatcaaacaggaaatttgggcaaagttaatcgcttacaacataacagaaacactaatcaatcatgcaattatagaaaagggaaacacgaaatatgaatacaaagtaaatttcagtatggctgctcatatttgtagagtctttctccgtccgaacacagagaaagactccatagatgtgatgtccctgctgacaaaagagctgattccgatacggaatgatcgacagtatccacgactccaaacggcacacttccgaaaacctcgatattttatatatcgagcagcataagtaacagtttcatcaatatctataatacccttttttgaagcagatgtaaatctgcttgtttgccttgcggtaaaatatttacaaaactacttctgataaataatccctatatccttctcttcaatctatccgtttggaacgtcagatctctattttaaagaaacattctttcttttacaaaaagttaactaaatgacattgacctgtgaactataactaaaatggcttccattgtacgttccaggttctcactgctcttgtccctgctaactgcaaagtcaacggccagactgttaattgaaaaaattccatatacccctgtacaataagcagcgtccgcgctgtcatccacagaaccggcaaccaccactaccggggctccagccctccgggccctggcggttattccagagagtaccttcccgtcgaagctctgcgaatcgatccttccctctccggtaaaaatcagctgcgtatcacaaagctcctcatcaaaattcgccacatccagaacagtctctattcctgatttcagttctcctcccaggaaagcaatgatccctgctcccattgcgcctgtagcacctgctcccggaatctgtgaggcatccatgcccaggtccttttttatcacctcagaaagagcgcgcagattctgatccagcaattccaccgtcggcgaccggaaagcatttcacctagcattccggaaaaaccttccgtatcgttttttccatcacctggcagacctggatggaagagagcgttccctcaaacgaatctggcgccacaatacattttttcaacttcgccatacattcctcctcatgcttcaacctaaatgcctgcgtacaagctcaacagcctctttctcattatgctttgctatcgcttcaactataagagtatgatactttatcgcactttcatatccacgcacttcgataaaatcaaccatggacgatcttaatatctcctgcaggatcgcattagtcttaatcagcagcgggtttttcgatatttcgccgattttaaaatgaaattccgaatccttgcgggcaaatcccttcaaatcgcctgcttcatattcttgtatcatgtcgctgttgatctggcgcagcacgccgacctcttcctccgtagctctgcgcgctgccagtccggcactttctgaatcaataattcgcctgaattccatgatttgatccagtgaactggataaatatgctgtaggaagcagttcctgcatggtactgcccgcatcaatctcctttacaaatgtccctgaacccaaccgggtctctacaagccccatcgtattcagcttctgcagcgcctggcggacagtgacacggctgacaccaaacctattggcaagctcgctctctgacggaagcttatctgcaggcttccattcaccgtccagtatcagctgcttcattcgctcaaagacctgttctcctacatttaccttttgaatcttctctattgtcatgcttactttagattcctttccaaataaatctattataagcttacactatctgctgattggatgtcaaataaaacccgccaaatatttctgtcacattattactattcacagaccatattttgaatcagaatcggctgtaaacagtaacctcaaatcagcaaattgggaagaagcatactgataactggtataaatgtgataacaagaacatctattaccataacaattataaaccgtataatccccgagcagacgtcctctaacgatgtatttcccacgcgggctgcaacgaagaggtttactcccagcggcggagtgatgaagccgaccgcaagcgttaccaccataatgattccgaaatgaaccgggtctaccccgaaggactttgcaatcggcaggaaaatcggtgccaggatcatcatggcaggcgttgtgtccataaaacagcctacgatcagaagaatgatgatgataaacagaataactaccgttttactgtccgtcattcccataatagcctgtgtaagcatattgggaatcttttcgatcgtcagtattttggcaaaagcagttgcacagcccacaataatcaggatcgtacccgtagtaagacacgcattcgcaataatttcaaacagctgtttaaaattcagctccctgtaaataaacattccgcacagcaacgcataaatacatgctacggctgcagcctctgtcggtgtgaaaatgccttcataaataccgcccagaataataatcggattaatcagtgcccattttgcctcccagagcgcatttagctttttctttgcagaatacttcctttcatcacctttccagccgttcttcttgcagacgaaatagcagagaacaatcagcgtaatgccgatccagatacccggaagaaatccggccataaacaaggagctgatggatgtgcccgtggacacaccgtaaattaccatcggtatgctaggtggaataataacgcctatacttccggcacaggccacaagcgccagggcaaatttcttatcatagccctttctcagcatttccggaaccaccatagttccaattgccgccactgttgcaggaccggagccggacacagcggcaaaaaacatacatagcacaaccgtcacaatcgcaatgccgcctgtcactctgccgataaatacattgcagacattcagcaggcgcttggatacgcccccggctcccatcagttcccccgcaagaataaacagcggaatcgccatcagaggaaaggagtccgtacccgaaatgatctgctctacgatgtactgtgagctgagtctgccgtctgcaagaaccgcaacgacagcggaaagcccgattccgaatcctaccggaatgttcaatattaatacaacaaccagcgccaaaaacgcggaaaacgccacaaccatttacttctccccctttccatttttatccgtttgattcagcgcggatacctgcgccagaattacctggatttcacgaattataattaatccaaatccaaccaccggcgccatgtacacgacccacataggcaatcctatggccggcgataccttatgatacacaatctgaaagcgtaccagagaaatcccgctgcaaaaaagatagcccgccagaatcagaaccagcagatctcccactataattacataggaacgcgcttttttcggaaaaagcttcagcgccgcctcaattttgatctgagcccgctttttgcagccatagctcgccgcaataaaaatcagccagataaagcagtatcttgcaagctcctcagaccacacaagagaatttttaaatacgtagcgcatgatcacctgaatgaagatcacgaccgtactgacggacatcagaaggacgcttatatatttttcaaagttttcatcaagccatttcagtacttttctcattccttctccctcctgtatcgctccagttcctccatcatctggtcaaaatactccggatgctccatttctgtctttaccgaatcgtagactcctgcattcagaattttctgctgaaactccagtttctggtaatcggtcagagcaagcacctcacagcccgcttcctccataatgccgatggcctctgtctcatatttctgagaggccgccagcattttctcggtagcctcctccatggcacgctgcacaatttcctgctgctctttagtcagcgcattccactttttcaggttcataaccacacagtagggcgtataaatatgatcggtcagagagatatatttctgcacctcatgtagcttattgctgacaatctggccaatggaattctcctgcccgtcgattgtcccctgctgcaaagcggtaaaaacctccgtaaatgccatcggtgtgggatttgcccccaatgccttccaggcctttatatgcaacttattttccatcgtacgcagcttcatgcccttcagctggtcgggacttgtgaccgccacaatgctgtttccaagaacgcggaatccattttcccaccaggaaagccccttcaggccgagcttgtccagccccgccagaatactccgtccggtttccccgtcgaagcctacgtcatagacctcatccgtattcaggaaaagatacgccgcatcaaagagataaaagtcctgatacatatttgcgatcgggcttgtggaggaaaccgctatatcaatgtctccgacctgggctcctgatataacaaccttgtcatctccaagaagattgtttccgaaaatatcgatggtaatcgtcccgtctgaatacgcttcgcaaagctctttaaaggtttgtgtccctgtctccactgcatcacctgcaggtaccgcaataatcaggtttaccttttctttgttggtaaatttactggaatctgtggcaaaagtcagcctgacgcctactgccagtgaaatcagaatcaggcaaactgcaatgattgtttttttctgtttcatttcataccctctcttacgcttaccccatgttacgttacattgcaaatttcctcaatagctccagcgcccttccggcatcctgtttaaagtcaccggaatacgcctcgcaactgatccggttatcgtagcccgcacgtcttaatgcatcgaaaaaattcccgtattccgactcatgctccgttttaggataaactcttccgtcaggatttgcgaagtgaacgtgtctcagatattcctttccttccttcacaatatgctctgtcggttcctgttccacggaaagatgataatagtctaccagaacctttatattttcttcgcctacttttcttgtaagctcacagccctctttgaaagaattgatcaggttacactctgcctttctcagaggttcaattacaatcgtaattccgtatctgcctgcaacaggagccacccgcttcagcagcccggcaacttgctcatagccctgctccattggaaatccctccggtacatttttagcgggtccgcttccgaataccacatattcgacgccgagactctgtgcacgtctcaaagccctgtccacatacgccataatttccgtataatctactgacgcccctgtaaggcgcatcgtttttgggaaaaagttgttgcatacttcacatttaatccccgtccggtcaatccgtcttttcagggagagaaattcttcttcagacagagctgccatttcagccaatggcagctccacgtaatcatacccaatctccgataatgtctcgatgaaatcgatgcccgtacctttatccgcttctgaagaaaccatattcaagcaacatccaaatctcataggctccctcctagatttcccagggctggccgcctgccaggcagccgccgtcaacgatgcagagctgtccagacatataagcagatgcatccgaagcaatcaggactgccatgcccagcatatcgctcggatatcccggacgtgccatggcaatacgatccagcatatatttgctgtagtacggatcatcccagagctggcttgtcagcctggtgctgatatgtcccggcgtcaatgcgttagagcggaagccgtattttgcccactcaatggcctggcttcttgtcattgcagccacaccgctcttgctcattccgtatacggaatttcctcccagcatcattacggaattgtaggacgcaacgttcatgatagaaagacgtacctttttatcctccggaagcgtttcatttaaattgatcatttcctttgcgaccttaatcgatatgagatatgctcccttcagattcactccgataatccggtcgaaggtttcctctgagccatctgtcatcagggtccgtttattgataccggcaatgttggccagtacgtcaatccgtccgtatttttcaagcgtcgcgctgacaacagaatcgatggattcctcatccggaaggttcagcttcagcgtaaggcactccccgccagcctcacgaatctctccctttacagcttccatagctgtttcgttgaaatcagcgataaccaccttagcgccaagattggcatagcattttgctatttcactgccgatttcgccggcagcgccggtcatcaggattactttgttttccagtgaaaacattttatttaacgtatcattaactgtttccctcgtcatgattatgcatcctttctgttaagcgctgtaccgttgattctctcatagtatttcaaaataccgctgtgatcgttgctgccgcagtcattgttgtgcagccactgcaacatctcctgaaccgcgcttgtcagaatcattgcggaaccaagactgtgtccggtttccagtgcattgttcagatctttaatatgcaggtctacccggaagcccggcttgaaattacggtccagcatcatcggaaccttagcgtccatcacggtggagcctgccagtccaccccggatcgcctggaataccttctctggatcaacgcctgccatctgcgccagctcaaaagcctccgcacatgcggcaatattcactgctacaatcacctggttggccagcttcgttgtatttcctgcgccgtttacgtctccgcagtgtacgacagatgcccccataacgcccagcatctcttcatatttatcaaacaaatccttcggaccgccgcacatgatagaaagcgtcccgtcgatagccttcggctctccaccggatacgggggcgtccatcatgcggattccctttttcgcgcattcttccgcaattgccttcgatgccagcggtgcaatggaactcatatcaataatatccagcccttccttagcgccttcagcaattcccgcagtgccaaatacggcttcctttacatttggagagttgggaaccatcgtaataactacgtcgctcttggatgccacatctgcgttgctctctcctctggctgcaccagcctctactacctcatccagatttgcttttgcaaatggatcatacgcaattacctcataacctgccttaagaagattctttgccatcggctttcccatgatacctaatccaacaaatcctaccttcatttttcattctcctatatttttcttattttatttactgatctttctgactgcgtccgcgatatgctctgttgtaagtccaagataattgagaatatcgttataattatgggcggaagctccaaatctgtcttctacaccaaccatctcaatgggcttgcaggccttgcagagtgcctctgcaactgctcctcccaggccgccgattacactgtgctcttctgctgtgacaacgccctttacatccttcgcgtattcattaatcttttctttattcagcggtttaattgtgctcacattcacaacacggacggaaacctcatccttcagggcttctgccgcctcaagggcctttcctaccataactccgcaggcgaataccgttacgccctttccatctcttaaaacgaccggctcgccaaactgaaacggctgtgcttcctcagtgatatttccataatcatttctgtttagccgcatgtacatcggcccctgatgctccgccatatatctggttgccgcaacggtctcattcgcgtcagccggaacgataacggtcatattcggaatgactctcatataagcaatatcgtcgatggactgatgtgtggctccgtcgccaaagtctgagcagccggcagaagacccgcagatcttcacgttcatattcccgattgcaatggactgtctgatctggtcataggcgcgtccggctgtaaataccgcaaaggaattgataaaggggatttttccgactctggaaagtccgcctgccacagaagccatattagcctccgcaattcccatttcaatgtgtctctcaggcatagcctgctctaccattttccccatagtcgaaccgcccagatccgcatcaagcaccacgatatccggattttctctgcaaagctctacaagggtttcaccatatgctgttctttgatttgttcctgccatttttctccctccgatctattttgattaacaattacctaatctattttgaaagttcttctaatgcctgctcgtataactcttttgtcagcgccttattgtggtagcctgtctggttttccgcgaagctgatgccttttccttttactgtatgggcgatgatcaccgtaggcctgcctttacattcttccgctgcatccagcgccgtcagtatttcttccatattgtggccgttaatttgcagtacattccaaccaaaggctctccatttttccgcaatatcaaatgtatttaagcgatcctcgatggttccctgggcctgaagtccattgttatccacaatcgcacaaaggttatccgcgcctttagcgctggctgccatggctgcctcccaaatctggccctcattctgctcaccatctcctacgagaacataaacccggtttggcttctgatccagcttcaggccgatcgccatccccagtccgaggctgagtccctgtccaagcgaacctgttcccgcctcaacacccggcgttccaagatgcggatgtccctgcaggtaaaatccaatgtccttgcagtggagcagatcctctacagggaaaaatccggcctcagcaagcgcagaatactgaagaatcgccacatgcccctttgataaaagaaaatagtctcttccatcccactcaggatttttgcagtcgtacttcattttatagaaatacagagcagccataatatctgcactggagcagctacctcccacatggcctgcaacaccaacgccgatgcatttgatgcaatcttttcttaataactgaccttttgcttccagagaagcgattaactctttgctgtaactcatgctttcctccttctttcctgtctgtgcatttttttggtttcgtttcttttttgttgtctgccgtttgctgtctgttgtttgccgttagttgtcctacagctttgattgcattatagtctgcagttggaaatttgtcaatatagaaatggcaaggtttccacctcaataagatatttcgtaaaaacctccaatttacgtcaatcggttttgtgtatttctcctataaatgcttttgtataaaaatagttgcgtccgctactatttttcactaaactatcttacggaaagcaggtgcagtataatatgaacgataattttcccaatttaggacgctgtatctcccttctggatcgtctgatgcggatgtactatgatcgcggcctggcagattttgagatcggctgggggcagcaattttatgcagaatatatctatgatcatccgggtgcaaccgcgcaggaaatggtggaatacattcgggtcgataaggccaccctgactaaaatcataaaaaaactgtcagaaatcggctatatcgaaatcgtcagtgaccaaacggataagcgggtgaagcatctctatcttacgcccagggccattccggcagtaaaacgcatcaaggaaatccaccaggacttccagagcaccttatgctccggtatttccccgcaggatatgcagctgacggagcagaccatggagtacatgatggaaaacatcaataaaaaggtatggcacagaatggaggaataaaattggaaaacggcgaaaacacacggactaaaaatccgccggaggcggaatccatcaacaaactgattctaaaatattcgcttccggcgatcacgagcagcctggtcagctctgtctataatatcgtagaccagattttcgtcggcaataaaataggagaattaggaaatgctgcgacgaatgtggcctttcccctggtcatggtcgtcacgacactggctatgaccttcggcgccggcagctcggccgccttcagtctgtatctcggccagaaaaaaggggataaagcaaaatccatcgtcggaaacggaatgacactgatgctctcctgcagcattctggcgctgttgctcgtcagtcgtgagatggggcgatggtaaatccctccattttgatcatttggtcggactggattcgtttacagactcatttaaaaaggtacaatatatggcccataaaaccatatactgtaccttttttatcacccttttcagttcagccccgctgttctaagccactttctgatcattggccctgcaatgagggcaatgataatctttgccaggtctcccgggataaatgggatgatgccggctccaagcgcggcataaaagcccatatttgcctgataagcaagccatactgttccgaacagatagcagaccgccgttcccagcaccatgccgataaaatgcatgtacagctttccgctccactgctcgataaaatatccgcagataaccaccatgaaaatgaaaccaatatatgtaaccgccgataggtccgaacagctttgccgtgtcttcggagaatccggaaaatacgggcagtcccaccagacccagcagcatataaatcagatagctgaccgttccaagcttcattcccagcacatataccgtaaaatagacggccaggttggtaagggaaatcggtaccggactaaccggaatactcagagaaagcggacctaaaatgcaggtcactgccgccatcattgcaatcaataccattgttcacgttttactcgccgcgctaatacccatttccttttatgcctcctgtacctttgcttctttcagatgataccccatgtttgccatcatctcccgatcctgctttgtgttatttaccacggttgtcagcatatcccctgtcagggtggcgtttgcgcctgcccgaaacagaatttccccgctgttctcaaaataacttcttcctgccaccattcgaatatccgccgtcggatttatgtaccggaaaatcgccacaatccgcacgatctcatccggcttcagcttttcgcggtgctcaagcggtgtgctcggaatcggaatcaggaaattcagcgggatagaatccaccttcagctctgccagcagcagcgccatgtccaggcggtcctgccacgtctcgcccataccgagaattcctccgctacagacctccagcctcgcttccttgaccaggcggatctccgtcttcttatcctcacaggtgtgcgtggtacaaatttccggaaagaaccgctccgaggtttccacattggtatgatacatgcgaacccgcctcatgcattctttttaaatcccccagcttcaccagaccgtgtgaggcacacaaaatcatatccgggtaagcgtcgtgcatggcctgatagctggcaatttctttttccagatcccggccctccagggtgcgccccgccgtcacaatcgaatagcggtttacgccctgtctggtagcgtgcccgcagccctccacgaaacgctccgtatccaaaaaaccatattcctcacagttggtgtgattatgtgcggactgtacacagaacttgcagttttcactacaacgtccgcctctgccattaataatgctgcacagatccatccgatctccgcaaagctccctgcggatcatatctgccccatggccagctcctccagatcagcctctaacaggaccgtcagatcatcctcctgtgtcagccgtctgccattcatgatttcctttgccaacgaaatcatatctctcctcctattccggctctttcctgccattttaccacggccaggaaaagcatcttctgaaactatttcgtacgcttcccgattcagagaagcacatgtcaaccaatcaacgaataagagtttacaatatagtctttgaattgtcagcctttttatatttttacacgactttacaacttttataaatgccagcactgttgccgaattaactgttttaaagctttcataacaacactggattttatgctggtttcgatatttctcacgaaagtggcataaaaactctcattcctttcgcttcgctttggcacaaaacagttatgaaatagcaagtttgtgcttccgctattttatttttgatgttaaactctcctcagacagatacactacagagcacggaggaggaagtagaatcggttcctccatttgggatcaagtccgcataaaaacatgtgtcggctgtcttctcaagcacaaaccagtgacgccttgagctcgtaacctaatcattgtcaaagcaattccttaggtctttctttgctggacagccagtcaatgtctgtctattttacttaggagggctgttttatgttatctatcaaacactttgtctgctgtggcatggacgttcacaagaaatttgttgtcgctaccattgctctgacagactacaggggcgttacttcttatgttaaaaagcggttcgccaccttcaattccgatcttaattctttgaaaaaatggcttctttctttcaattgcactgagatctgcctcgaatccactggtaaatactggattccaatttttaatatcctggaggattcctgtcacgttgtcgttgctaaccccaagtatgtcagggctatcaaaggacagaaaaccgatgacaaagactccgcctggattgcggatctgtttaaatttgatattgttccttccagttatatcccctgtaaggaaattcgcatgcttcgggaattgttccgataccggcagaaactgattggccaccgcagcagtgagaaaaaccggttacagaatgctcttacggtttccaacattgcccttgcatccgtcctctcagatacctttggaaaatcagcgaccgccatcgttgactatatcctgacctgtgaggtatttgaccccgaatactgtaaatccctgcttcttaaaaaagcaaaggacaaggcagatgatgttgtaacctccataatcggttatgaactgcgccgtgaccaatccgttaagattaaggtctgcagaaagcatttcgatgaaatcaatgagtgcgtctccactctcgaagaaacgatttccgacctggctaaaccttaccataaatttatcgaattggctactacaattcctggaattacagagcagtctgccacctttatcattgctgaaatcggggtggatatggcggtattcaaatcctcaaaacgtttgtgctcctgggctgggctggctcctgaaaataacgaaagtgccggtaaaaagaagagcgtccatgtttcaagagccggggtgtacttaaagcctctgctggttcagtgtgcaaatgctgccatcaagagtaaaaacccttacttcagatacaaatatgaccgtataaaaaaacgtcgtggtcataaacgggcaatcattgccattgcacgcatggtgttgacttgcatttaccacatgttccaaaagcaggaggtatttaatcctgccgatacggattattccgctattcctgaagaaatgtaccggaaatttcaggaacagtatgacagaaatgccatcaaacgtttagagaaacgaggctatatgattactcctcctgctatggcctgataccctttattccataggatcctttggggcggcagtttactggtgctcttgttaagttacgattttttttgattttttctttcaacctatacctgctgccggatttgctcactaagggcaaaccgaaattcctgcacactttctgtacggtactttgaaaatgattcttcctgatatggcagtatcttcatggcacaatacgagatgttgatcagattaaccaacatttcgattcccttccgactgcgtaacatatagctgcataacgaccagaacgttttctgttcataataactcacctcgatattccagcgaaatgtgtaacacaataatgggatgaactgcatacgctcactcccggtctggtttagcggcgccttttcctgccatgcgcagaatatctgcatctgctctggaataatcgtactgaaaaacaggcgtctggagccgccggttttctctgtagaagttacataggcgggaacctccctttgcccgaagatattggtaaggacccggcgtacacccatgtagtaatcccctatcttttcagcagaaagagtgaagtcctctttaatagaaaggcgttccccatgctttgcgggcctgcctcttctgccggttggctgtggggcaaggtcataaataacagagtcagccctggcattacagatcaaatccagatttggatattcatcaacaatacaggcgagatttttcttggcgtaccaactgtcacaaaggattatgacattcttctgagaagcaaaagagggcatgacctgaggcaccatggctgcggcaagctccagtttcgattcttttttctgccacatgcggtaaccgagagggacagccagataagcaatccggcggttgctccatatggggacacaaagcatgagactgacaaagcaatggccgttcagatagttggagccattgtatgctgcatggtcaaaaagttttgaaacatcttcaaatttccttccaaatttagaaatcatggtatcatcaatgcagaagaagaccggctgtgacttcagggagtcaggaatgagttttaaagccagggatgccgttacattcatgaatctggaatagtctgctttggagtaggaacaggcataataaaaagcagtcagtgacctttgggtgatgccagacaaaaaatgtcggtagagggaacggatggaatccgccgactccatggcaagtatggataaagccagtaggaataaagtctccgcggcagggaagaaaacgttttaaaatagatggaaaaatattgatgaagtctaccaatcaggttcttttcgttgtataatgagtttatcgtacagggtcactttcctttgtatattttgttggcaaactaattatacaccaaagtgtcctgtacgatatttttttcttaaaaagttgtaaagtcgtaaccccttataaaagtaaggtttatgcttgtcagaacagattatgtcatgtagaataatactgctgagagaaaaggagtttttgataatatgagcattttaaacgtagaacatttaagccacggttttggggaccgggctatttttcaggatgtctccttccgcctgttaaagggggagcacattggcctgatcggggcgaacggagaaggaaaatccacctttatgaacatcattaccggcaagctcatgcctgacgaaggcaaggtggagtgggcaaaaaacgtgagagccggttatctggaccagcatgcggtgctggaaaagggcatgaccattcgtgatgtgttaaagagcgcttttgccttcctctttgagatggaagaacatatgaaccagatttgcgataagatgggtgaggccggcgaggatgagatgaccgccatgatggatgagctgggaaccatacaggatcttctcatggcccatgatttttatatcattgattccaaggtggaggaggtgggacgcgcccttggcctggctgacataggactggacaaggacgtgacagagctctccgggggacagcgcaccaaggtgcttttaggcaagcttcttctggaaaagccggacattctgctgttggacgagcctaccaactatctggatgtacagcacatagactggctgaaacgctacttgcaggagtatgaaaatgccttcatcctcatttcccatgacatacccttcctcaacagtgtcatcaacctgatttatcatatggaaaaccagaggcttgaccgctatgtgggggattataacaaattccaggaagtatacgctgtaaagaagtcccagctggaggccgcctataagcgacagcagcaggaaatagcggagctggaggatttcgtggccaggaacaaggccagggtcgccaccaggaacatggccatgtcccgccagaaaaagctggataagatggacgtcattgaacttgccagggaaaaacccaggccggagttccattttctggaagcccgtactcccggtaaatatatctttgagacaaaggatttaattatcggttatgacgagccgctgtcgcgtcctctcaatctggtcatggagaggggccagaaaatcgtgctggtaggcgccaacggtatcggcaagaccacgctgttaaagagcatactgggccttacgcctgccctaagcggcaccgtggagctgggcgactacctgtccaccggttactttgagcaggagatggctcccggcaatactaccacctgccttcaggaaatatggaacgaatttcccgcctatacacagtaccaggtccgctccgccctggcaaaatgcggcctgaccacggagcacatcgaaagccaggtcagggtgctcagcggaggcgaacaggccaaggtcaggctctgtaagctgattaaccgcgaatccaatgtgctcctgttagacgagcccaccaaccacctggatgtggatgcaaaggatgaactgaaacgggcccttaaggaatataagggcagcatcctgctaatctgccatgaacctgaattttttgagggattggcaaccgatgtgtgggattgtagggaatgggcgctgaggctgtcctagagtgtgtctgaggtaaaaacaaaaagcaggccatgaaaagacaagtgtggaccagataatccatccttacttcactcaaaaagagactgctgccgatttccaggtctctgaaaccggaaggaccggccctgagcctggcaatattgattttcaatatgcaggttaagattttgcatgatatttttaggcatattataaatgattccaaaagactggttttagcatgtttcacactgcttttaccagtctttcttttaaagtttaactccgccgcagaagaacattcctggtattttctcctgccttggctgtataacatgattttacatagcacatcctcgcattcatgccccatttccttccattcgcggacaaattccacacttctccccgatcaatgctataatggaaccatcagtactgagtacagcggcataccgggaaaccgcatcattctcactgaaaggagctgcacccatgaagcttaactggaaaaccatattaaaaaggacaggtatcatactgctgtccacactgctctttgccctgtgctccggccttctctacatcacaaagatggccggctccatccacattacacggccggaggacgaaccggaactggcctctgccatgaccaatgaaaacctggacacagaaacccgggaaaaactgggcggatactggaccattgctgtctttggcgtggacagccgcaacgggaagcttggaaaagataataatgccgacgtacagatgctgtgctccatcaacagagacacaggtgaaatacgccttgtatcattataccgcgacaccctcctgatgaatgacaccgcaaacaacggatacggaaagctgaaccaatcctactttctccagggcccatccggcaatatctcagccatcaacaccaacctggacatgaaggtggaggactttgtatcctttaactggaacagcgcggctgatgccatcaaccttctgggcggcgtggacatagagctgtccaaggcggaattctattatatcaatgccttcatcacggagactgtggacaccacaggaatcccctccacccatctggacgggcccggcatgcagcatctggacggtgttcaggctgttgcctatatgcgcctgagacagatggacactgattttaagaggaccgaacggcagcggtctgtcactcagcaggtctttgacaaggccagaaaggcagatatcgccaccctgattcaggtattccatacagttgcgcctcaaatcatgaccagcataagtgaggaagagtttatggaaattgcatataatattaaagattatcacatcagcggtacggccggatttccttttgaacagaccaccgcaaacctgggcaagataggcagcgtggtcattcccagcacgctggaatccaatgtggaagaactgcaccgtttcctgtacggcaatgatacctacatctgctccggtcaggttcaggacatcagcagagaaatcataaaacgtgctgtgaaaaattaaggagatatgagtatgatacgaattgctgtctgtgacgatgagcgctgctttacagagcagattgaccatattatcgcaaatcatgccagggacattaccccgcccccggaaacagtcctttacaccagcagcggccagctgctttacgatgtggaggagggcgcccactttgaccttctgctgctggatattgaaatgccggaaaaggacgggatgtgcctggccgcatctctgcgccgccatcttcccatggccctgattattttcatcacctcccacacccagtacgcggtaaaggcatatgaactgtctgttttccgctacattcccaagtctgagatggaaacctgcctgcccctggcccttaaggatgcctgccggattttaaagcaaagctcttcagatacttatatcatcgaatcagccaggcggattcagaaaatagccgtggaggatatcatctatgtctataagcagcagaaatattccgtaatagccgcaaaagccgtggagattcctgtgcgaaaaccactggcccaggtactggaggagctggaccatacaggcagttttctcatggtggaacggggctatatcgtgaacctgtttcatgtggagaaactggagggcgaacagatttacctggacaacggctctgcccttccggtcagccggaaccgccttaaggaaacccgtgaagccataacaaagtattggaggaaaatgctatgaccatgaaccactggtatcagtccatgtaccagatgtttgaattatgttcagacttcattgaagcgtggctctgctatggcttcgtggggctgttcctgccggatcggctccgtggaaaggtgccgttttttatcctgtccctggtcctggtgggctctgtccgggccatggatatactgggcatggaccctatgatatccactctttggtttgtattttatatctgtatgaccacggtggtgctgttccaggtgaatctgttttatgccgtatcccttgtaagcttttatatcctgtgcctctatgtgatcaattatttctgtatgtccgttatgggggtcattgccggcaaccgtcagtttgcgcagttcattctgagccagttgtccctgcttcgctgtatttatctggctgcggataccgcgctcctgcttttattatatatgcttatcagacacgcctttaagggcgggctgctctacagtccgcggatgctgttcgccatttccctactgggcatcctgggtattaccttcctgtcagcggtcacccttcaggatatttccgtgattaccctgttcagctggagcctgtgccttatcatggtgctgtgctttatcttcctcctgctcttttattctaattacatgaaagagcatgagctcagaagcatccttgaactgaaggaccagatggtacgccaggaatatgagatggtcaaacagctgcaaaaggaacaacagtccctttcccatgacatgaagaaccatcttctggtcatggataccatgctgaaggaggaaaaataccaggaagcccggaattatatcggccagctgggcattcccctggagcgcctggctccctccatttggaccggcacttctaccctggatgtgcttttaaatcataccagaaaccgctgcggccagtcccatataacctttaccgtacaggcggacgccgttgatttgcgccccatgaaggaccaggatatatgcagtctctttgccaacctccttgacaatgcctatgaagccgcccgcgccatgccggatgggcagggctggattctctttaagatgagaaaggccagggaaatgctcttcatagacctgtccaacccatcgccggagccaccccgcgtaaaaaacggcgccataatctcccgcaagcaggacggacggcttcacggcctgggtcttaacagggcatctgccaccgcgcgggagtacggcggacagcttacccatggatatgacggcggcgtgttcacagccagcataagttttctgggaggagttaagggaaaggccaaataaaaaatgaccctattcatacataaggtcatttttacattctacagttggattctgaaatcgtctgaaccctcgccgtttaccacataataggctgcattctgctccggtgatatgtacagctcgatggacttgattacggttcccggatgagtcataccgtattccttctctgcctgcgccagcacatcctttgccgctacctgcctgccgccaaactccactaccacgctcttctcaatctccggctttgcaacctctttcacagctgccgcggtctctttcacttcttccttaaccacaggctcagctgccttcttaacatcttctgctttcttaacctctgctgtcctggtcagcgcggcgcctgcctgtgctgccgcagccatagtcctcttaggtcttgccatgttagttcctccctatttcaatccgatttccagtgtcaatggggattatacggcagccccctttttttgtcaatgtcacggatatggaaaataaaccgctaaacaatgacctttatggaaatttttcaggcatacactgacagattgtcatacttctttatggcatttgccacattcctgtgcggaaatcagtttccgggccctgtccgggaaccaggcaaaggctcccgacgacggaaccatggcaaattccatccttttcccgccggacggatgtggaaatgccagcctgcgggcgcacagggccagaggctggcgtccatccccaaatcccgtttttttccttgctctgtccacagtcccggctgtggattttgtggataacccgcctccatatcgtccatccccgtacaagggagttgcgtgtccggcaaattgtacccttatctggtggtgtcttcctgtaagcagctctatatctattaaggataacatctgatcctgttttccggggttgttgataacctccaggacccggtaattaagaaccgcctttttgccgttttcatcagacttatccacaatctttgatgtgttgttttccttgcagtggcgcagataatccacatatgtcccctgtttatccacaggttttccacaaaccaccgccaggtatgatttttccatttttccggcctgcaaagaggcgcttaatgatgctgtggatttctggttcagtccatataccataattccctccaccggcttatccagtctgtggataacccccacatagggcggctgggctgtagatgctccctgtggacggctgtggatatcttgtggattatgtagatagcggcgtatctcacttaccatatccggcgcaaatcccctggatacctgggactccaatcccgccggtttttgcactactataatatctttatcttcatataatattggtatcatacctcgacctcgcttatccgtctgtttcctgtacagatgattctaaagaaacgcttttgtttataccatgattctccctacgcacggttgattatattcagaaattagttttatactcaaagtaattcttaaaaagtattgcatatttctggtcttaggtgtatagtatataatacaaacagatatagtattcaaaactacatttcagggtttcgattaaagtgaactgtattttcaataaaaggaggctggatactatgacagcaaaattaaaacatgggatcaccaaggttaaggatcccggaagcgcattaacccacttcatcgctatgattctggccatcatcgcagccatgccgctgctctcaaaggcaggacatgattccggacatatgcacatcagcgcgctggcggtttttatactgagcatgattggtctttatgcggccagcaccatataccataccctggatatctcccctaagattaataagctgctccgcaagatagaccatatgatgattttcattttgatagcaggcacttatactccggtatgcatgattgtcctgggcgacaaaaccggctggaccatgctgacgctggtgtggggtattgctattgtgggtatcctcatcaacgcactgtggattacatgccccaaatggttctcgtccctgatttacattgccatgggctgggtgtgcatactggctataaccaaaatattaagctccatgcccagagcaggctttatgtggctcctggcaggcggtatcatctatacggccggcggtatcatctacgccatgaagcttccattcttcaactcccgccaccggtattttggttcccatgagattttccatctctttgttatgggcggaagcctctgccactatgtgatgatgtaccgctttgtggcataaggcagcctgccctcaggggacttgtctcccttatcagatgttccttctgcgtcctgctcatatgtttaatggcatattccctgcgcatggcctcctgctttgtctcaaaggcctcataataggacagcaccaccggacgtctgggtctggtatacttagctcctttaccctggttatgggccttcagacgcttgtccaggtcattggtccagccgcagtaatacgttccgtccgcacaggtgaggatataggtgtaattcatggatatcccttccttcccggtaatcaaactcctgacagcaataaaagggcgtccctttaagggaatgccctctctgtttcattttatcagataatgccggctatgtaaacggtaataacgcttgcaacacgtcatcaccgcccaggttgccctgtaatctatgattaaagcaccagctggatgcgcggcacaaccagatagaaggtatttttctgaaccacatctatatcttattatatcgcgcatacccttaaaatgtgcataaaacacatttattattcctctaaaatcttctgcccccgcctccgtggcttcttccgctgctggaccggtgggtggagcttcgccctgagctttgtcctgaacctccggatgagtgattctgcgtgggtcttggtatgggggccgatgtaatgaatctgcgaatcagattgtctcctgaatcgccaaaggcaaatttggcatccgcccggtaggccagatggctgttggccctctcccgttcggtctgctccatggaataccgccgcttcactcccaggcataccgagcccgccaccccggctgataccagaaatgcagacattccttcataccagcgtatgcttctgtagatactgatttcccctgtttccgtgtcgtaattatactgtcccctctgaattccccgatccacataatactccacatccttcaggaattcggctgccgccctcgcataatcaaggtttctcagggaataggccacatcatcctgtatctgttcgatccgccggtctgtgagaatccgtatcatattcccggtggtggacacatagctctcgcctccatagctgccggggctgtccatataaatcagaaacagtacgccgctggctttcctgcctgtgcccaggccgttctggtcgtaaaaatcatctgcatattccctggctgtatggcttccgtcattataagcagtgaccacagccacgtccatcccggtctttttcctgcactgagcaatccgttcctccagggttccggcttcctctgatgattcaccgggttgcgggtgccgaatttgattccctttatctcctgaagattcacataatataccttctgagccccaggtgtcacgcctccaaaacggatacggttaaatgactccttcagagcctcaccaaactgcccgttaaacatggagggcatggaggaatggctgaccttgtaatagccttcctccgccgtataatccactatctttccgccgtccaccagcatcatgaactggttgggatacacatggatgacggaaccgtctgacacgatatcagatgacccctttgtattagatccctttcccctgcgcacctggacgcctcggacaaagacggttctgtcccccatatcatccggctctatggcctccagccactggtcggccagggctcctcccactgctgtggtaactgctttaatgattcccatgattaatcccctttcttagctgccttcttctgtctgcgcctgcgcttaaccggctcaactgccttgatagccacccaaatcatcagcgcggctatggccagctgaatcacaatgctgatgataatccagttcttcatcacaaagccggtggactgcatcccaaaataacctgccatcttggctgtgggtgtgctgcctcccatctgtccgtttatgattgtataaaatgtagccgcaggattgagaagcagcagataaatcacatttcccgatgatggtttgaccacattttccccgaaaccataggccgccactgaattgcttatattcatggaggacagggagagtgaaaacttatttataaagtatgtcccggccaccacggctataagcactccataggtaaccaccgtggatatggtagaccgcttgaacagggccgagaaacagattcccaggcttcccgcaaaaaaggccaccgtgatatagcacagaaggagagacaggatatcctgccatgtgattcccccatagacaaataccatggccaccgctgggaagctggacacaatcagtaagagcagcgtgctcaacgcgctcatcagcttcccgatcaccacctgtgacgccgtcatctgggtagtgagcatcaattccagggtctgccgctcccgctccccgcttatgctggccgctgtcacggccggcactatgaacatcagcagtataaactcaatggtggtgacaaactcatacatatccatgaagctgctgtactgtatgaccgccgcggactccacctgggccacggcggaatacatattgagcagtgtgaccatggacaggattccattgaacagcacgatgatgaggggcagccggatacttctggagctgaccttcatctcccggctatagaccggatttcgcatcatatgacaacaccaccctttcctcttcatgttctgtcagctgcataaatacggattccaggcttcccttttcccgggtgaatccgttgaccagcacgtcgctgtcaatcagccgctggagcagcagggcctcgtcctgggcatcccccgcaaaccgtacgcagatatcctgttcacgcagggatatggtctgcacacagggatggctcttaagaatggacagcgccttgtcaatgttggtgaacacggatataaccagcggattggaggtattgaccctggacaggatatcgtctatatttccctccagcaccatccttccctggtctatgattcctatatccgtacagagctcggacagctcggacaggacatgggaactgattactatggtcttgcccgattcctggagctcctttaatatctccctgaactcaaagcgggtcctgggatccagccccgatgtaggttcatccagtataaggatggccggatcgtgaatcagggccctggccaggcacagtctctgcttcatgcccctggacaatccgtccacgaagaaatccagcttatcctccagccccacctgctccagcagggccgtgtatctcttccttgccaccaggccgcttatgtggtggcaggccgcaaagaattccatgtactccgacacggtcaggttatcgtacaccccgaagaaatccggcacatagccaatcatggacttaagctttcccagatcggcacgggcgtccatgccgtttatggtaatcctgccttcctccgcctccaggagccctgtcatgattttaatggtagtggtctttccggctccgttgggccccacgaacccgtagagggcgccggtctccaccgtcatgtccaggccgcttaatgcatggtattttccgtatatcttgtgtaatcctcttatttccagcatcatttactccttcctgtcacagtcagtatgggcagcatgatattccaggtgtaatcgccggtggcatcgtacacatacttgatggtcagggtatttcccggggacaggtatggctccagcgcctccctgtcataagactggacgtgggtatccatggaatcataggtgccggtattgtagttatagaaatacatattgcccgcaaatggcaccgtatagtaataccgcatgctctgcaccacctcatcgctcatctgatggaaggacagcttctccacctcgatgtcatttcccagataatactctaacatgaccggagtcaggccgtacatgctgttgttggacgcataatactcgcctgaaagcacattgggctgcttctggagcgcggatttgtatatcatgccgtcctgttcataattgacatcaatggaggaggtaagcagggtggaaccatatgtctcatagttgggggactttaagaatcctgtctcctccttctcattgctgaatcccagtaccctggcctctgagtgatagcctgacagatagtttcccatatagaaggacagaaggttggtcctctccaatgcctgcacataggccgcgtcccgtatatccttgtcctctttatagcgggaggccccggtgatctgctctgccatggcataaccgaaattggtgattccgtatatgaccttcatgccgtccagacttacggtctctcccggctccatgtgcccaatgagaatcatctgattatacagaaggatggccacattatccacttcctggccgtaattgttggtcagtgtccctgtcaccttaccgtcaaaggaattcacatcgcctgtaaatccctcctgctgtccgttttccatgcggcgctccatcatgaagaattttgagttgaacgcgcccacattgtcggacctgaccctggtaccctcatcatcataatgtatggttatggacggtgtctcctcacccgtgaatttgggcagggggcccatattgtagtaggcgcttcccgtaatgggatacagggtgtattccgggttcagcgttacggaatacggtttattatagggggcccgcatgttgatgaatgtggtttccgatatctcatccctgtccgtatcctttatggttgcataggtgaagaagggccctgtaaaccgcgtactcatgcccatgagaagaaccatgccggtacagcacagggacagaatccccacggacaactggtaataccggcgcattcccctctgtttccagaagaagtagaggccaggtccggccagagccacataggccaccgccagtgtcacatacaggcccacctttggaagatttttgatatttcctgtatttatcagcccctggactgaccagaactggttggatgtgcttccgtccatggcgcttgccagcccgtttatcttatcctcgcccagaagggtggtgaacaggttgtcaatataggagatattggcctggcagaattcctctatgtccacaaaatcatacatggcaacggctgccagtccgttccccacggaaaccgacgagaggacagacagctcgtcgctgcccagcacctcggtgccgcctttcagcatgacatccgtgcagaccagagggatggaagcgccttcaggccggtccaccgcatattccacgcccatgttgatgacccgctcgtcgggttggggaaggggctgctccaaaagttccttgccaaatcccctcagggtatcctctcccctgtcgccggttcctatgagcagaactccgcccttacggacccactcccacacagcctctatctgctgccctgacagctttccggaatcaaaatccgttatcagcagcacatccagctggtccagccccagttccgacgccggcagagtggctgccgtcatctcgatggtcttggtcctgagggtgctgtagttaatacccacgccattaaaatacagaagctccgccgggttgtcactgagtacgccgataaaaagctctgccgtctccaggttcagattcagcttcaggcgtttgctcaccacctcatttccattctcatccagcacacgcacatacatttggtctacccttgcccccagggatatgctcactgatttgttcacgctttcgccgggttcaatttcaaccggatactcataccggtatacatcataatccaggttcatgttatatccctgaaaatccgactccatggccaaaatacacagggttcccttaaacgcctgtgcggactggctggacagctcgattttaaggggcaggaaacggccgcttttcgctgcattctgataaccatagaccacgtccatggcaacgggtggttccacggtttcctccttggcagccgtactgtccgtcccaaaagcctgggcccccggggactggaccgtgacagaggccgccagcattaagccaaaaagggtgcttttcagcgccctttttattttctccggaaatatccgcatgttacacttcctcatcctatattctccgttcaagtcagctaatagttccaaaattctctttattgatgtcaaaattcacctgaagctttaccgtgaacacagtgccgtccaaatcgctggtcacattgatggtacccccgtgcatgtccacgatttcctttgcaatggcaagtcccagacccgtaccacccgtactgctggaccgggactgttccacccggtaaaacttgttgaatatcagaggcagctcctccggcggtatgacgtagccgtaatttgtaatggaaaccgtcaccacatcctcctgggccagtatctttaccaggactctttttccatcagcgccatacttgatggcattgccaatcagattgtcgaacagacgggccagcagattgccgtcagctgttataattttagccggtacattgctctgcaggtcatatgacaggttcttttccacaaagttcggatatgcctcctccaaaagctgtcccagcagctttaccacatccagccgggatacgtgcatggatatcctgccgtaattgagctttgtaaatccaaacaaatcttcaatcagcttctccaggcggcgcgcctttccgtatgcgatttctatgtacttgtgctgcatctcagccggtatcttgctgttgccggccagcagctccaggtatccgatgatggatgtaaggggtgtgcgcaggtcgtgggccacattggttatgagctcgtttttggtgcgctccgattccctctccttatccatcagctcccggatatcctccaccatcctgttaaggttggcagccatgctggagaactcgtcgtccccaatcacatcaatggtagtgttcaggttgccttccgatatgctctgaaccgcatccgatatattgctgatatagcggatatagggttcctgcagaatcataaaggtcaccgcgaacagcaccagtccggacaccacataaaccagcactaccgccacatggtaatccagcacagcctgaagcaggcggttcatacgtccggattcctccatgtatctggcaatcatggacacgttggtcaccagaaatatttccaccagacaggaaatgacggcgctgtatataatgttggtgataacccgggtatggtagcgcctgctcatatcacttttcaattttataacctactccccacaccgtggtgatgattttattctgtctggtgtcctctttcatcttgcctctcaggcgtctgatatgtaccatgaccgtgttgttggcctcatataccttttcattccacaccttctcgaatatctcgtcggtgctgaataccttgcccgggttggaagccagcaggtacaggatatcgaactcaatgggtgtgagcttgatttcctcatcgtccacaatcactttatggttatccttgttaatggtcattccctttatggttatctcgttgttggccttttccttggaagcgctgttcgggtttagctgggtgtagcggcgcagctgtgatttaaccctggccgtcagctccagcgggttaaagggcttcaccacatagtcgtccgcccctgttcccagacctaatatcttatctaaatccgtggacttggcactgagcatgataatcgggatgttgttggtttcccttatcttcttacacatctccaggccgttcatccccggcatcataatgtccaacagcaccaggtgtacctcttctttggaaagaatttccagccccttggcagcattctctgccttatacactttatagccatcacttacaagataaatctcaatcaaatccgcaatctctttttcatcatctactaccaggatatttatatcgggcatgatgtcccctcctcatatgttaacttatatgacctattctaacataatatatcaaggttttccttacttttttcttgaaaaattgtgggaatttctgttacaatacaccgggcctccctataatggtaatatcttctttcatttgtatactttaaataaaaatagactgaaaaataggattttttgcaaatatttgtgttctgtcacaatagaaaaagaagtaaattatgatataatcatttcatgaacattataataattttataaattttcaggaggtggggatcatcaagatagtgactgttatggacaatctggccggagaacaaaaagccatgaaggcagaacacggattgtccttttatgtggagacaggggatatgcgcatcctctttgacttcggagcaggcagacacgccctggaaaatgccctcagactgggtatccggccggaacaggcagacattgcagtggggagccacgggcattatgaccatgctgcgggttacagggattttgtggcggcaggccttagctgtcccctggttacgggaaacgggttcttcgaggaaaaatatgccagaaacggactcaaggcaacctatctgggtacgggatttgacagcctgtttctggaggaacacggcatccggcatatggtgtgtgagtctgtccttcccatcggcaggggatgctgggtcatgggcggcataaggcggtcccatgactttgagacagtcccggagcgttttgtgatacgggacaaggacagatggaagcaggattattttcaggatgaggtctgccttgtgctggaggagagaggtgcgctggtggttatcgtgggatgcagccatccgggcatccttaacatcctggatacggtaaggcagcgcttctcccagcccatacgcgccgtggtgggagggacccacctggtggaggctgaccgggaacgtatacacaagaccatccgtaccatgaaggctctgggcatcggacttctgggctttaaccactgctccggggaacttttacgaagcatgatggctgaaaacccggaactgaacaccgtgtatctgggcgcgggcgactgcctgttcctctgattcctttgatacttttaattccctgattacatcggggacgcatctggcggcgggaggatgatatgttggaattttccagtatggcacaggatttcgtggaggctacctcctccctggtgggagggcgcaccatcaacatcatggaccgggaaggtaccattatcgcctccacggaaaaggagcgcatcggcaccttccaccagggcgcggccgaggtcattgccaccggaaagccggttcttattgagacaaaggatctgccccggtatcccggcgcaaaggagggctataacatgcccatctttctgaaggatgagctgattggggtggtgggcatctttggatgcgaggagcagatgctgaacgtagccaatcttctgaaggtctatgtaacacagcattttgcccagcaggccatggcacagaaacaaaacgtggaatctgaggtgaggaaccgccttctgagcctgctgcttctcggagacacggggcagatggaaaccatttaccagctgtcggctctgattccggtccagctggtgtttcctgtaaaggttattatgatacgggcatgcaaacggaaaaataccagggagcagatgaaccactacacccagctcttccagaacatgatgtggcagggtactctggaccgttcaagagatgtgttcggcatccagaacaatgactgcatcatcatccacagtgttcccagacaagggaagggagacgaggccctggacaaaatcatagcccaggtggtccgggaggaggaactctgcattgctgtcagcggtacctgcgcacggctggaggacattcccggcggtatgaaggaatccaataccctgatttccatggagggcggaccggtccgtaatctggagaacagccaggtcaaaattcagtatctgctttacaagtccctgattcacggcggtacgaagtatgcggaaatgctgtaccgtaaactgacagccagccaggacgccaggcaggccgaggttcttctgatgactgccaggatatattaccaggagaacggcagtgtgcagaaggcgtccgaacggcttcatctgcacaaaaatacccttctttacagaatgaaacggctgttccagctgctggacctggaaaacgagactccctttaccagagaatttctgatccgtctgattttcatatatcatccgatagatgatatcacttaaacatatttgaggaggttttacaatgtcaggtttatttatattcttagtcatatttctggccgtagtttgtatggtattggccatatctaaatttaaccagcacccgttcatagtacttacggttatcgccatcgccgtgggcctggtctgcaaaattcccacagaggaagtcatcaacacagtaaaaagcggtttcggcaacatactggccagcatcggtatcgtaatcctggcaggaaccatcatcgggaccatccttgaaaagacaggtgctgccctgaccatggccaacaccattctcaagctggttggaaagaaaaacagcgttctgactatggccatcaccggttatgtgacaggcatccctgtattctgcgattccggcttcgtcatcttaagcccgatctccagagccctggccagccagagcaatgtatccctggccgtcatggctaccgccctgtccggcggcttatatgcaacccattgtctggttccccctacccctggccctattgccatggccggtaccctggaagccgatttgggattgaccatactggtgggccttctggtatccataccagccaccttatcagcgctgttctatgccaaaaaggtatccggcaaaattgatattcctgccaaccctgagtacacggtggatgaactgcttcagaaatacggcaagctgcccggcgcactccacagtttctcgcccatcctgcttcccatcgtactgattgcacttaaatccgtaggcgattttccaagcgctccctttggagacggagttgtgaagatgttgttctcctttatcggtaatcctgttattgccctgattttaggcgtgttcctggccatgaccctggttccggctgctgagaagaaaaacaccttatcctggattacagaaggtgtcaccaattccgcaggcatcctggccatcaccggcgcaggcggcgcatttggagccatccttcagaaactgcctattgcagataccctgagcgcatcccttctgggtcttggtgtgggcgttttccttccattcatcattgcggccctgttaaagacagccatgggagcttccactgttgccatgattaccacctccgctatgattgcgcctctgatgcctgccctgggatttaccaccccgctggcaaaggtacttgtcattatggctatcggagccggttccatgaccgtatcccatgccaatgactcctacttctgggtggtatcccagttctctgacatggagacaaaggatgcctataagtgccagaccggtatgaccggcgttatgggtatcgtgaccattatcattgtgtttatactttctctggtgttctgtggtgtccatagctaatgtctgcagaacaaacactatcttcccggttccggtagatcctatctgccaggatgcggcttgggcagcgcccctcccgttcccggaagccatcgcccggaggtttccggcttcattgcagccatcaaaggccccttacaataagccggacaaagggccggctggcgctgacaatacgatcaggaatccttaatagcaaaatgcaggtccttaagaacgatgatataactctatagactgatcaaatgcattttcctcataacacattttctcctgtccccggcctacagcaccgcatattcttgcatccattttaggaacggaatagcggtcgaaccatccttccagctctgtcttaaggctcctgatctgctcttcaaattccggatttccgaagaggttggtttcctcatccgggtcctttgacaggtcataaaactcgcagggactgtctccgtagcggtggatatattttaaacttcccttttttatcatacgggtcttgctgtattcgtcaaatacaacaatccggtcttcatatttttccgctggatgattgatctgctccaacaggctttttcccggctgcagcggctccagctcatatttgcatcctgccagtgacaggatagtagggaaaatatcatactgtccggccatagcagaacaggtggatccaggtgcttcgcattcgggaactttaatgataaatggaatttttacggatgaatcatacatatttggcggataggtaccgtttccttttccccagattccgtgctgccccaggttcataccgttatcggaagtaaagatgatcactgtatcctcttcgagcccatgggcatctacccagtccatgatctttcctacgcctgcatccatggcagagatagcggcataatatcccgtaagatattcccttctcttctcaggtgtatcaccgatcggacaggtattatttgcctgccatggatgaataggaagatcctgtgtatctttaaattcgcagtccttatacagatccctgaatttcttcgggtgttcacttgcatcccaggggctatgaggcgctgtataatggacacttaaataaaatggggccccttctcctgaaagccggtccagatactctaaagcatggtttgtgatggtatctgtaatatattcatgggaaatggataactctccgtcttcaaatatatctgcatcataataatggcagccgcctcttccaatggtaaaataatactcaaatccctttttctttgtaatattatctcccatatgccattttccgcttaaagcacagtggtaaccattttcagccagatattccatataggttttatggcctttcaggtaatcaatggacttgtcttccatatcaaatccatccatcattgccatatgaggatatttccaggcatccagatttcccttcctcaaccagtcctgtatgccatggcaggaagggatctttccagttacgatactggctcttgccggtgagcagaccggagaagtacagtagaattcatcaaaggtcactcccgcctctgccaggcgtttcagattcggggtcttaatatcatggtttgtctcagattctacagcccatgccccctggtcatctgtaattacaaaaataatatttggtttctttttcatgcttctcatcctttcacgccgcctgctgtcaggcctccgatataatacttctgggccgccaggaatatggcaaaaataggcaggatagagattacgcttgcagccatgatcagactgtatttaagccctgtctcatccataaaatttaccagtcccagattgatggtgtacagatccttgttattaataaaaatcagtgcattgtcgtaatcattccagctccaggtaaagaaaagaatgaccagtgttaccagtgccggtttgcacaagggcgcaatgatctgaaaacagatccgcagatcccccgctccgtcgatccgggccgcttccgaaagctcctccgggatctgcagcatatactgccgcaccataaatacaccgtaaatagagaatgcggcgggaagaatcagcgcccagtgggtattgtagattccgatttccttaaacattaaaagcttgggaaccatcagcagctgatgaggaatcatcatggtagccaggtagagcagaaaaatcttatctcttcccggaaacttcagttttgaaaatccatatcccgcaagaatagaagtagtcactgcaaataccacagaaagcagagttacttttgcagaattaaggaacatcagggaatagctgtattttccgaaccatacctctctataattctgcaggttcagataatccggaatcaaccggaaaggaactgcgaatacatctgcctcacgcttaaagcttgctgatatcatccatataaaaggaacggtacagacaattaccataaaccacaggcaggcggtacatataatctttgctgttttatgatttttgttcattttaccttgcctccttatgcctcgttccttttctggatacggaactggatccaggtgatgaagaaaataatcgccagaaggacaatcccctgagcggatgcaaattccagctttccgaactggaatgctgtgcggtaaatattgtatacaagcatggtagttgcagttcccggtccgccatgggtcatcaggttgatcagtccaaataccttaaatgaattgataatggatgtgatcacaataaaaaatgtagtaccggataacatgggaatcgtcacataccagatccgtgcaataccattggctccgtcaatggctgcagcttcatacagatctcttggcacattgatcataccggaaagaaacaggatcactgtatatcccaggttctgccagatacagatcaatacaatggcgggaagggcccagcgaaggtctgacacaaaaacaggcggattttccattcctattttacgaagcagatttaaaatggggccgttattagaaaacagcgccagccatacagcggatattgctacaatatttacaatatagggtaaatacagacctaactgtacgaatttttttccaatcacatattcatttaatacataagccaccataaatgaaagtacaatcagaacagctacataacttacagtaaaaacaatgttattgatgagggatgccctaaaccacgcatccctccacatttccacatagttggaaaatccctggatcctgattcccttgattcccttggaataatcccatttggatatgcttataataaaactgaaaagcatgggaactgtccagaatataagtacaccaatcagattgagccctatgaaggcataccccttcatagcagattttgccttcttgatttttcgtttattcataggtatcacctgcgctactgttcctgggcgatcttctcatccgctctcttctgggcaattttcagagtatcctccacggactgggctccggcaaataccttatcaaattcctctgttaaaatggtattgatctccgcagcggctgtcatattcttacggatggagacatcacttcctgccaaatatacatcttttgcactctccatatcaaacagctcctgctgatcaccaaagataagggaagccaccttatctgcatcatacttcttacatgccggaattctcgcataaggtgccacataatccatgccttcctcgatataccacttgatgaacttcatggcttcctgcggatgctctgacttggaattaacacttaagtcatccgtataagatgtagtataattgtgttcctgatctgcggacaatcttggcattggagcgaagcctaccttgaaatcatgaggatagttagctgtatcctttacatctctcactacccagtcgccgaatatcatagctgcttttcctgtcagcagcatgcttgcgggcgccattttctgtgtggtcacatctacatagcttggctcaataccttcgctgacgcgctgtaaatatttctctgttatatcttttacatcttctgtatcaataaacgctgattttccgtccggggcatacatccagtccactcccagcttactgtttaacatacgcagtgccggctgtcccgcatcatatccagggaagaaccagccataaaccttgtcatttccttctcctttggtgagttttctggctgtatccaggaattcgtcataggtccagtctttgcttggatacggtacgcctgcttcatcaaacatctgctgattataaaggatcgtctctgtaattctctttgccggaagactgtaataatgtccgtttatttctttctgggaaatagtatcctcatagtcttcatccagcttaaagcctgcgctgtcaaataattcatccagcggataagtataaccgctgtcaattctcttctttaaaagaacatcattcatactgaagaaaacgtcaatagaagtatctgacatcaacgtcatatccagcttggtatttcccgcatcatcattgacatatcttgtatactccacctgaagattgggatctatcttattaaaagcttcacatacctgttccggccccatattctccgcaaaggatccccaccagtggagcaccaccggttctgcggatgcctctgcctttgcctcccctttttgatcggttgtggaacctgaaccgccgcatcctgccattacagaagctgccataataacagacagccccaacgcaactgttcttcctgttttcataaaccatacctcctgctgtttgatggccccattatataccggttcctgcttataatgaacgcagaaataaaggggaaactggtaattttttatgcacctttattcgattggtaatttcttttgcaaaatggtaattttttacgcgtttttcaaagaagcttttctttcctgtcttttttattgtatactctatgtaaacacttgatttgatggaaaggcggtttataatgatgaaacagacttttatgaaactgaatctgtcctgccgtctgtttatgatcattattgtactttttctgattccctatctgtcccttttttcctgggcttacaggaaagcggagagcattatccgtaccaaagcacagtccctggaaaaagaaaacctaagccagacaagaaatgacattgagaacctttgcttaaacattgccaaggcttctgattacctgatctccctggatcattacggtgtactctatcgtgaatcagaacaaaggggatatacttatttaaaatgctggcagtacgtagatgaacagatccagaatgcaaataacgccctgttaaattccagtgcagatatcagcgttctttccaaagaccggcttttatactccacactttcttaccagaaattccggtatcaggattttttcagagaacaggtcgtttccactacatatttttcaaatgctcacaaaagttatcgcaattttgaaaatgaccagacttttatttcctatatcagagaacttccatccttctgttctcagtcatattatctggtgatctccattccggcaaacaatttttcaaagcttcttggaactgctgccggaaccatggaactgacggattctgcgggcaataccatctgcggagtccgttcaccccaaaataacgaaagcttccgggaagaaacctccatctccctctccggttggaaattggaagataccatttccacagattttctctacagggacatttaccagctgcgtctgtttacatttgctgtatccttagtgttattaatggcatgccttctggtaacattttctgctatttacgctcagttaaggcctcttttaaagctgaaagagcaaatggagctggtgatgtcaggcaatctgaatgcggaagtggccaccaccaattccagagacgagatcagcagtctttctcgtacctttaacaacatggtcaatgaaatcagccacctgatcaatgaaatccaggccactcagaaaagagaaagtgagctgcgttttgaaatgctcttagcacagatcaatccccactttctctttaataccttaaactctattaaatggatgtcagtggtatccggaacagaccacatcaccacgaccataacctctctcggacgccttcttgagatcagtatgaacaaggttaatgatgtacttccgcttggcgaagaactggaaaatataagaagctatatccagatccaacaggtacggtatccgggacgttttaatgtattttaccatatagatgattcccttttagactgccgcaccttaaaactgatcttgcagcctcttgtggaaaattccattctccacaacattgagcaccgcgattatctttccattgacatttccggaaagctttctgaggatcttattatcctgtgtgtaaaagataacggaaccggtatgacaaaagaacagatggaacagatcttaaagcctaagacacatgcagaaaaaggctatgttttctccggactgggtgtatgcaatgtagaagaacggatccggcttgcatatggccctgattacggattagtatataacagtgacggctattcctatacggaagtaacgatcacttttccccgacaccagaaatcagacccatttttattacagaaagaagcaaaacaatgataaaaatactgatcgcagatgatgaaccactggtaagagccggtattaaggcagtaatcccctggaatgatcatggttttgatgtaattggagaagtctccgatggaaacgaagcttatgaaaaaatcctggccctgaaacccgatatactgatcacagacataaaaatgcctggaatggatggtatcacgctgcttaaaaagttaaaacaggagaaagttcccatacaatcagtggtgctcagctgctttgacgaatttgaactcgtcagagaagccatgaaatacggcgcccgggactatatcctgaaattatccattgacccggcaaagatcctggaagttctcggtgagatccggcaggatctggctgacctgccggaaaatgagccgcatttttctttaaatactgatgatctgaaatatctctttataaaaaaactgcagaaccggggattcacctcagatgaacagatagaaaatgtgctccacaacattcagctgactatttccctgaaaaattattacctgatgcgttttacctttgaaccggaaacagccaaaataccggatgacaaccgcagaaaaatgatttataatctgttgaaccagctttgccagcgctaccctgggaatgaactgttctccctggatgaaaaaggatatctgatcatacaaaatgcagaaaaaaatgattttctctgccgtcagatttctgcagccatgaagcagtatgccaaccagaccgtatatttcggcataagtcccagattgaaggattattcagtgtttaaagacggattaaaacaggcggaagatacattaaacacctgtgttttttatgaacaaacagaacctttgactttccggatgcttacatctgcaggtttcccatttattaccagctgcctggcccagaagctttatatttctctttcctccggcaacacagagaaatcctgtgagctgatttcccgctttttgctctggctgaaaagcggactgttcttttcttccctctgctattcttatctggaggagatcctgaatatttatgtgcgggtagcaagagaacagaatttttccatttaccagatgcaggacggtgaagccgacattttcagccggatccgccagacgcacacccttcgctcctgcgaacaggtcttgtccggctttaccagaaagtttacggaattcatccgtgaaaaacgttccggtgaacgctccgaaatcctgaagatcaaagaatacctgcagcttcattacagtgaaaatattgacctgaacctgattgcagaactggtaaatattacgccgtcccacttaagcaacctttttaaaaaggaaacgggagtgaatttttccacttatctcacggatgtccggatgaaggcagccaggaagcttttacagtcgccggaatttctgatctatgaggttgcagaaaaaaccggatattccaatgcaggatattttggaaaagcttttaaaaaatattggggtatatccccggaagaatttaaaaaagaacaacgttaggagtttacatactatgccggctatcagcgtacttatcaagccatcctccgggatgtgcaatatgcattgtgattattgtttttattgtgatgaagcccagaaacggcttcagaagtcttatggatttatgtctgaagaaactttaaaaaatgtgatccgcaagacaatcctgcgggcagaaggtgctgttgcctatgcttttcagggcggtgagcctacccttcggggaattgatttctttaagaaagccattgcttatgaaacccagtataaccgataccatatacaggtccgcaatgcattacagacaaacggatatctgttggacgatgaatggtgccgctttttaaaggaaaatcattttctggtaggtttgtctttagacgggacaaaagaaaccaatgacatgtaccgccatgcttccggctgtgaatctgtttttgaccggatcttccaggctgcaaaactgctggaaaagcacggagtggattttaatatccttacagtagtaaccaataataccgctgcccatataaaagagatctatgagttttatcggaaacagaactgggactaccagcagtatattgcctgccttgatcccttagatgaagagcacgggaagaattcctatgccctctctcctgagcagtacaaggatttcctgatcactttattccatctctggtacgaagactggaagaagggctgccagccttatatccgccagtttgaaaattatattggcatcctcatgggctaccgcccggaagcctgtgatcagtgcggtgtatgcaatatccagaatgcagtggaagcagacggcagcgtttatccctgtgatttctatgtattggatgaataccggctgggaaattttaatacggatcagctggatagcattgaccggcgccgtcaggaaatcggatttattgaacgttctaaaaaattaaaagattcctgcctttcctgttcctattacaatatctgccggggcggctgccagagaaaccgggatctggatcctgaaagcggactttatgacaattatttctgtgaaagctaccgcatattctttgatgcctgtctgcctcttatggaggagattgcgaaaaaacagagtactgaacgataagccggattacttttacattaagcgaatccccaagtcttgcacgacctagggattcttttagaaacgattctttttggaacgttacctaattactgctcataaccggcttaaacaccctgctcctggccggatcctcctcatctgcggactccttagccataaggacagcttccctgcagaactgctcctgggaattgaccaggaccttgcccctcttatcctccttctcgtaactgccgtccggctgaagtatatgggcctttacattgtcctccagctccacttccagaatatggattaccttttcccttaatatctcgtcctcaacagggaacatgatttccacccggcggtctaagttcctgggcatccagtccgcgctgcccatgtatacctccgggcttgcgtcattgaagaaataaaagatacggctgtgctccagaaagttgcctacaatggagcgcacggatatgttctcgctgagtcccggcacacctgccttcaggcagcagatgccgcggataatcatttccaccttgactcccgcgcaggacgcctcatacagagctgtgatgatttccttgtcacacagggaattcatcttggccataatgtgggccggccggccggccctggcatgctccgtctccctgcgtatcatgcgcaggaaccttcccctgagccagaggggggccacagacagcttattccaggccagaggctcggaataaccggacagcatgttgaatacggcggtggcgtcctcccctatctggggattgcaggtaagtatgccgcagtccgtgtaaagcttggccgtggaatcattgtaattgccggtgcccagatgtacatagcggcggattccatcctcctccatccttaccaccagggtaatcttgctgtgggtcttaaggcccaccagaccgtaaatcacatggcatccggccttctcaagcatctttgcccagttgatattgttctcctcgtcaaaacgggctttcagctccaccagcaccgacacctgcttgccattgtccgctgcctccgccagagccgcaataatgggagaatttccgctgacacggtacagggtctgcttgatggccaggacctccgaatcccttgcggcgctgcgcacaaagttcaccaccggatcaaagctctgatatggatggtgaagcagaatatcgcctttcctgatattggtgaatatatcatcctcattcataagggccggcacgggctggggcacataccggggcgccttgaacagttcaaagccttccagtccgtacatcttcataaggaatgtcaggtccaggggaccgttaatctcaaagatatcctggctgttaatggacaattcctttcggaggattttaaggaggcgcttatccacattgtcctctatttccaggcggatggcctcgccccactgacgtttcttaagctgcttctggatttcctccagcaggtccacggcctcctcctcgtctatggtaaggtcggcgttcctcatgatgcggaatggatgggaggccacaatgtcataattgaggaacaatgcaggcatgttccgctctatgatttcctccagaaggatgaccaccctctgctccttgccgtcctcgtctatctccctgggcagctccacaatcctggaaatgaccgaaggaacctgcaccatggcgaattccagttcctcatcctcaccactcttctttttcaaaagggcggcaatgttcagcgtcttgttccgtatcagcgggaagggcctggaggaatcaaaggccatgggcgtcaggaccggatatacgttcttcttaaaatactcgtccgcatatgccgcttcttccccggtcatatcctcatgttctgttatgatgcgcagcccgttctgtcttaaggcgggcaccagggaacggttataggtggaatactgcatctccaccagctcatgggtcctctcgctgatccggtccagctgttcctggggcgtcaggcccgcaatgtcgggcttggtgtactttgcgtgtaccatgtcctttaaggaggccacccgtaccatataaaactcgtccaggttggaggcggttatgctcaggaatttaagacgctcaaaaagcgggatgctcttgtccctggactcgctgagcacacggtagttgaattccagccagctcagttcacggttaacataattcgtcggatccgccgcaaaatcaatggctgctgcttcctgtccggccgcggtatttccctgagccgtattatccgccttactcccggactctgccttaatcccggcatttcgcctggatgagccgccttttaccgaagctgcccttaatgtatcggatttctccgctttatttttctctactttagctttctctgtcttggatttagatgcctgaggctttccagctgattctgccatatctacaccctccttttctgtctgagtatcggccttatgccaaatatctcttcaaagaaatccgccttctgttcaaaggatgcggcttccaacgccatatttcccggataaccggtggtgattaccagttcattttcccggatagccatgcggcagtccaccagctttcccctgtggctgcggtccatggaattggccagacgcaggatggctgtcagcttggcaatgaggatggtgatggcgttgcggctcattcctgcatcctcctcctgatgtacctgggtctccagctgtaccttgtcataatcgaaatcacggatattataccgcaccacattggcgatgatttcccgctccagatgactcaggccgatgatttccgtggacatgatgatgttataggagcattcgttggaattccttatgcttataaactttccgcaggcatggagcagtaccgcaatctgaagcatcagccgctcccgctgtcccagtccgtggaacttcttcatgttgtcaaaaatacccagggcatactgttccagcacctgattatggctggtatggcacttgtagcgctttgcaatgttcctggacgcagccaggatatcgttctcgaaattgtggctgaacttgaccagcttgttctcgttggcatattccgccgcaataccgtcacagaggcggataccgggcacccagaacatttcagcgcccgtcagctccagaatccgtttgtataccaccacacttggcagaagcagggatgcgtactcgctgttgaccccaaagcgctcctcgatctgatccgttgtcatctggcacatgcgctcgtagaaacggttcatagcggccgcgtccaccttatccccgcaggtattaaggtccggcctgttgatgatatagaggatattttccccaataccaatgagatttgtgatttccctgtccttcaggtacatcttgcggaaggtaaacagttcattgtccacaatctcctctatatgctgcttgtgttcttccacggtagccggtatcctggccagcagcccccttacgcgaagggtgcccaggggcaggttttgggtggtcaccagggaatccttgtcaaaaagggacagctgcgcgcttccgaatcccacatccacgatggcggtccccttttgaatgattttattaaattctgctgccttggcagctatggccttatagctgatgaaccgctgctctgaattactgatgatgcgcacagtcagccctgtcctcacccggatctggtccaggattatctggcggttgtgcgcctccctcatggcgctggttgcatatgccctgtagtcccttaccttataggacttcataatctggacaaactcctccagtacctggcacatctcctccaccagcccatagcttatcttgcctgtgctgtaggtatctcttccaagagctattacatggcgtacatggtcaatacgctggattcctgtcttataggacatctcatagatacccagctccagctcaaatgaacccacatcaatcgccgcaaatgtccgaactgccacttttttcaactccttatcggttccttataggtagactcatggttattataaacggcctcctcccatcatacatcgaaaggcggtaaaaactatgtaaaatttgcgtaaagcagggacgcaaataacctaccgccttgccttcagatgggttatgaactgtgcggccgttcttcccgacaaacctccgtggctcagctcccacttgttggcctcggcaaagagctcctgctccggcatatcaaagccatggcgatccgccagcgtttttactatggtctcaaactgtctcttatccggcgagccgtaatagatggttaccccgaacctggctgccagagacagcttttcctgcaccgtgtcgttgttgtggagctcgtcgtccagctcccgcttgtcgctgaacttctcacggataaggtggcggcggttggaggttgcatagataagcacgttgcccgggcgcttgcccagtcctccctctaaaatcgccttcagatatttatactcaagttcataatcttcaaatgaaaggtcgtccatataaatgatgaacttgtaatttctgtccttaatctgctccagcacatcggacagcgccttaaactgatgcttatatacctcaatgatgcgcagacccctgccataatattcattgagcaccgccttgacgctggaggacttgccggttcccgcgtctccaaagaggagtacgttgttggcttcctttccgtccacaaaggcttctgtattctctatgagtttctgcttctgaagttcatagcccactatgtccttaaaatatatatgctccacattgatgatgggatctatgatgacaggctggccttcctccttctcgatgatgcggaacgccttattgagcccgaattttcctacgccgaattccctgtagaattccaccacatggtcctggaactgccctgcgtccgcggattcctccagctgcactgccaggttcacaatcctgtttctgacccgccggttaaatacacggctgtccttcctggccggcttataattttccataagggcccacaggccggagggttccaggtttcgtatgtcgtaatcaaacagggccttgaagatacggcagtcctccctggccagttcatccagggagccgcctgccggccctgttatctcgcatgtggtagtgtatgcattttcattgtttgccagacagaaggccaggaaacaatgccagaggtttccctcaaatccgtacttaacagccagctccgcaaggcgtcctccgcaggacgcgccgtcaggctcatggcctccctgtgcgtatcccatcagatgggcgatatcacgaaacagctcctggtactccaggttcctatatattactaaatctttgatatccatgatcttccctgcctccctaataatttcccaaaatcctcatgctgactgcttcctcggagattcctaacagcgcgttgcggattgccgggtcgctcagcgacccctccacgtccacgaagaacctgtattcccagctgcgtccctctatggggcgggattctatcataagcatgttcacatcgttgtaaataaaatttcccagcatattgtacagggatccgctcttatgtaaaccttcaaaacagatgcttacctttcccgcgtccttcctgtacatgggcttcctggcaacgataatgaacctggtggtattgttcttattgttgttaatggaggattccagtaccttaaggccgtaaagcgctcctgctgtgggactggccacggctgcctgggatatatccccctcttccagcactttcttggctgccccggctgtattctccacgcttatctggctccactgcctgtgggcgcccagatacccggaacactgcatcagtccctggggatgggaatacacccgcctgatatcctcaagcgaggcttccggcaggcctaaaagcgcgtggtccaccgccacctttgtctcggccacaatgtatatgtcatgcttcagcagattatcgtagttgtcaatcacggccccagccagggaattttcaatgggaagcactccatagtcagcccttccctcctccacctctatcatggcatcctcaaagaccgggacatggtatacatcggcatcttcgccaaaatactggagggcggccctgtggccgtaggccccctccacgccctggtagacaacccgcacgccttcccgcttcagctcgtccaccatggtaaagccggtatccccgcccttgccgtgctctgccagaagacggtactggagcctgcggctgatggtcataatctgtgaaaagagctcgtgtactcccttcctgttgaattcattgcgggccatggcggccaccgcgtccagcttctgcttttcccgctgcccgtcgtaaacagcctttcccgttccaatcttaaattcagccacctggccgcaaagctccatccgcttctcaaacagttccaccagcctggtgtctatctcatccagccggcccctgatttcctgtaaatccagattctccatggttatttatcctgctcctgtccttccttcatatctttcagcatacctgctataacgtcccttgtatatgccccgggaaacttacgttcttcagccgggagctccttaatatagataggtgttccatagcgtatgcacacatggctgggctttacgaagggcaggtgctgttcaaatatctccgccgtacctgtgatggccaccggtatgacagggcatccgcttttctgcgcaatcttcaggcttccctcatggaaaggcagaagcccggtcagctcctgattctcattacgggtaccctccggaaatatccatatggatacgccggattttaccttctcgatgccctccaggatggtcttcagtccctcttttatgtccacgcggtccaaaaacagacaattgaccctctgcatccaggtgcgcagaagggggatctttaacatctccttcttagccacgaacccggtcagccccggaaccgtcacatagcctaccagtatgtcaaaatagctcctgtggttccccacatagaggacagccctgtctgacggtatgttctccagcccctgcacctcgtatgtaacgcctgccagcttcaatataaagcggaacaccccctgaatcttgctgagacttttttcctggactcccacaggatcctttttggccctgagtctgagcatggtcagtaccggcacggaaaaaatcaggtacagtacgaccgtcatggccaccaatatgatacgtatcattgtcttctcctttatatatccatatttatatgtcaagaaatgtttatttttcattatatcaaaaaggacggcttaaatacaataccccgcaaccaggtttgtcatttaatcgccgcccttgggctttgtgagatattcaaacaggagacccgtcataaaccagagtggtgcgaacttgagccgtatgaccccgcccacattgtcgggccacagggagtagttccatgggcagattcccatgctggtcagccatatgccggttatatactccgcaataaaaatcagcaccatataaaccagtccgtggcgtatggcccgcccggcacggctgagcctgtcctgccccgcgtcctccagtcccggaagcccggtaagccagctgtcgataaaccggcttatgggaaacaggagcgcccccatgccgtagatgggaaacataataagggaggtgcggcctatcagccgccagtccccggccataatggagtccacagaggtaaacatgacttccaggcaccatcctgcgattccgcatctgcaaaagttaaggaataattcatatattttattttcgtggtcgatttgtcctgtctgcgctctcatagccattagtatgagcctgagcggctgccttctattcgcggacagctgcttttccagaactttccgtgttccccgggcagggtttcccggagctgccgggctgcggaggctacaatagcggggacaggagccggctggactgttcctttatgcgcatccacaagtttctgtccccatactcttccctggtgatttcccggcagtggggcaggtcattcataaacgcctcttccagctggcctgtgacttcctcgtcataaatggtggcattgacctcaaaattcagttcaaagcttcgtatatccatgttagctgttccatagcagctcacccttccgtctaccatgatgcccttggagtggaggaagccgttttcatacacataaaccctggccccataatccagaagctcccctgcataggagcaggtggcccagtacacaaaggggtggtccggcttgcagggaatcatcagccgcacatccacacctgaaagggccgcaatcttaagactggaaaatatggcgtcatccggtatgaaataaggggtctgtatatagatatggtgctttgccttgtgaaacagctccaggtagttattccgtatatggggctccctggtatccggtccgctggtgataatctgcatgcagaccatctcgcttacatgctccgggtccggccagacagcatggatctggccgttcagccaccgcctggcatactctgcttcctccccaaagtaccggatttccttaaacaggttctcccctgtcacgtagttccagtccagcgcaaagcgaatctgaagactgatggctgcctccccctttatttccaggtgggtatcacgccagtagccaaacttaggatcacgggatatatattcccggcctatattgaagcctcccacaaaacccgtggcgccgtccaccaccacgattttacggtggttgcggtaattcaccctcagattcagccatcccaaaaagggagggaagaatacccctaccttaatcccggcgcggcgcatctggtcccaacgcttcttcggcatgaagcggcctcccatgccgtcgcacaggattctcacttccacaccttcccttaccttatccagaagaatggggacaatggagtcaaacagttcatcgttcttgatgatatagtactggatgtggataaaccggcgggcctggcgcagggcgtttctcagggcttcaaattttgcctgtccgtctgtgtatatctgtacctggttgttcacggtgagcacggatcccgatgtttccagattatagataatcaggctcttaaaatccctggacatggggtccatcatttcctccggcatgtcgtcggagcggatgatatcctcctggcttttgaccggcagattcagcctgtcgctgacttccttcacccggaacatcctgctctttttcatatcctggccaaagagcaggtaaaagacgattccgaacaccgggatgaaatacagggccagaagccaggtccatacacttcttgggtccctgcgctgaaaaaatatgataataatagaaaatgccaggttgatatacagcagatggtccagcagccatccccataccgtcaataccgtactccagattatttccattctacagcctctctcctagttttccgcttccgttatatttccttcctcgtcaatgttcagtttcacagtgccgtaccggtttccatattccagatagctcagacgtcctgtgcccaggtccaccttcacggagacaattctggcctccttctgtcctccggaaatataatcctttaacggactgtcgggattgctgagatccagactcataagcctgagtagctttggggctgccagcgtccccctttccctctcgtcattcaggtaacgctggaccgcatccacacaaatctgggcctctgtttttgccgctgcctcatgggcagcgttaataaagctcatcatattaggcaccgcgatacacagcagtatggacaggattgcgaccaccgcaatcagttccaccagggtaaacgcggaatttttctttttcttcatgtcctttttcctcattttccatttcccgccgtaagccgccgataatggctcattgtaccacatgcggggcttaatttccagactcaatcttgccctcaccggtatcgccgtaataataagccttatacgtccttccgtttatctggccttcccagtaggcactgttactatctttgtcaaaatggtactcctctttctcagagttctttaagacacccgcatctaacatgtcctgctgcgcctttcccagggtataattcgacctggcattggttatggctacctgttccgctgatttgtcctggattccccggtaggagggcactgctattgccaccagtattcccagtatggcaatgacacagattagttccaccagcgtaaatccttccgttctcttttttccctttttcatatgtatgctcattatcatgactcctcttttcttttgtacgattggggccccctactggacggaatacagcattttctcaacctcctccatatcggtctgtccgcccgcagccatcctcaggacatgatccctgagaggcatggagcctttctgctcctggtattcacggatggatgaaagcggctccttatcaagtatcatggccctgatctgttcatccacatccattatctcatagaccgctgtccttctggtataccctgtaccgccgcaaagaggacagcccgcagctctccacagtctgtccggaatatgtttcttccgctccgcgaatatcctgcgctcccgctcatccggaacgtagggttggcggcagctgggacagagcagctttaccagcctctgggccacgatgccggacagggaagccgctgccatataaggagggactcccatgttgcgaagtctgtggattgtggaagcgcagtcattggtgtgaagggtggacagaaccagatgccctgtaatagctgcccttactccgatgtccactgtctcctcatccctcatttcacctaccatgatcacgtccgggtcctgccttaggatggagcgcagggcagacgcaaatgtaaggccggctttggaatttacctggacctgggtaattccctccatgaccttctctgccgggtcctccaccgtgactatgttgattttctttttcaccattcggtttaaggcagcgtacagggttgttgtttttccgcttcccgtgggacctgtcaccaggaccataccgtgaggcgccttaaggatatgttcaaatgcggttctctgttcttcctccatacccaggcgccttatatccatcagtgagttgtccctgtcatttcccaaaagcctgagaactgccttttcaccatagatagagggcagagtggagattctcaggtccgtggacacctcaccccgctcatagtggtattttccatcctgcggaagacgtttttccgcaatgtccatgccggccatcagcttaagcctggttatcatgggacggtggaattccattttaagtgtagtatggaccatcaggtctccgttgattctgatgcggatgaccagatcgttctttcccggctccacatgaatgtcgctggcatttttatgaaaggcttcctcgatgaccgcattgaccatgcgcaccacgggagcgctttccacccgctccatgaaggacagttcagaaacagagcctcccggcgctgcgccaggttccgtcattgaaacatatgcattctccccgtatacatgctccggcgcattgccataggcttttctaagcgcctgcttcagctccttctcctgcgccagcactgcccttacctccatgccggacagggtttccaactctgccagcacatcgggagacaccggataggctgctgccaccataagacattcctcttcaaatctcatgggaagaatccggttcctcacggcaaaggacggctcaatcacggcggctgccttgcggtcagccctgagagggccgaaaggcgccacctccatatggtccctggcagccgcgcaggacagaagatctgcctctgtaacataaccgaactctgtcagtatttcctcaatggagctgtccggccttccctccttaagacgcatggcgcggtccagttgtccccgggtcagatatcccctgtcaatcagcatgttttctatgggtattttatctggcactgttgtctcctctcccttccatatggtatactttcgccagacagcagattattatgaaagcgaggtaataccatggtttttatctatttagtattttacggactgttcggcgcagtgacaggcagttttctgaatgtctgtatcctgcgcatacctgaaaaccaaaatttcgtaaccgggcgttcccactgttctgcctgcggccatgtgctggctttttacgatatggttcccgttctgtcctggttattcctaaagggccggtgccggtattgcagggcccctgtttccatacaatatccggttgtggagcttctcaccgcatctgccttcatcctgtgcctcctgtcaaaagggccaggtatgggttcagccattatgtgcatgttttccggtattctcattacagccgcgtttatagacgcacggcatatgtatatacctgacggcatccatgtcctgattttgctgctgtcctgtatctcactggcagccggatccgctccctcccttatgaaccggctgggcggctcccttctcacaggcggtttcctggctcttgtgaatctgcttagccgcggcggcgttggctggggtgacgtaaagctctttgctgccagcggtctgctgataggcgccgctcctgccatgacagcccttctgatgggctatgtcacagcgggactctggtatgctgttccccttttgcggggaagagttggccgaaagacacagatacccatggcaccgttttttgcagtgtccctgatgatatgcggcctttggttccgccagctgctcctgtggtatctgggctttttccgttaacggatgacgcccttcttctcatggtcagctgccctcataatagcggtatacgccgtttccgttcagataaactttcacttccgggccgtcccctccgctggaccggtacggtttgcgaatgaccatcacggatccgtccctgccgtcaaatacaatgtccgccatcagggaaaagctgtaaccgctgcttaccaccctggtatggaccgtggccagggatttaaggggttgcgctgtcaatgtaatgtcaattgtggtggggctgtctgccgcaggagtctccgctgcgtcatcatctatgacgtcggaatcctctgaaactccttttccacggaccacatattccttgtttcccagcgcgtggtacagataccgttcccagcgaatttcttcctctgcggccgtgtcctcctctgtagccatgtcttcctccaaagaagaagcttctgccttaagttctccgtcctctccttcctcagcctcctcctcgtccatcatctcgtcaaattcttcccttaacctgtcgcagtcctcctggaagctctgccagatcaggttcatggccggggactccccactgcttactgcctcgcagaatgaacggtgaatggtcttggaggaaagctgggcttccatatagcgcctgctgttcagggcagctttcatattgtaccgggaaatggccatataaccgccggacagcacagtcaaaagcgtcatgagcaggaccacatacataaggctgcttccccgggtatgtccattatactctctttctgttcttcccctgtccatcatgtcctgccttccccatccatggtataaccatacatggaaccgatgaccgccttctgttcatatataacatccccgtccctcttcacctttatgctcaccctggcccgggtattctctgttccgctaaaatccagctctaattccataccgtccatctttgtcacatccagctcctccgcggagatactgggccagtcctccaccggcggcagttcctcataatatgacccgccctcctccagatcaggaatctcctgtctgttccttacgtagtaggatatcacgcctgtatcccggtagtcgcagaaaaacacatagccgtacctcattttttcctccagaccacggtaggcctcgccgcacattgcctttgcctgggaaatccggtccaaatcataatacagcttcatctgcggatggatgaaaccggaaataaatacagccaggacagcagcaatggacagtgccgccactgtctcaatcaatgtaaatccgctgttgttccctgtcccgcttcctttcgccatatcctccccgcctttatctgtgcctgtaaaatgtcatatggttgccggcatcttcccccgattcggtgatttcatattgttcaaatatttcccggacctggttcgtcccctccaggctgaactctaccgcaatggtttctccggtagggtctccctctccttggccggcccgggcgctgaggatataattggactgttccagcctctgctccctggacatctggccggcattagcagccgtcatcatcagaaacccagtacagacaactgccaggagggcagttgacaccacaacctcaatcagagtgaaacctcctcttgatgacctgctatccgatttcttcataataatatctgacctccatgattcctttcattccctgatacgtcccctgtccgccctctccgctctcatacacagcttccacatccagaaagcttaccagaacacttttctgttccctgtatatttcatcggaaaatgtcatcacaccctttgcgtccggacattctatttccatggtaatgactgattccattaccgtaccgccggccggcccgtttcccggagcttccttaccgctgtcctcggggtcatccatttctgtgtcatagggaaaatccgccaaaacagcctcgcctatactcatgcggcatatgcttacccccgccctggctgccatggcctgcaggttcctatccataaatgtatcatcgatattacggtagaagaaatcttctttattccttaaattctcccactcatttagcttctgctccagctcatcataatggctcaggtaaaattccatgcccgccgcttcctgcttccggctttccatcagctccctggacttctggtatccggcgcggcacggccagataaatacttccagcgccacagcccagatgatgagggtgaacaatacgcctatgagaaaacgctccctgctactgagcttcatcctgtcctcctgttcccagagttccgtaaacagttgcatatacccggtacgtctccctatcctctgccctcttttcccacaggctgtgtcctacctgcctgaaaacccctgaatgttccacccgctccacgtaggccggtacatcctcagagcgctccatggacaccaccatctgaaggaaaggcccctcaccgtcaaaggaaatggattcaatcctcatatccggatccatggcctctgtaaacgccctgaatccatccatgcccaacagattcttcccggctaacagcgcctttgctgtccgggttttctccatgtcatgcgatatttctcctattctttcttccatctgcatggatttgcggacacggctcttgtactcggctccttccatcgcatactctgtccgggccaattctttccctgccctatggttgagacaggcggcgtgaagggacaggcccgcggcagccaatccgttggcaagcaggaacagggcccggcccctggtcataaacggcccgtgacccagaaccgagttctctccatccccataacccagttcttccagttccagcgcctttttctttccctccagggaacctgccacacaaactgccagacatgtggcgtccactggttccggcattctgacacagcagggtatcttgaacctttcggacatatattccgccgctgccccggcatccggaatacaggaggtcatgatgaccatacaatccgggacaggtatgtccgcctctgtgcggcagtcctgtatcaggccttccacctgctccgccatctcctcgcagagcatgtccaatgcttcctcccgcagaaaacagccggccttaagtcctgtcatgcggcatgccaggcaatgtccgcctgacaatacataaaagcccatgcctccctggctcacatccaataaaagcacccgttcttcccgccagagttccctggccataagcgccatacagtcaggcagaaccaggacacggccgcatatcattttcccgtcctccagcgctttcttatacgcatccagactgcgctgttccatatagtaagcggtaacagcagcctttgtcctgccggctttagccctcagatccagggccaccgcatgatttccaaagcctgcgtccagcagggacatctcattgactgccattcttttcatagcgttcttccccgcctttggaatggtgaagcccatcatcttcacatcccgtccaacgatcagattgacccgctttccttccatgccgtgtttttcagccagacgcgtcagggccgataccacatcaggcaccggctccacgaattcccactccactatttccaggcggcggtggctgccggaacccggacaccgtttaaacctgccgcggacataccatatcctgtcctcttccaaacatatgtaatatttcattttttacctcttacagcatcgacgagtacatgttaaaaacaggcatcatgatggccatgaccacacttcccaccaccagggcaagtatgagaatcatggccggctccagaagcgcaatcatctggttgaccgctctggctgcctccttttcataaaagcttcccgcatcctccagcaccatatccaacgcaccggattcctctcccgctgccaccatagagatgagcaccggctggaacaaatcctgctcctccaacgcctgcgacagcatcacgcctccttttaatctctccgcggcctgggccagccccttctccacatatgagtttcccatcacccggcccaccgtatgcatggcatccagaattccaatcccgcttccgtagagcacggcaaaggcagatgcaaaacgggatgtatatacggttcttaaaagttttcctatgaatggagtatacagtacagcccggtctgcctgcaaccggacggaaggacattttagaatccccttgaacagggccatcagtatcagaataagcataatgtaaagaaacccgtggctgcggaggctgaaactgagcctcatcatcatccgggtaatccagggcagttcctgctcctgcagcatggaggcaaactgcggaagaaccatggtcagcataaatacagccgccatcacggtaatggaaaacaatatgaccggataggtcatgaccgcccgcaccttgccatttaactcttcctcccggccgtagtactccgccatcttatgaagcagttcatccagccttccgctggactcgcccgtgcgcgtcatataaatcagcaggttagggaatactcccttcatctcttccatggcttctgacaacgtacgccccttatgaatgctctcccttaatccggcaagggctgctttaagagtcttatccctggcagacccggcactcacttccagggccctggacagagatacaccggctgtcagcatggctgctatctgcctgcacagcagcggaagctgtttctggttcaattttgccggacacgctgcgggcgtcctctcctgggaactgtattcatagcaatagagtccctgggatttcagtatgacaaaaagagccctgccgctgtctgccttctcggttccacagtgaactctgccatcttcacttttcgccttgtatctgtaacgcggcatggctcccttcccctttccataacggattcatatgtacaaaaccggctttatctgatataagtcagacaaagccggccgcaaaacacttatatatgattttcttaacggaaactattctgagccggctcatattggtagccaataccagacagtacagatataatcctggacttatccgcatccaatgcctggcacatctcgtccagagagctataattgtcacggagctgtgtgtttacataactcagcaaaataaccgggtcttttggaatggtactcacaatttctacctgctttctattacctcatattgattcgattaacatcaaataccctatatctagtcctattccggctataggtactccggccttcggcagaaacgattatatcacctgcaagtaacgttttcaacataaagttagggtattttccctacttttttcgtcatcgccggaagttgattgaattatatttctctattagaagtattctgaaaaatatctcctattttatggaaaaaataagggaaagaacctgtttgcgcagattccctcccttacctgtatcttcattccatacttatctaacatcattccacataagcaatcagccgtgttttgtcctcatccacatctatgacaatggtgcttccctcacggactccgtcgcccagtatgattcttgccgccagggtctccacattcttctggaggtaacgcttcaggggacgggcaccgtatgccgggtcatatcccttatccgtaacgaattccttggctcccgccgtcagctccatggtcagctccctgtcagccagacgtttattcaggtcagccacacagaggtccacgattcttccgatatcctctctggtcaacggcttaaagagtatggtctcatccagacggtttaagaactccggcctgaaatgggcgcgaagctcattcatcaccgcgttttccacctccggcctgatgtttccgttctcatcaattccctccagcaaatactgggatccgatgttggaggtcaggataatgatggtattcttaaagtccacggtcctgccctgggaatccgtgatacgtccatcgtccagtacctgtaagagtacgttaaacacgtccgggtgggccttctccatctcgtcaaacagtaccacgctgtatggtttgcgtcgcacggcctctgtcagctgtcctccctcgtcatatcccacgtatcctggaggcgctccgataagacgtgacacggaatgtttctccatgtactcactcatatcaatccgcaccatgttggactcgtcgtcaaacaatgcctctgcaagggctttggccagctccgtcttacccacgccggtgggccccaggaacaggaaggatccaattggcttggtggggtccttgatgcctgccttggaacggatgatggactgggtcaccagctgcacgccttcatcctggcccaccacacgtttgtgaagaacctcatccagatgcagggtcttgcttctctcgctctctgtcagcttggcaaccgggattccggtccatttggatacgattctcgcaatctcatcctctgatacgctctccctcacaagacttaagtcctcattccggatgcgttcctcttccgcctgcagctccttttgaagctccggcagcctgccatactgcagttccgccgccttattcaggtcatacttctgctgtgcatcctgaatctccctgtttacgctctctatctcttccctgagggcggagaggcggtccacactggccttctcattctcccactgggccttttttgacgcaaactcatcgtgaagctctgccagctccttctggaggtcagccagacggtcctggctcagacggtctgtttccttcttaagggctgcttcttctatctccatctgcatgattttcctggacatttcatccagctccgcaggcatggtatccatctctgtcttaatcatggcgcaggcttcatccaccaggtcgatggccttatccggcaggaaacggtcggtaatataccggtcggacaaggtggcagcgctcaccagggcagagtctgttatcttcaccccatggaacacctcatagcgctccttaagccccctcagtatggagatggtatcctccaccgtgggttcatccaccatcaccggctggaaccttcgctccagcgccgcgtccttctctatatactggcggtactcattaagggtggtggcgccgatacagtggagttctcccctggctaacatgggctttaacatattgcccgcgtccatggagccctctgtcttgcctgcccccacgatggtatgcagctcatcgatgaacagaataatctgcccgtcgctctttttcacttcttccagcacagccttcagacgttcctcaaattcacctctgtacttggctcctgccaccagggctcccatatccagggcaaagagcttcttatccttcaatccgtccggaacatccccccgcacgattctctgggccagaccttccaccacggctgtcttgcccacgccgggctcaccgatgagcaccgggttattcttcgtcttacgtgataaaatgcggataacattacggatctcgctgtcacggccgattaccgggtccagcttctggtccctggcgcgctccaccagatcatatccgtatttggccaatgtgtcatacgtggcctcaggattatcgctgaccaccctctggttgccccttacagtggacagggcctgaaggaatgtctcccgggttatgttatataacttaaataacgccttaatatccttattgggatgcttcaaaagagacaggaacaaatgctccacggatacatattcgtcacccatggcctttgcctcgtcctcgccgcttatgagcaccttattcaaatcactgctgatgtaaagctgaccgccgccgcttaccttgggcagacgctccactgcctgctttgcctcgttggagaacatatctccctgtatccccatctttgtaaccagcttaagaatcaggctgtcctccagggtcagcaggctgtacagaaggtgctgctcatcaatctgctggtttccgtattcatatgccagcttctcgcagttctggactgcttccatagacttctgagtaaatttattaatattcattgcccattcccctttcttctctgccgcctctgaccagaatgcctgtgtgattcctccgggagcagcggcttacggaattgtgctttgtcatctttgttctagtcgtactataacacatgttgttagcactgtcaagggttgagtgctaatttttcaaataaaaatgccgcggcacagacgtcatttatctgtggccgcggccagctgcatattttttacttcacgccggtagctgtgattgtcttatcagtaagggtacccttgtagataatggttgcggtatcccctatcttcagtttatcaaacatgccttcttttcccaggaaggtaaacagagtattctcagggtccactgtgtcgatgaccacataatccgcccctacttctgccaccttgccggaaagggtattgattttagcatcttctgaatccatggcatcctcagtcacgattttggttgccaccggtttgtcggtatcgtcttccaggtccccgtagtaggtcacatccgcctgtacgccggacttgacgccgtccttggataccttctgcgcaatcttggtgttaaaggtatatgtaccctcgtccgtggtcagggtcagtgtattgtcatctgccttctctatggttcccgtgacaatggcatcctcctcagcggccgcttcttctgctgcctctgccgcggcagatgtaacgatgtccactgactttgccttggtcgtatcagcggaaagctcgcctgcatatgcaacctctatctcgtcgccttccccgatggcatccgcaccttcaatctcggcctcagatacatcaaacttcacttccctgcctgcgtcgtccttgacggtaaccaccttatcggctacctctcccacgaagccatagaagtactccagttccatatcatcttctgcttctgcagatttctctgtctctgtctgcgctgctgtcgtagttggggccgctgtagtttctttattgccggaagaacaagctgtcatccccaatgcaagcgccaggactgcaaccgccaaatagtgtctcttcataataatctcctcttttctaaatcatgctatgtcatatgatacgccgggacgggcagcatattccccctgctgccgtccacgttacatattactacgaaaaaccctattttactatgtctttttttttaatttttcataaaagtttagatactccccatttttttgatggactctgataccagttttttgaagaggggagccattttatccgatgcctcctggacctcctggtgggacagaggcgcgtctgtcatgccgcaggccagattggatatacaggaaataccgcatatcttcatgcccatgtgattggccgccactgcctcgcaggccgtactcatgcccactgcatccccgcccagtatcctgcacatctttacctcatacggactttcataggcaggtcctgtgagctgtacatagaccccctcctgtatcctgattcccagctcaagggcagtggaacggatgatgtccctcaggtcctcatcgtatatgtggctcatatccgggaaccttggtcccagctcctccagattcggcccgataaggggcgaggggacaaaacaggatatctggtccttaatgagcatgaaatcccctgccccataatcataattcactccgcccgcagcattggtcagaaagaggatttttgcccccataagcttcatcaggcgggcagggaggaccacatctgacatgggatagccctcataataatggacccgtccctgcatcagcactgccggaaccccatttatgcgggcaaacacaaacctgcccttatggccgggtaccgtggatacgggaaatccctctatatcacggtaatcaatggttccctggatttccagctgctctgcatagtcgccaaggccggaccccagcaccagtgccaccttaggttcaaagggaatctcatcctttatactgtcgtagcagtttctcagcttgtcatacacaggatttgtcatatctgttctcctttcttacggaaggcttacccctcctttattatgtgaagtatatcatacctgagccacagggctcaacctttaatgcggggcaggcaccttcttctgtgttcccgccggttctgcctgtaccacgctgccagaagggccagcagtcccacgcttatgcctatgagccctgcccccactgttatgacaaaaccgctgcgtacccagtaccagagatttccctcccggccttcatcctgaacctccggcgcgggtacatggcctgcttcctgagccgcttccaaagaggcgggagcaaccggggaaacctgcctgtaaaccatctccagagcataagtttccggttgtgtccagctgaattccccctcatatgcggcctcatagtctctgaggagcttttggccccggaccatggcctgacggcacattctcccctcctcatcctcatacggctcccctgaccagtctgcatagagtatgcggtactccatgggagacagccccataaactccagcagcttccctcccatggacacacaggtctccaagaccgcatcccccggtatgaccagggaacctccatggtattcatccgcgccataggcgtggaaggtgacaggtgccgtaaatccatccttccattcctcccttacaatcctgctttccctcaggaacagggttccctctgcctggcttcccgatacatcctctttcagggaaatagagccgggaatcccttcagccccttccacaccggtatacaccatcttccgttccagatgccggctggcatcctgtcccggaatggtcaatatctcccagtaatccagcctgtactcctttccatcgccgtcccagtaccggtctggcggttcctggaattccccatcctctgccggctccacgttccgggtaatccgaatctccggcccgtatcgtccctcctccggttcctgtgccgccatggccggcgcacggcctgacagccagaaaacagcagcagccaccacagcaaatgctgccctgcccattatcacccttaaatttatccgtttttccaacggtattctttttcctctatctgtcataagcattcctcccggctatacgccatcttacaaactgcgggagaacagaatacaaatcatatgaaaatgtcaatgtgcataaatgaaaactgcctgctaaaatgggaattacgggtttcagaaggaaacctcgtctctgtgctgatgcacagccagatgtctgaagaaaacaatctgtggtcttattatacataacctgaggacaggaatcaagggcaatttcgatattattcgcctcattattcgcctcatatgcagccggagaaatgcagctgttcacacggtacgtcctcctggccgataaaaacgttccccatccctcccttgaccgcggccggtcaaaaagacggcatcccctctccttatagaaggaataccgtcctacacttatctgtcaatgcaccgtcaactgaattacggtctgaactggctgtacttgtgtccgggagcgattcctcccctgtaggccgccagctcacttactgtcaccagctgatatccccgcgctgtcagctccggaatcagcaccactgccgcatctgctgtcgtactgtagatatcatgcatcagtatgatgtccccatcctttacctggctcagcacggtgtcaatggtcctctgcgcattcctgtgctgccagtccctggtatcaatggaccacataatggccggcatacccatggagcccagcacattgagggatgccgcgtcgatatatccccccggcgggcgcataaggacaggagatacgccgcagacagcctggatcttctggttggtggaacccacctggcttacgattccctccgcaccgatttttgtcagatatttgtggtcatgggtgtggttggcaacctcgcatccctggtccaccatccgcttaatgacgcctgcatttgcgttgacattggagcccagcatgaagaaagtcgcccttcctccattggcctgcaggctgtccagaatccggccggtcactgatgtcttaggtccgtcgtcaaatgtgagggcaatcataggtctggacgggtcaatgccatgggaaaccaccgggtccgcgggaacccctgcccccttagccgtgatggaagcccgtatgccgtccaccctgagacctgcaccctcctgtccggcggatgcgccattggctgcccagtctgtccaggagccgttctgaagtactttgtagtataaatcatatcctgccgcgccgctgccagtcagctccatacgaatggactccagaggcatgacgccttccgctccgcctgtctcagctccatcctctgcccaggagagccatcctgaaccgctgagattcacctgatagcgtattcccacctgcataccggccggaatatgtatcagattagcccttatggccgtgacccacgagttgaccggggccgaacacatattgttatcggccgtggccgcgctccagccctgctgcaaaatgaaagcgctgtagtttacctggagggattcctgtcccgggaccggctgtactgcctggccttccggctgagctgcctgctcctccggctgagactcctggccttccggttgagcctcctggccttccggccgggctgcctgctcctccggctgagctgtctggctatcggtctgagctgccactcccggccctgtctgggctgactttgccgcacctacccccgtgctgccggccaatgccgtcattccctgcatacttaaaataattccggctgctacgacagcagccagaatctttgactttttcccacatctgatcattcacattctccttgcatcatgtctttatttgaggaaatgatatcctctccgaacacagtcctgcataacatcacatattccttgaaatacaggtggtcctccaactccttcagagcatgggctatcccccaataataccgggcatgcttccgtttatccttctcgttaaaccgctgccatatggcgtcgcccaccaccagataatctctggccgtacagcgcatgttgctgagcttgtcccccagggccagtatcttaatctcccaggacgccgtgcagagatgcctgaccgtacgggtctttcgctcctgccagctgcggcttttatcttcgctctcatccaccaccaggtccgctaccctggaaccaaacgcatcctccagttcttccctggtaactcctgcatcctccataacatcatggagcagggctgccgcaatgatttcctcatcatccgtaaaggcggacacaatcactgccgtctccatgggatgcgtgatgtacggaatcttcgtgccctttctgaaagctcccttgtgggctttatctgcaaacgcagccgcttctccaatcataggtcttactccttctgtgatagcactatttctattccttatgtacctctccctttgatgtcaggaatcacacctatcataccatattcaacggatattttgaagagtattgtggaatctttgccattttccaagttaaacttgtaagaaaagagaatttctgatatgctatagaagtattttttccgcattacttaaggaggataattcatggatcgtcattcgtcatattcggctccccgcagcgaacgtgcttccggttcttacggcagcaaccgcggcaggagcagcaaacgcaacacctataataaacgttcatggaacgataacagaaaactgcacaccctggtattctacatacttccctttatcttaatcaatctggtcatattcatcctggccacgtccacacccaagatagagtatgatgcatctgacaccaaggattaccgcagtgtggacatatccatccgcatacgctcccttctccctatacgcgagatgagcgtcaccatggaatcccagccccttgaaatggaaaaggaaaagggagtctacaaagccaccctgaccaacaacggaaccctccagatatttgtgaagggctggaacggaatgtctgccagactgtccgacaccattcaggcactggacgatatggcgcccaccattcaggaagactatgtgatggaaaatggaatcctcaccatcacggcggaggacagccagtcaggtattaactttgatgcggtctatgccacggatgaagatgaaaagaccgtcaaacccagccatatcaataaagaatccggagagatcaccttccccatggatacccagacccttgtggtttttgtggaggattacgcgggtaataccataaagagctcctataccagcctgaaggacggcttagacctcagcaaccgtgacacggaattcccctcagacggcaccaacggcactaatggcagcggttccaagggagccggcacagataaggaaaccagtaaggccaaggaatccaccaaagccaaggagtctgctaaggccaaggagtccactaaggccaaggagtccgccaaagccaaggaatcctccaaggctgaagaatcctccaaggtcaaggagtctgccaaggccaaggaatccaccaaagccaaagagaccaccaaagccgcagaatccaccaaggctaaagagtcaactgcggcaacaacggctgcccctcccgccgacccgcagtcaccatcgcccacccaggcatcacaggcgccgtcgcccacccaggcatcacagacaccgtcgcccacccaggcgccacagacaccgtcgcccacccaggcgccacagacaccgtcgcccacccagacgccacattctccgtcgcctacccagacatctcaggccccgtcgcctgataacggttcgggagataacgtcaccatcgtacccctgggctgacacttatctgagctatctgtaaaatatcaattgtaaaataagaccatggctccctccgcagaaccatggtcttatttttacccaatattctatttcatattttatccaaatcctgtcactgtcttcccgcatccataatgtcgtcaatgatatccacatattcagaacagtatttttcgtacataggggccgcggcttcccggaaccgttctttttccctggcatccagctccgtcaccacacagcctgctctcctgaccctgtcttctgaggttctctcgcgctcagcccacagttcacgctcatacagagccgattcccgggcacagtcccgtataatgttcccgtattcctccggcagcttatcccaggtggactgggctgccagctgaagctccggaaccctggtgtgttcgtccaaagtgaaatatttggccacctcataatgcctggtggactcataagaaggccagttgttctcggccccgtctatctcccctgtctgcaggcctgaatatacatccccaaaagccatgggtaccggcgttgcccccagagcctgaatcgtatccatcatcagttcagattcctgaaccctgattttaagtcccttcatgtcgtccagagactcaatgggcctgtccgtactgtagaaattacgggcgcccgcatcataccaggacagcggcaccaggctggaaccgccgaaggaattcatgaaatccgtaccaatcggcccctccagcactttccacatgtgctcccgtcccgtatacaggtagggcatctgaagcacattcagctttggcacgaactcggcaaggggcgacagggataccctggcaaaatccacgccgccaaactgcagctgttcaatcaccgttttctcgtctccgagaacaccgccggcattgacctgtatctccaccctgcccccggtcttttcatataccagctctgcaaatttataagctccctgggtggtgggataatcctccgcctgattctcagcatatgtcaggacgaactccggaactgtcttctgtgccgtaccgtccttaccgctgcctgcgcaggatgcggccagaatcatgacagcggcgcaggccatcaggtaaatcacattttttctcaagcagccgtccctcccttcggatatatcataccccagttaccagacccggtcaaggcaggcctttcctttaattatgcacagtcctgccttccacctttgaggcggcataacggtaaaattcttctttctcatttccaagcacacggtttgtaaatacaaatccatgggtggtatcgctgaatacgataatcatggcaggtttcctggatatccgtttcacagaattccacggcaaatctgatgtatcatttcccacccgaatgtgaagcccattgtcgtcaatggtaacctgggtgtcctgggtaatccccgccgtctgtttttttgccttgacataaatcatcagcggctgaatgactgtaaaaaggcagcaacccagaacgatgaggcacctcatgagtccctgggcctggtcccacctggaaaatcccagtgcaaaggccgccactgtaaatatgatattgcaaagtcctgccagagaaccgtatatataatacatggaaagctgccataaatcccgcgccgttgtcctgtatgtgtatgtgtatctcattcatatgctccttgtgcggatgtcctgaatcttaacagagtggcgacagggccgccactctgagattattttaacacgaaacatcattttcccgtatccagtaattaatgggccagtacagatggaagccacatgctgacagacggaataaaggtaatcagcagcagagtaataatcatacacaggtagaatggaagcgtagccttaaccacccgctccataggcaccttggaaaccgcagagccaatgaaaagaactgcaccaacaggaggtgtcagaagtccgataccgcagttaagcactaccatgataccaaactgaatcgggtccagaccgatggatgttgcgatgggaagcaggatgggggttgcaatcaggatgattggcgccatatccatgatacatccaagtaccagaagaatcaggttcagcagcagggccagaagaatggggttattggtcatgcctgtgattgcgctggcagccagatcaggcacatgcagctgggtcaggcagtatccgaaaatactggatgtggcaatcagaatcattacgatagacagggtgtccacgctgtctcccagtactctccagactcccttccagtccagtcccttgtagataaacacgctgacaatcaggctgtagataacagcaaccgctgcggactctgtggccgtaaacacgccgcctaccacgccaaatacaactatcagcacagctgccagtgcccagaaggaaacactcagctgcttaatcaggttgatgatgctgaacttctcgcccttcgggtaattgcgcttaacggaaatgatataggatcctatcatcagcgttacggccagcagtgctccaggaatatatcctgccaggaaaaggcttcccacggagatgccgcctgccgtggtggcatagatgaccatattgtggctgggaggcaccagcagtccctcacaggatgaggtaatggttacagctgttgagaaatcgtcatcgtatccctggtccaccatcatgggaatcaggatagagccaagggaagccgtatctgctgatgcggaacctgagataccgccaaagaagtaggaagcgacaatattaaccattgccatgccgccccgcatccagccaacacatgcattggccagtgcaatcagcttttcggaaataccgcctgaacccatcaggcatcccatggtgataaagaaaggaactgccatcaggctgaaggagctaatgccctttaccatctgctggcagatggtggtcaggttatgtccctggaacagaaggcagaacacagatgaaagcgccaccgcataggcgatgggaaaacgcaggaataccatcaggaagaaactgcccagcaaaaccagaattgccatgctatttgcatccattactccatcccctcctttacaaagaagctctttacatgattatataatgcctctacttcgaaaaccagcatggccacgccggccagaggcaccgggaaatacatccagaacctggagaccttaggcatgctcacatatgtaccctttgagccgattcccgtggcatacttccagcccaccgtaatcataatgactgcaagcacaagcactgccaagtcagcgatgatatccaggcttcttaccagcttggggggcagataccggtcaaacgcggtcatgcgtatatgggcgccccttctgatggcaagagctgccgaaagcactgccatataggacatacaggtcagaactacctcttcactccacgcagggtcgggaatgaacgaaatgtaccttcctgccacagccatgcttgtgataaggatatccactaccagaagcagcttgcaaaggaacagtacggccctgtatgtcatatcatatgcaggcctgattttatcaatcttttgaaatattacaggcatattgattcccctttcaagaactacaggcacagagtttattcatttgccctgtgcctgtctgattgccgtttattatttgttcatgtcaagaatctgctgatacagttcagcctggtcctttgtagaagactcgatgatgtctttacaagcatcctgccatggcttgatatcaggaacctcaaccacgttgacaccctcagccttcaaagcatcaagaacctctttttccttatcctcggaaatagttctgttgaactgagatgcaaccttgccggcttccaccaggatgttctgctgctcttctgtcagcttatcccaagcttcatccgtgatgataacctggattgcgcccagtgtatggccgtccaaaatcaggtttggagcaacttcctggaatgcgttggacttgtaattagcgattggctgctcagcaccgtccacaacacctgtctgaagcgcggagtacagttcgttgaaggaaactaccgttgggcttgcgccaaggccttccaccataccgttcatgatcgggtcgttggacacacgcagcttcatgccctttaagtcatctaagcccttaacttccttaacagtgaagaagtgacggaaaccttcctcgccgtagtacaggcctcttacgccaagtccgttgtcatgcggttccatcaagaactcaggagccagatcgctgtcagcaaacttccagaagtggtcacggtttgcaaatgtataaggaatggacagaagcacggacttctcagcgccgtagcttgtcagggcaaacgcggaaatacgggaaatatcaatggtgccgccgccgcccagcatggtatcaagaacgtcgttctctgaaccaaggacaccgctggcctgcaggtcaatcttaatcttgccgccggacatctcctcaacggtttccttaaacttagaatcagtctgtccaacaatggtatccagcgggttaacctctgccataaccagggtaacctccggcatatcgctggtatcagctgctgcttcggtcttagcctcctcggctgcatccccctctgtctttgcggcctctgtagcaggtgcctcagttgctgcgggagctgctgtggctgctgtatcagggctctttaagccacagcctgccagggaaccggctaccatcgctgcacacaatgcggtgctaatccatctttttttcatgaaacttgtcctcctcttaatacttttttcatgttctcacatgatttttttatgttttcttaacgctgactttattataagagtatttcacgtttctgaatatagtaaatttttgtgaatcatagtaggattttaacctgtttccttcatccatttatgcaaatattacatatatcgtctttatacaatctttatcccttctggaaaatagacaatctgtactccgtgggactctgacccgttatgcgcttgaacacctttgcaaagtaattggaatcaccgtagcccactgcccttccaatctccttcacattaaccgttggctgttccagcatcttcttggcctcctttatcctgtaccgtgtcaggtaggatgtgaaattctggtcaaaacactgcttgaacagcttgcagaaataggcctctgaataattcatggcccttgcggcatcctgcatggaaatgtcaaacatataattttcatgtatgtactggctgattaatgacgtaaccttagacaggcgggcatgtcctccgtcctccggatcttctgtgtccgccgtcacggggttctcattttcatcctcatcccctccgctctgccgttgctcccccgctatatgcatggcctcctccaccaccagcatcagctcctgctcgtcgtaaggcttcagaagataatccagggcccttaccgtaatggccttttttgcataggaaaactcgtcaaatgctgtcaggaatatgatgcagcagtccttgtccgcctgccgaatctgctgggctgcttctatgccgtttatacccggcatctcaatatccagaatagcaatctgtatcttttcctcctcatagattttaagggcttccctgccattggctgcctggaatatccggcatctgtcccccagattcttctgcagcgtcttgtaaaggacctgtctctcaatcatctcatcatccgcaatcagtaaacgtaacattggctcccccttatatcttctgatagtcctcttcccggacggcaggcaggataatctgcaccacagtccccttgccggccctgctgtaaattctcaaacccccatcctcatacatggatttaatcctctggtatatgttccccagcccaatgcccaccctggccgtccgatgtcccttaagtgcgtccataagccgtttcagcgtctcttcatccataccaactccggtgtccgccagggaaatgactagcttatccttctgtttccatatccttaaaaatatccgtcccccttcttccttcctggctatgccgtgtatgatggcattttccaccagcggctgaagggtaaaggccggtatcatagtctcgctgccgtccacctccacccggaagttatgactgacacggctgccaaaacgcatctgctgtatgtacatataatcctgcaccaccttaagctcctggtccagaggcacaatctgctctgaggtcttgagattatagcggaagagatttcccagactggatatcatccgctctgtggtctgggcttcctccagtttagccatgcaggaaatcatgttcagtgtattaaacaggaaatgcggattaatctggctcttaagaagttccaggcgggccgcatccagacgtttctccatctcgatgcgctccacctcctccttatgaaggcgctccgccatctcatttttctccttcagggtattgatatacccctctgtggcatgtttcatcttattaaatgcctggaccagctctcccatctcatcccggttttccaccaccaggtcctcgcccccaaaatcatttctggctatctccctggaactgtgggccagttttaccataggggcaatcagggtatcggacagaagcttggtcaggcagatgaccgtaataatcatcagaacggaacaggccataatcatgtagggaaggtcatagaggaggggaaccttttcctgatagctgcgctttccctccttcagggtggactgcatcagccttctggcataggtctgcagataaccctgcattccatataccctgtacaattgcatcacaaatccgtcatccgactggtccatgtgaaggacctggtcccggaaatactggtagccttcatagccattcttaatattccacgtcctggcataccgctctggtccaatgacatcatagtcaaagggcagagcgtctatactgctctccgtcttaaaacaggccagcctgtattgctttgcattctcccaggaccgctccctcacatagagttcaaaggcatccgcttcctgctccatggactcctgcacatcatagcagagggaattgtcattgagtatcacgttaaaactctccagggagaaattcatgaccagcatattaaaggcaatggacagacccatcaccaaaatgacaacgacggaaaatgcacccagcttttttttcaacgatattgaaagccactgatttttaatataagaaaacataccccaccccaatcgcaccagaatgtgtctgcagcctgctttcttccggctgtttgtccaatttgcgctctgcgtaaccgtgtcatgcatcctttaccataccatccctccgggattgcccacggtccggccagtgtctttcaccattataccatataatgacagggagcgcaaagcccccggccttgcgctccagttattcccattcgcctattttgttttactatcttcgggttttgaagcggttatctgcttctggttcttcttagctgtcccaatctgcttccggctctttttggaagtgcttatctgcttcttctcctccttggacgtgcttatctgtttctgctcctccctggacgtgcttatctgcttctgctcctccctggatgtggctatctgcttctgctcctccttggacgtgcctatctgtttctgttcttccctggaagtacttatctgcttctgctcctccttggacgtgcttatctgcttctgctctttcttggaagtacctatctgctcctgtttcttcttggacgtgcttatctgcttctgctctttcttggaggtgccaatccgcttctgctcttccccggacatgccaatctgcttctgctcttccccggacatgccaatctgcttctgctcttccccggacatgccaatctgcttctgttcttccctggaggtgcttatctgctcctgccctgccccggacgcagccatccgcttctgtccatcctttgcagccgcggccatctctgcttcctgtgccacggtatctgccttctttggagatgctgttttaccggacacctttttcctggccgcaggctttttatccgcaggctttttatctgccgcctttttaaccccaggcttctttgcctcagatttcacggcttcttccacctgtgtgcatgtgtagatgctgacgctcattggcggtatatagacttcaatggaattgtccttttcatcccattccagcttccgggatgtcttggcacgtccgttgaccctgccttccccgccaaagtccctggagtcggtgttgaatatctccttatacttgccgtggaagggaactcccacgcggaatttctcgtgctccatgttgtcaaaattgcagataaagagaagggtttccttattttttctgctctttcgcaggaatatgattatgctctcattctgatagctgcaattaatccactcaaacccatcgggatcataatccatctcatacagggccgggtgctcgcggtacagcctgttaagcgccttcacataatcctgcatgtttttgtgaacaggatactccaacagtccccactccagggacgcgccctcattccattctgccacctgggcgtattcctgacccatgaacagcagcttctttccgggatgtcccatcataaaggcataggcagccctcaggttctcggccttcttttccagggtttcgcccggcatcttgccaatcatggaacccttgccgtgaaccacctcatcgtgtgagaataccagcacaaagtcctcgctgtaagcatacagcatggaaaatgtcagctccccataattgtttttcctgaacaggggatcgcatctcatatagttggtgaaatcattcatccagcccatgttccacttataattaaatcccaggccgccctctttcggatcgcctgtaatcattggccacgcagtggactcctccgctatgatgaccgttccgtccttccggcccttgaatacggaattcagatgcttcaggaattccattgcctccagattttcattgccgccatataggttgggcacccactcgccgtcattctttccatagtccagatagagcatggaggcaaccgcatccatcctgattccgtccgcatggtacttgtccgcccagaacagcgcattggcaatcagaaaatttgacacgccgggacggccgtaattgtatatcagggtgccccaatggggatgggatcccttcctggggtccatgtgctcatagacgcaggtgccgtcaaatacagccattccataggcatccctggggaaatgggccggcacccagtcaagtatgacgccgattccctgtccgtgcatataatccataaagtacatgaaatcctcaggagcaccgtaacggctggttggggcataataccctgtaacctgatagccccaggattcatccagaggatgctccatcacaggcatgagctccacatgggtatatcccatgtcctttacgtactccgccagccttggggccagctcgcggtaattatagaattcggaacccaccaggtcctttcctgtctcatccttgaccgtctccttgcggatccaggagcccagatgaacctcatatatgttcatgggcttgtcctttgtatctgtttttgccctctgatccatccatgacttgtcgttccatttatatttatcaatattccatacaatagacgcgttattgggacgcagctctgcgtagtttgcatagggatccgccttcagcatgggatcccctgctcttgtctttatctcgtacttatatatctcaccttcatgcaggccgggaatgaacagctcgaacacactgccgtccccttctcccaggcggcgcatctgatggcgtcttccatcccaaaggttgaaatcccccaccacgctgacgcgcatggcgcacggcgcccacacggaaaagtacacgccggatactccgtcaatggtcatgggatgggcgcccatcttctcataaatcgtatagtggatgcccgctgcaaatttcttcagatcttcttcccggtactggggagcaaatgaatagggatcatagagttcctccgtcaccccattgtcataggtgaccaccagggtatagggcgtcttgctcttgcgtggtatcagcgccgcgaaaaagccagcctcgtccgccagttccatgggatatttcttcccggttgaggaaatctttacactgatttcagccgcggtgggtaccagcgcctgaatcagaagtccctcctctgtcagatggggtcccagcatggcatggggattggatgcttccgaatacaccagttcttcaatccctgcccaatccatcaaatcatataatttctgttccatattattgcccccttgtaagtttattcattcttcggtctgatatcagcacgcccgctgtatatcctactcctaaagggtatttgccctctcagcaatattctgtctgaaattaaccacgtcatgctcgtattcttcatccataaggggagaagtaatcatgaaatccgcgctggccttgttatttgcaatggggatgtcatagacctgggcaatccttaacaaagccttaacgtccggatcgtggggctgcgctgtcagcgggtcggaaaagaaaataacaaaatcaatttttccttccacaatcttggccccaatctgctggtcgccgcccagagggccgctgttatacccctttacaggcaggttggttgcatccgtaatcatacgggccgttgtgccggtcccgcaaaggaaatgcttggacagtatatccttatgctctccgcaccactgtatcagttcccgtttcttctggtcgtgggcaatcagggcaatgttcttctgtttgcgtattgtcataggtaaataatccattttcatctgtctcctttcagtctgtcactttgttggcgatggttcctatcccttctatggtacactccaccacatctcccggaaccaggaatttaggcgggtcaaagcccatgcccactccggccggggtccctgtggcaataatggttccgggctgtaaggtcattccctgggagagttcgcttacaatgtggctgatatcaaatatgagcagttccgtattgctgtcctggcgaagctcgccgttcaccctggactgtacctgcaccttgggcggataagacaattcatccacagtggctatgcatggtcccatgggcaaaaagccgtccagccccttgccgaaataccactgcttatgccgtgtctgcagggtcctggcgctgacgtcattgatgatggtatatccgaatatatagtcctttacctcttcctctctgacatgggatgcctcgcggcctatgatgactgccagctctgcctcgtaatccaaatccgtcacaatatcccggtggctggggattcctgccccgggatccgtggcccggttcacccgcttggaaaaatagatggcatagggtctttccccgtcaaatgcttccttcttaaatctggctgattcctctgcgtgagccatataattgattcccaggcagataacatcctgccgcgggtggggaatcggagctaaaaggcttacctccccaataggggcagcacccctgaccttatacgggtcctggccggacgcgtattccagcagctgcttctccgaatcactgatggtctctatcagctcctgcatggacttataatccatatccagggaagcaaggggatagacccagcttccgtccctgctgatgactccaagtccggatttgtgttcgatttcatatgtaactagtctcataatgccctcctgctcataccattacgtgtatctcatgtttactctatcacatttttccgaatttttctacgattttgccattatttcagaaatcgccctttctccctgtcaggggtcttcttcctaataaatggattcccggagtatcttatgtatctggattaccagggtgggcaggaatgcggccgccgccagggtggtaagctggctcaggcttaagtcggctgcggcaaacatgatttgcaagcccggcacaaagagcaccgctgccagcaaaaccactcccagctggaacgccatgacgctgtacagattgcttcccagcccaagacgtatgatggagtggctgctccggcagttgaatccgtggaacagccgggccagggtgagggtggaaaatgccatggtacaggccctgcccgcgccgccctcatgaagtccggtggtataggcccacatggtggctgccgcaatcagggctccctggaccaggatatcccgtataaaggaggccgtgaggataccctcctttggatttctgggcggctcctttagaagcccttcctccgggggctccattcctatggctatggccggcagggagtccgttataaggttgatgaacagcagatgcaccggcttaaagggcagcggcagggacagcagagacgtatataatacgcagaaaatccctgccatatttcccgacagaaggaactggatggaattctttatgttcctgtatacattcctgccgttggaaaccgcctttatgatggtggcaaagttgtcgtccgccagtatcatggacgccgcatccttggacacctcggttcccgtgatgcccatggccacgccgatatcagccttcttaagggccggggcgtcattgacgccgtctccggtcattgccacgatatgcccccggttctgccacgccctcacaatgcgtatcttgtgctccggcgacaccctggcatagaccgaaatgtgctccaggttccggttcaaatcctcctcttccatgcggtccagctcagctcctgtcaccgccatatttcccggcgtaaagataccgatcctctctgctatggacatggcagtcactttgtggtcccctgtaatcatcacaggacgtatgcctgcctgcctggcgctggccactgcctggcgtgattccggtctgggcgggtccatcatggcggtgaggcccagaaacaccaggtcatcctccagcctgcctgacagggatgattgttcccggctgttcccggccttcgcctctgcatagccggaattgccgttctcctttcccgcctcatttaacggacggcatgcaaaggccaggacccggagtcccctggcagaccaccggctgttctggtccagtatcctctggcggtccgaggacgacaaggtccggctgggtatggcggccccggcccccggcccggccgttccagccttctgaccggctgccggattggccaggcgggtacatttcttgagcagcacatccacggctcccttgacaaagacgatatcgctgccttctatctcatttatggtggtcatgagcttgcggcgggagtcaaagggaatctccccctttctcggactctggagccggacctgttccgggataagccccgcctctctggccatgttgaacagcgctgtctccatagggtccccatcctggccggaggcgttgttattaagaaccgcagccataagcaggagcctgacatcgttccttcttgtttcattttccatccatgacggctgctgctgcgtatggttgatatacacctgctccacatccatgcggttctgggtcagagttcctgtcttatcagaacagatcacggagacgcatcccaggctctccaccgccttcagatcttttatgatagcctgttccctggccatcttctgggtgcccatggcctgaacaatggtgacgatggagctcagtgcctcgggtatggccgccacggccagagccacggcaaacatcagggcatccagcaccggttcccggcggtacaggcttagcaaaaacaccaggccgcagatggcgatgatggcaatggccagatggccggagaaccggtccaggctcacctgaagcggagtcttctgttccttggttccgttcatcaggacggctatttttccgatttccgtgttcattcccgtggctgtaaccactgccacggcgcggcctgaagtcaccagggagccggaaaataccatgttggtcctgtcggccaatgccacggttccctcccgtgccttcactgccccggtgtgtttctccacccccagggattctcctgtgagagagctctcattgacggtcagtccgtacacttccagcagtcttccgtccgcggccaccatatctccggtctccagaagcaggatatcccccggcaccaccagagcggacggtatggtcatgctgcgcccgtccctgaggaccctggcttcaggcgaggaaagccgctttaagctgtccagggatttttccgccttctggtgctggaccgtacccagcaccgcattcagcagcagaaccgcaaatatgaccatggcgctctccggatcccctgtgagcatggacacggcggccgctccgatcaggatgatcaccaaaaggtccttgaactgcgcaagaaatacctgccaccactggagccgcccggcctcctccaatacattttccccatattccttaagacgctgctgcgcttccccgctgtcaattccctgcctgccggagtccagtccggccagcacctctgcctccggctgttcaaaccaatctgccatctgtctctcccctcttaccgaattcatggttcttatgggcctgcgccagagcgtctgcttccccggcatcccccagacgccgcgtaaacagatataaaaatgctcccggaagcgcacacccgcgctggttccgggagcactccataagagtacccactctaaatctatgaattagtaagaatcattatgaccggccgtacccggccggggcgagaaagctttacagcctgtccttaaaatcaatctctgctgccgaaaatcatgccgaatgccaccttatagccttcctcaagggaatctgtctccacatattcctcccaggtgtgggcccctgcgccgcggaagcttcccacgcacacgcttggaattcccaaagacagcgggatgttgcagtccgtggaaccggcgcagtgtttcggcgcttgcccggtcatctcctccaccaccctgtgagcccagtctgacagggcctgttttcgtttcgggtccacctgcccttcgcagggtctgaccccgatgaccttaaaggatacatccatcccctctgcctttgcccggtcaaacacctccatgaactgccgttccatatattccaggttctccctccggtcggaacggaactcatacagcatctcggcttcctgggcaatggtattgaccgatgtccctcctgatatcatgcctacattataggtagtctttccgccctccggcacccggattccatacagcttccccaccagggacgccagtcccgcaatggcattatcatttccaaagtcatcgtaggaatgaccgccccgggtgcggacccttacccggaaacgcttggaaccaaccgccctgtccacgatgctggaaagagagctgtcaaaggtacaaaagcgctctatcctgtcaccgaagtcctcacagattttgtgcactcccttcaggtttcccagcccttcttcccctgcattgcacaccaacagaagtccgggggcatcctccctgcggatttccctccactggggggaatccacatgctcggctatatatttccccgccagcaaaagacataccagacatgctgtgtcgtcccccacgccgggacaatagatacgtccatcctccaccctgaggggaagttcgctctcatcgggaaacaccacatccatatgggccatgaacacctccaccggcctgtcctgccttacatccgccggatacaccacattaagggcctggtcaatatatacgtctctggcgccctgggctttaagccagtctgaacagaattcagcccgcctctcctcatggtttgagggcgccggtatcctggccagctccagaagaaggctgtaagcctcctgcctgtggttctctatataccgtatcatttcctctgacagtatcatttgcttcctcttcctttctttccccttttcctgctgcctttcccttggaagctttcttctgtgcgggaacctcctttcccatgagaaccacgatggtccttgccatgatcatcatggacttctggttctccagaaccggttcaccgccccggggatacatgccgttcacctggtcctcatccgtattaaaggctgtatgccacttaaaatcctttggcaggttgggaagggcgaactcatgaggttcccagtgcatgttaaatgcaacgtagaagtaatcgtcctcccttccgtccagcttcttaccgtattttccgcagtataatatgcccagctggcggaggaaacggtcaaacatgggacaccaggtcttaaggccgtggtaggacacgtccggcagacccacggagcggtaatccatcagagccggctccttctccatatggaacaccgagtgctcctttctgaattgaatcacatgctttacaaattcatggatgctgctgttggaatttaacaggctccagttaagccatgatatatcgttgtcctggcagtaggagttgttgtttcccttcttggtccggccaaattcgtctcccatcatgagcagaggagttccctggctcaaaaacagcatgagcagggcattgcgtatctgcttcctgcgcatctgcatgattcgtttctttctgctggggccctccgctccgcagttccaggattggttgtagtctgttccgtcccggttatcctctccgttggcctcattgtgctttatgtcataggataccatgtccatcagggtaaaaccattggtattggccatgtagttgataacgcccacctgctggggattatgccggatgtggtataccagacggttaagctggtcctcatccccttttagaaagctgcgcatatccatcatgaacccgtcattatattccgccagatgttttacctgccccggctccacaccgtcccacccgggcgccagcagcttcagcctgctgaggtaagggtcctcacccaaaagcttcacaggcgcgtatcccaccagacggacgccgtccacatggtattcctgagcccagaagcggaccacatccagcacataggagggcgcttccttcccgtcgaaaaacaattccaggaccagctccagtcctgccctgtgcagggccttcaccatatccttaaactcccgttcaggctgcctcacaggtccgctgctgtaggcacacttgggcgcaaaataatagcccctggtatatccccagtaattcagctttccgtccggtttttcagctgcaaaggggcttccgtccacacgctccggtatgattagctcctcaaactccaccgggggcatcatctccacagtggtgatccccaggtctttgagataaggtatcttctccgccacgcccttaaatgtcccccggctgtctccctccacgccggaggagacatgtttggtaaatcccctgggatggatgtggtaaatcacacactggtcataagggatgcaaggaaggacgtcttcctcccagtcgtacgcgctcccctctgtatccaccggtgtgcgtaccggcttgtccagacgcgccaggcttccccagcgctccatacccgtaaacctcctcccataagggtccggcacctgctgtccgtccacctcgtacacatactccagaccggaaaagtcgcccagcacagtcatgctccagacatctcctgttctggcatttgcaggaaacccgattcttcccttgggacttccggcccctttcctataaaaaacaacggcacaggcctcccccttggaggcgaaagaaaaatgcacccctccagagacagcagtcgctcccatcgcgtatatccttccatcattcctgtctatccggaatctctttatcatcgctgttaccgcctttcctaagacaatccttacatgataagaaaagtatatagttagttcgacattttgtcaataaatcaacactctttgtcagaaatcgtcatcttatttcacacaaaaaaactggttatcagaaaaatgtaactcatctgataaccagtttccatactgtgcctgctgttatttctgagcctctatctgctccaccagctcgttaagatacatccagcgctccattttctcctccagctgtgcttccctggcggacttttcctccatcagctcattgagcctggtatagttggtggcggattttccaatttcccgctctaaatccccgatggactgttccaggtcagcgatgtcagcctcaatggtttcccattcccgctgctctttaaaggaaagcttgcgcttcttttctccgccggccgactgcttccagttattccggttcacggaaaggccggacccgctgccatcgctgtccccgcctctgccgcctttctgctcccctgtctcccggggatgcctggcggaccaggcaatctgataatccgtgaatccgccctcatactggctcacctttccctgtccctcaaaggcaaagatgcggttcacaacgcggtccagaaaataccggtcatgggatacggctataacaatgcccggaaatgtatccagataatcctccagtatggtcagagtctggatatccaggtcattggtgggctcgtctaacagtatcacattgggcgcctccataaggatacgcagcagataaagcctccgcctctccccgcctgacaggcggcctatgatggtatactgcataccggaggggaacaggaaccgctctaacatctggctggcgctgatactgccgtcctttgtctttacgtattccgccacattcttaatatagtcaatcaccctaaggctttcatccatggcctcattttcctgggagaaataccccatcttcacggtctgtcctatctgtatggtgccggaatccggttccacccagcctgccagcatcttcatcagggtggactttccgcttccgttgggaccgatgatgcccacacggtcatttttcaggaaaatgtaggtaaagtcctttatcagcaccttgtccccgtaagccttgcacagatccttcacctccaccgtggtcctgcctaaccggctggctatggactccagctccacgttgcggtcatattccggccccttctggtccctcagctcctcatagcgctgtatatgggccttctgcttggtggaacgcgccctggcgccccgctgcatccaggcaatctcgttgcgcagaatcgcctgccgtttgcgctccgatgcctcggccatttccatacgctccgctttcagggacaggaagccctcataatttgcctggtagctgtaaagctttcccttatccagctccacaatgcgtcccgccacgctgtccagaaaataccggtcatgggtaatcatcataagggcgccacggaaggctttcagatattcctccagccagtcagccataccgctgtccaggtggttggtgggctcgtccagaatcagaaggtccgccgtactcataagcacgctggccaaggccaccctctttctctgtccacccgaaagggtggatgtcagggcatcgtgttccgtgataccaagcttgttaagcatgctcctggccgtggcctgcatctcatccggagaactgtaatgggtttccccggcattttcccgcataacgctttcaagcaccgtatctccctctgtgaattccggaatctggggcagatagcgtatgtagaggctgcggccccttaccacgctgccgctgtccgtatcttccaggcccgcaacaatcttaaggagagtggacttgcctgtgccgttgacgccaatcaggcctatcttctccccctcgttgatggagaaggatgtgtcgtcaaacagcagcctctccgtatatgattttgtcaaatgttcaatggtaaccagattcatcgtcttttcctcttattcaatcaccagctccaccggacaatggtctgaacccatgaccgtattgtggatggacgcgcttaccagtctgtccttaaggctttctgatacacaaaagtagtcaatgcgccaccctgcattcttggccctggcgctgaaacggtaggaccaccaggagtatatcccctccaggtccggatagaaatagcggaacgtgtccacgaagcccgctgccagaaggtcggtgaactttcccctctcttcatcggtgaacccggcatttttcctgtttgtcttagggttcttaaggtcaatttccttgtgggccacattcagatccccgcagaataccaccggcttgtttttctccagtttcttaaggtatgccaggaaatcgtcctcccatttcatcctgtaatccagccttgccaggccgtcctgtgaattgggggtatagcaggtcacaacataatattcaggaaactctgccgtaattacccgtccctccgtatcgtgttcctccatgccgacgccataggacacggacatgggttcctcctttgtgaacatggctgtgccggaatatccctttttcctggcatagttccagtactggtgatagccgggcaggtccagctcaatctggccctcctgaagcttactttcctgtatacagaatacatttgcgtccgcctccctgaaaaaatccaggaagcccttacccacgcaggccctgaggccgtttacattccacgaaatcaactttgtcatttctttatggctcctctccggaacatggtccgggaatgggtttcccggtgtgttcctgtgtcatttttaaacggctgtctactccggatatacaagcctggattccgggaactggtccacatggtacagtacatccaggtactttccggccaggaatctggccatacccaaattcatatccagataattgccgcagtcctctggcgatgccccgggcacctccccctcaaaatccctgataaactcatacatctccaccatcaggggcaggatatccgcggactcgtagtctccagccagcagcagatagaaaccggtcctgcaccccatggggccaaagtaaatgcactttttgccaaaggtgccgtgattccttaaaaaggttgcccccagatgctcgatggtatgcatttccgcggtgttcatcaccggctcctcattgggcgaggtcatcctcaggtcgaaggtggtcaccattcctccttccacctgatccttcctggatacatagactccaggctgcagcttattgtggtcaatggtaaaacttgtaatcttttccatatctgttctcctctcaatccgctccataatatccgttcagaaatttggcgcacgcctcatccctgtaattgtgtaacgactgaaaaggggcaggatttatccatcctgccgccctgtcactgccactatattaatcatctgcctcttcactctcagtcagtgtgaaggtaaatctcttacgtgccatctcgtcgctttcaaggtactcgtcgtaggtggtaatcttatcaaccagcttgccgttgatgatttccatgatgcggtttgcagtggtctgcactatctggtggtcacgggaggagaaaatcatcacgcccgggaacttaatcataccgcggttcaaagcgtcgatggactccatgtccaggtggtccgtgggctcatccagcatcagcacattggcaccggatatcatcatcttggacagcatacaacgcaccttctcgcctccggaaaggaccttcacctttttcacgccgtcctcgccggcgaacagcatacgtcccaggaaaccgcggacataggtcacgtccttctcaggagaatactgggtcagccactctacgatggtgtcgtcgttgtcaaactcggcgctgttgtccttggggaaatatgcctgtgaggtggtaaggccccacttatagcttcccccatccggctccatctcaccggacagaatcttaaagagtactgtcttggcccgctcatttggtcctaccagggcagccttgtcctcgcggcccaggatgaaggagatatcgtccagtatcttttcaccgtcaatggtcttgcttaagtgctccacggtcagaacctcgttgccgatctcgcggaaaggacggaaatcaatgtacggatacttgcggctggaaggacggatgtcgtccagctcaatcttctcaagggcccgcttacgggaagtggcctgcttggacttggaagcattggcggagaagcgctggatgaattcctgcagctccttaatcttctcctccttcttgcggttggcttccttcatctgcttcacaatcagctggctggactctacccagaaatcgtagtttcctgcgaacagctggattttcccatagtcaatgtcagctatctgggtgcagaccttattcaggaaataacggtcatgggataccacgataactgtgttctcaaagttaatcaaaaactcctccagccacgcaatggcgtccaggtccaggtggttggtaggctcatccagaagcagaatgtccgggttgccgaacagggcctgggcaagaagtacctttaccttctgagcgcccagaagggagcccatctgcgcatagtgcaggtccggctcaatgccaagtccgtttaaaaggctttcagcatccgactctgcctcccatccgttcatgttggcgaattcaccctctaactcagcggccttgataccgtcctcgtccgtgaagtcctccttcatgtagatggcttccttttccttcattatctcatatagtctcttgtttcccatgatgaccgtatccaggaccgtgtactggtcatacttaaagtggtcctgctgcaggaaggacagcctctgtccgggggtgattatgacatcgccgctggtaggctccaactggcctgacaggattttaaggaatgtggactttccggcaccgtttgcgccgatgagtccgtagcagttgccctcggtgaatttaatattcacatcctcaaacaatgccttcttgcccacgcgaagagatatgttgcttgtactaatcatgttcgttacctttctcttaatctgttctgttgatatttctagtaaaagaggggtcatgtaaggcccctctcacgctgtttactcaatatcagattgtacagggaaaacacttattttgcaagggtttttcgcaaaattatggcggcagcccgtctatttcgttcctttaatctccaccggatagtttactccctgggaattcacataggtcacggtcaccttatccccgctgtcccctgccagggccccttcctctatggggcagttatcctttaaaaagcttaactcctgtccgtcgtctgtcttcatggtaaagctgctcatcgcgttagccgtggtggtgcctttctccgtaaggatactccactcctcctgttccggaagagccaccaccagggtcacgtcctccggcctgcccaggggctcccctatatacgcaatggctatctgcacgccctcaacaatctccacctccacgtcccggatatccgactgactgatgtcatagtccctgccgtcgtccgcctgaagagtgaacaccgctccatcctctgtcacctttgtgacggtaccctgaagcatatggtatacttcctttgcctcagccgcctgctccgttgtctccggggccttggccgtggtctccggcgctttggtggtctcctcagccgaagcctggctggtaacggtctcagatgtctccaccgccggttttttggcacagccggttcccagcaccattgccgcagccagtgcggcggctgttatcatcaatgaatgtctcttcatattacgattcctcccgtcttatatcagattacctatgaagcttaccatcatattctgttaatttcaataaagattcccttaattttcccggtatcatatccagtaccccggacaacctcatgcccagaatccccggcagatgccgaagacacaggagtatgaccagacgtctggccgcgggcgacagttccatggcggttccttcctttttttctaagtataccctggacttccatagcccaaacttccatgggaaaaacattcttgtaaccgatagtaccagatgctataatattataaaagattgagaggaggttgttactctgacatcatgcgtgtcatattccgtgagctggaactgaggcagctgtccaaccaggcctttgtcatcaatgaaacccgcaaattttgccagctcttcaccagcagcagctatatattccagaggccatgagcgcagcatcgccaaaaaggcatccccggccacgttgttatggtcctggatgcctcttaagtatctgcctgtggacattatattgttcaaaatcaattcagcaaggccccataccgccccaaaaagctctgggtcctctcattatccgaagcaaacacctgctccggcgttccttcctccacaatgacgccgcccgccatgaacaccacgcggtccgatatatcccttgcaaaggccatctcatgggtgactatgaccatggcgatgtcaaggtctgccagggacttaatcaccttaagaacctcccctgtcagctccgggtccagggctgaggtgggttcgtcaaaaaacagtatcttgggattcagcgccaatgccctggcaatggccacacgctggcactggccgccggacagctggcatggaaacgcattttccttgtcctccagccccatcttcctgagcagtttcctggcttcctcatatacctgcgccttatcccttttctgcacatgaatgggagcgtccgtgatgttcttcatgacagaataatgggggaacaggttgaaattctggaataccaggccatactggctctgaatttcctttaaatccttctttgacgcgtacacggcctttccgtcctctgtccaggccgcccgctttcccaggtatatcacttccccgctgtccatggtttccagcatggtagcgcaccgcagcagggtggattttcccgaaccggaggggccgatgacagacacgatttccccctcctccacactgagggacatatcctttataacacccaggccgtcaaacgacttttccacatgatttaattccagcagcttcataatccacaatcctcctgttcctaacggtaataatccatctttttctcaacccactccattccaactgccactaccaggttgaaaatatagtagaacagaccggcggccacaaagggaatcatgttggtctgggacgctgccagagccttggctatagagaacatctccgccacgctgagggtaaaggccagggaggtgtccttgacaagggtgatgacctcgttggttacagacggaagaatccgtttgatgacctggggcagtatgattttgaaaaaggtctggaaccggctgtagcccagaatctgagccgcctcgtactggcccacaggcatggactggatgccgcttctgtagatttcagcaaaataggcggcatagttgattacaaatccaatgaaggtggcccacagccggtagccgctgcccaccttgattcggaacagataataggggccgaaatacaccaccatgagctgcagcatcaggggcgtgcctctcatgatggatatatataccttgacaatggcctgaagcagccggtttttggacatacgcccaaaggccaccaaaaggcccagtggaagggaaaatattagtgtcaccaggaatatctggatactggttcccatacctcctgccaactgaatcaacatctgctggactgtcattttacccataacttcatacctgcctttaacatttatgccgtataaagccgctgttaaacgagctgccgccggattatccggcaggacagcaggtccagacagcggcctttattacttaccaatcgtagttacgtcctcgccaaaccatttctcagatatggacttaagtgtgccgtccgcagccatctcttccagggtagcctgtaccttgtcacgaagctgtgtgttgcccttcttaaatccaactccgtactcctccgcggacaggctgtcctccaggataacaaagtctgcgtttctctgctggatctgatatccggccacgattacgtccatggctatggcgtccaccgcgccctgctccaaatccatgaaagctgagttataatcagccgtggtgagcagttccttgaaggtagctgtcaggtcgggcacctcctttaacgccgcctccgcggaagaatccacctggcactccacaatcttgcctgccaggtcctcctggctggctatgccggaatccttggccaccacaaatacctgggtgttggccatgtacggctctgaccatgtatagtcgtcctcacgccctgtcatggtaaatccgttccagatacagtcgatgttgcctgcctccagctccatgtccttggaatcccatgcaatgggctgtgccttgtactccagtcccagacgctttgccacttcctgggccagctccaggtcaaatcctgtatactcaccgtcgtctcccatgaatcccataggcgggaaatcctggtcaaatccgactatcaatgtacctccgccgcttccttcggcggcctctgacgcggtttcgccctccgcctttgtctccgcctctgcggctgcgtcctcagccttggcagatgtgtccgctgctgcctgttcggtttctgcctttgtccctgccgctgtagctgcttcctgtgaaccgccgcatcctgccagggataatgccatcacagatgcaagggccaggctaaaaagtctctttttcataataaacgtcctcctctttttccgctgtttcgggtccagcggctccttacggtcttttgacacgctatcatattagcatactaaagcgcttgtgtaaaggacattttatatggcaaaactgacaaagatccgcgtcacggtccccctcccagaaaatcagggcaaaacaggagcctacagcagattcataagctccttaaggctccccacttcataatccgcccgtatgccctcaggcagcgccttaccgccggggttataccagcacgtatacgtgcctgcgaccattccgcctttgatatcggacgcaggtgaatcgcctatgagcagcatacgccgcgggttggcatccggtatcctggaaaagcagtaatcaaaatattccttctgcggtttctggctccccgcatcctcggacacaaatatatctttcatgaagctgtccaggccggaagcagccagccgcttgtactgggtggacgatgtaccgttggtaaccacatataaatcatacctgtccttcagataggcgcacagctccagggctccgtcaatcaaaaaggcggatgcgtccagctgcctccggtacagctcctctgcctcatggccgtccaccgccctgcccagacggtcaaaaaaggtctcaaatctctgccgcaccaaattatccttggtcacttccccccgctcaaaggcggaccagaatccctcattgatttcatggtacagcaaaagccgttcctctgtgggctcaaatccatactgctcaaggactaccctcatgccctgcctctcagacatgccaaagtccaaaagagtaccgtccacatccagaagaatcacatcaaacttccgttccctgctctccatagaccacctttcctccgcaaaccgtgtacattactttgcccgtcaatgtctcgcccaggaaggggctgttggctgacttggattcaaacccttccactgtccactgcctgtccgcatcaaacagcaccaaatccgccggcgctcctggttccatgcgcccgcagtccagcttatacagcctggccggattaaggctcatcttctccatgagctccaaaagcgtgagatggcctgcctttaccagattggtaatccccagggccagggcagtctccagtcccagtatgccgctgggcgcctgggtcagcggccgctccttctcctccctgctgtggggcgcatggtccgtggcaatcatgtcaatggtcccatccttaagtccctcaatcagcatctgcctgtctttctctgtccttaacggcgggttcatcttagccagggttccgtgctttaacacggcttcctctgtcagggtgaaatggtggggcgtcacctcggcccatacctttgctcccagcctcttggccaggcgcaccacctccacagaatgccctgagctgatatgctggatgtccacggttgcccctgtatccagggctaccatgcagtccctggccaccagggaatcctctgccagtgccggagagccgtagattcccagttcatccgaaatcctgccgtggttaattccattttccctgataaaatgcttgtcttcctcgtggaagctgagaaccgtatccaatctggccgcttcctccatggccgccctgacaaacgcgccatccataaggggtattccgtcatccgtaaatcccgctgccccggcagccagaagtccctccatgtcggtcagctccctgcccgcgaatccctttgacactgcggcgcagcttaacacatggatgcctgtcttttttccctcttccagcacatagcgcagggtcttctcgttatccacaatgggattcgtattggccatacacacaaccgtggtgaaaccgccctttgcagcagcccttgcccctgtatggatgtcctccttgtatgtggggcccggatcgcgaaaatgcacatggacatccaccagtcccggcgctgccaccagtccctctgcctcgattatctgccggtacgtcctctcccgcgggctaaagccgggcgctccctccgctccgccctggtccgccggaaatatcccggcaatcctgtctccgtccaaaacaacatccgcttttatatccagcccttccgcgggtcccaggacccgtcctgcgcgaatcaaaatcatattccgttcctctctttattccatcctttatttcgttggcttctcagaatccatgtccggggcgtgtcggaaagccgttctcccgctgtctgcctgtcacaccaggaattcctctccccgcctgtgtatctcctgtattctgtccttatacccaccggcgcaggccagggccttaaatctggcagccgcctgaaagtcctcccagaaatgcatgggaaacaccacgtccgcccccaccattctcataaaatcatccattcccaggtaaaaatccttctcctgtctggggtcaatgagcataaaggccacatcgatatggcgtcctgccagcttgtccatttcccggtgaaaactttcactcatcctgcggttgtcggcctccggctcgccctcccatacccaattgttcaagtcccctgcgtggtaaatggtcctgtgctccaggctgaccaggaaggccaccccttcgtccgtggacttaaacgcctggatatccaccggattcccggctccgtccttcaggctcacttcctcccccggtcccaggaatacggttctgcccagaaggtcctccggcacctgccttgtccagatatcgtcggacagcacataggtcacattcccgcggctttcctccaaatcaaatatggaacgggaaaaatggtctccatgccggtggctggcaaacacaaacaaaggcttctccctgtctgtttccggaatgtttccctcaaaatagtcaaacagaagtacggcatggtcaagctccgccataaaactgctgtgatggatataggttatcttcatatcggtcatctcccatccgttcttatatgtctaatagtaacataaacagcaatccccgtatagttattttattccattttcctccaataaatatgtccagattcttatttttcagccgaaagagaagaataaaacaggcggtcatgcgcgaaatcagggaagccgcagcggcacccgccacaccccaacggaatacaaagataaacagggagtcccctatgacattgatgatgttcatgatgacggacgttttcttaaaaaagactactccaaccgccatcccccgtcaatctgtaatttacccaaaaaatcaggcactcaaatggcctccccgtcccctttccacaaatccggtgttttcctaaaactacagcccgtaaaataagggccggcccagccgcgggatggcgcccacgggccataaacagcgcagcgcccagagggaccagaaccgcataacctgtggacgaggctatgttggacatgattcccagaaacaccaccacggctgcggcgctttgtcattttgacaaatacaatcagccgattcattgtttcaaaatgctttgtgccttaaaatacaagcatgcaggacatgggaacgtgaaacgaaatattagtacaaaaattcagcaaaaaaagcaaaagaaggtaagaaaaagggggaaacaatggaggggaagaaaaaaggtctgtctctgacaacacaaattctaatcgctgcagcgggcggtgttgtctttgggtctctgattgggccatgggcctcattaggctttgtatccacaaatatcatcggctccatggctgacagcgctatggttccatgtattgtcttcgcattgttctttggcacagccatgggtacatatacacgccagagcggcaacagaaacttggttgaatgggtaaccggttttaataccatcattaccaatatcatcaaggctgtcatgcacgttgcgccaattggaatcttctgtctgctggcaaacgtggcgggctccaccggcttcaaggtcattattcctatgattaaattcctgggagtattgcttctgggagacgctgtccagttccttatttatgggccgctgacagctgctctctgcaaagtaaatcctgcaaagatgcctaagaaattcgctaaaatgtccatgaacagctgcggagcggccctttgttatgtggctgcaatcttctttatggcacagtccacaggagtccagctgaccacctatcaaatgggaatggccatcctgctgtcatgtctgatgtgcatgggaactatcgttgtaccgggaggttccgtaatcgtttataccttccttgcctcctcgctggggctgccgctggaaagtatcgctatccttattggtattgactggttctcaggaatgttcagaacacttatgaacgttgacgttgatgtcatggtgggcatgcttgtatccagcaagctgggcgacctggacagagatgtgtataatgagacgaaggcagtagagtactgaattttaattaaaaggagcgtgtctgcggctcattcctctcacggtaatatcaaccgtgggaaggatgagccgcagacacgctttttgcattttatcacagcttctgccttatggcctgctcctgttcatcaaagagcagatccttattgtactggtaatagcgttcacactcatattcatccaggaaccggacacacgcttcgctggtattcagctccgtgacaaatataaccatttcctggccgtttccaaaggcagcttccatgaagtcaaaggcgtgttccagacggctgccgcagtcctccttcatggcctcatagcagtcgctgtgctccatgaattttgtgcgcacccattcccaggcctgctccctgtcctcaacggcttcctttctcatctgctgggcatattcctccagcatgattcgcacgctgagccacaggcggtcctcccgccttcctgacagtccgcttttcttcctgcgaaaacgctcctcctccagctcctgagccagggacgccagaaccatggcaggcgcttcggatttatccggtattgcagatgtttccgccctgccttccatctcctggcggtaactcttaagctgctccattagaagctccatgaaggcattcttatcccacagcttcttaaacccttccgtcagcttggacaaaatcaggcatgtaacgctgagacgctcatcaaagggcgccctggcaacccggccgcacaatgcctcccgtatgacgccctgcaaaatctcatccacctgatactcattctgatatttataatacagctccagataattggcaaaatcctttgcgattctggggtgctggatatactggctgatcacatccctgtcagcccttttgtccagactctcatagaccagaataagctgggataggtcctcccaggcccttggggtggcgaacagctttccgtccactgttgtctctatctggcagaaattctgtcccttgatgttcagataggagataatggccggatggatattctcagcatatgcatactccttccacacccccaaatccggttccacgtcaatccgcttgatccggtccagggtgaccacatcgaattccctcacagacttgttatactccggcggattgccggcagctgcgataatccagccctccggtatcttatggcttccgaaggtcttgcactggagaaattgcagcatggtcggagccagggtctcggatacgcagttgatttcatcaataaaaagaatcccttccttaagacctgtttcctccatccggtcatagatggatgccacaatttcactcatggtatactccgtcaccgcatactccctgtctccataagtctttttctcgatgaagggaaggcccaccgcgctctgtctggtgtgatgggtgatggtataggatatcagtccaatcctgcattccctggatatctgctccattatctgagtctttcccactccgggaggaccgatcagcagcaccggcctctgccgtatggatggtataacgtactctccgttctcatcctttaaaaggtatgcttcaatggtatcctttatctcttccttagcccgcttaatattcatgtcctgttctcctgctctgtgggataatcaacgcatccctgcttctattgtccatgtccgttcctttttcccggtctgtactccataatctgttcctcctccagcaccaccttcatggcccagggagggacggattcatcggaaaacatattctctatgaacacaaaggccgtgtcgtaggagggggcctgaaccggatagattcccttgccgtccgtgaaataaataagcccctttagggaggctgcctgacggcttttcttaagcccgttcacatattcaaatgccggtctgaaatccgttcccccgcttcctctaatctcgaaatcatccatataagccttcagttcctcttggcttgtgaccagcacgtccgaccgcaccgcgtcatcacactgtatgatgtgtaaatggaccttcttaaaataactctcagtctcagacagcacgtcgtaagtctcttccaggaaccgtcttaccagctccccggaacaggacatggacgtgtcgatgacaatggcgaaatcctccacccggtatacctctctggactccaggggctcgatgaggggcatatttccgtagagggacaagccgtaggtatagaacgcgtagtcaaatgaatccgggtccacctgcatttcttccttcagaaccgcaaacttttgcagaaaccggctgtagtcgtatctctcccggttttccacccgcacttcctccagcaggctccggttgtcctcagacgcgtcctttgaaccggtttccagctccgtctgcatcttttcccggttatcattccactcattctgcctggaccgggcgattttggggctgtcctcctgctcccacagatcatggctgtccacgaagaattccgccttcagcatgtccaggcggcgttcaggaagctccatctccaaaagggccctgtaaacccgctccgctgtcaggacctgccctttttccgccagagccttctcaagcctgagatacatctccctcctgagggcgctccttggcacatggacacatttctgatataatccgtcaatgacgtactccatggcaatgtcgcaggacaggtcccagtatcccttatccctgcccttacgtgtatacatatgacaaaacaggcagtggaacagcatatggagatacccgcggttcaccagcgtcctgccccttttatacaggcccagcagataatccggcccatagtagatcagatgcccgtccgtccccagtccctcccttgcccagtcagcctcaaagcccagactgctgagggacacatccagaaatttcatgtttacatacagctcgcttctggcctggcagagaatcctggcgcacaatgtcacctggtccagctcctccagctgcctttttctggcagggtctgtcatgactgctgccctgccgtcatggtctcatgttcttcctttaattcctggtacagatggtagaaggtccagtcactgttatgttctgtcagcactgccttcagggcaatcctgggcacaccggccctgcgcagtccggacagcagcatgtccagtctctggctggagaactgttttaataccaagacctcctccggtatgaccggaagttctcccggaacagccccggcgctttctttagcggcctcatagccttccatcccggcaagatatccaaccttctccaggacctgttccggtcctatattctttatgcgcacgcccatgcggaccagtacgctcttcatcatagccacatgcttcattgtctccggtctgcccggattatagtacagcacagtctccatcatctttgccatgtcctgccatctcctttcatcagggcctgtttacagccccttaccgcactaagtcatgcgccgccttcccggtgtcagttcttcccgctgtctactctccaaacagctcctggctgtcaagcatcagggtaaagggtccgtcattgagaagctctaccttcatgtctgctccaaaccgtcccttttccaccacatccacatgggtcctgcaccgctccataaaatgcttgtacagggactccgccatctggggagctcctgcctttataaagctgggcctgtttcccttgcggcagtccgcgtacagggtaaactggctgaccaccagcagttccccctccacatcctccagtgagagattagtttttccattttcatcctcaaatatccgcagacggcaaatcttatccgccatcttctcagccatctgcctggtgtctccgtccgccactcccaaaaggataaggaaaccttttccaatccttcccaacaattctccgtccacggtcacgctggcctgcgtcacccgctgtaccacagctctcatatgattttatctccttttatctcagcatcattttcagatattccataagggtctcggtggcttcctccctgtagagtatctccctggcccgcaccggataatccgtgatgatattgtccacgcctaacagtttcatttgttctatctctgtcttgctgttcacggtccatacatggaccgccttgcccttttcatgggctgcttccaccagtttcctgcccacaaagctggaacggatgctgatgaagtcaatatattcattatcgtaatacgttccgtaggcagccgccaggatgtatcctgtcctcagctcaggagccatctccttcacccgctccagatatcccagcttaaccgaagtgatgacacattgctcctccattccatattcccggaccagggcagccacctgctccggcagactggaatcattccctatattcttaagctcaatattcagcttcatgcggcccttgcaggcttccagcacttcctccagggtgggtatacgctccccggcaaacttcgggctgaaatggcttcccacatccagcctgcttacctggtcataggtcatggttcccagcctgcggtccacccctgccacccgcctaaggttcagatcgtggcataccaccacgatgccgtccgcagttgtctgtacatcaatctcactgtaatccgccatctcttccatggccgcctcaatagccgccatggtattctccggggccatccgggaacttcccctgtgggccgttacctctgtctgccccagcacatcccagtcaggggatgttccgttatataccatatcgaatatgagaaacaggctggctcctgccagcgcccctgttatggtcagtatccattttctcttaaaatgcagctcatagggcatggtaaaatcccagggcgctccatgggcacctttcatgccatactggtaatatatcacggtcagggctccaaagtccaccaggggagccaatattcctccaatgaacaggaccaccagctccagtctggcgcacacggctgacagaacagccatggccgcatagctgtccacaaacagggtgactatcacggcagatatcaccacaatgaccacgtatatgagaaccagtcccacagccagccccagattcaccaccaccagcaggaccaccgccctgaggctgcgtccctttaagagctccatgctccttctgaagccgtcgccaaactgcttctgctcaatcatgcaggcaaagaacaccagcatggtaggtatccctatgagcaccagagcagccgccagcagtaccagccccagccgggcagccggcgcgtgcaggatttcgtacatgacaaaattaaggggttttatccttgtgagaatccgcagcagcagatagctgttcatcatcagataatcagccagagccaggggcagaagcttccagttcctgcccttacacgcatcccatgccttgcccagcgcgccctttaaaatgtacacggaatccacccgcatggaataggccgcagactggcaggcagtgataaggcccccgatttccaccaccatgagcaccatgcccagcgccgccgctgccagggcgcagacaatggttgccgggcgcagaagaaaggctcccatattactcatggtcagataactgtatcctgccatgcgcaacgagaaccttaggagctggtttaccagcctgatatagaatgtgcctgcaaccagccggaacaatacttcaaaaattaccagctggcgcaggttcagtttaattacctggtctgtctcttttatcaatcggttcacttaagattcttccgacctttccttctgctccctggcaaatgccgtgatggcctcgttaagcgaaaacatcttggcatccagcatatccaccatatcggcgcaggcctttagttccttcagcaggttctccggggcatttccctcgaacttatacgcaatcttatgttccaggctggcccagaaatccatggcaacggaacgtatctgaatctccaccttggtctccaccggtccatccgtgagatagaccggcacagttactaccatatgataactcttgtatccgttgggcttggggttcttgatataatcctttacatgaaggacagtcacatccccctgagccgctatcatgtcggctatctggtagatatccgacgtgaacgaacatataatcctgataccggcgatatcgctgaggcattccatcatattctcaatggtcacctcatatccgtccttcttaagcttcatgacaatgctttcagctgacttcagtctggatttgatatgctcgatggggttataatcataacggttggcaaactcgttatttaatatttcaatctttgtattgaccttttttagtgctgaatcatagagaaacatcactgaacgccattggtcaacctggtcgtccgctttggggatattggtcattcctatccctccttaccttaagcctagagtttaagcccctttaacaggtcgcctaaccctgtggataccgtaccggtctccttgtagtcaaatgtctcatgctcttctctgtctgcctgctgttctgccagaaccttcatgctcaggctcagcttgccctcctgtgttgagagaatctttaccttcacggtctgtccctcggtcaggaccgcgctgggatgcttgattctctgggtgctgatctgggaaatgtgaagcagtccgtccacgccgtcgtccagcttaatgaaggcgccgtaaggcttgatgctgtccacagtgccttccacgatatccccggccttgaactgggccatgcgctccttcttctgcgcttccttcttctccttctccacctcgcgtccggaaagcaccagtctcttcttctccggatcaaccgtgatgatgacagcctccacatacttgccctgccagtcttccagtttctccacatactctgtggacagctgggatgcgggaatgaatgccctcacttcctccagggatgtgaccacgccgcccttcactgcctcggcaatcttaaccttgacaacggtcctgtcctccatcatctgagcgaaccgggcccatttctccccctcgccgctctcctcctcggcaatctcgatgtgtctctggttcagggtcttataggaagcctccagttcggccgcataatcctccatggtctccacgggcgcagcctcctttacctcttccgtcacttcagtctccagctctttgttcagttcttcactcataattactctcctcgccttctgtacattttaccaaaatatattccttaccattataacaacaacccacctaatatttctatagttttatgacgaaaattataccttttttattttttatcctctttttacgccttttcactgtcctgaaaatatgatatgatgcattcagcggctaaaatgtctcaatgttcgctagaaaggacctgctttccatgatagatttactggacctgcacacacatacaacggccagcggccatgcctataactccctttacgagatggttcactcggcttcggccaaaggattgtccctgttcggatgctccgatcatgcccctgccatgcccggcagctgccattccttccatttcatcaattttaaagtcctgccaagaaccctttacggcgtcaggctgatgatgggcgcggaactgaatattatggattatgacggaaccgtggacctggaacagagcgtcctggaacccctggactatgccatagccagcctgcaccagccctgtatccacagcggcacggcgcttcagaataccaacgcttacctgggggcgcttaaaaaccccctgatccatattatcggacatccggatgacagccgtttccccatagactatgatacactggtggctgccgccggagaacaccataaacttctggaggtaaacaacagctccttaaaccccttaagcttccgcgtgggagccaggaataattatataaaaatgctggaactgtgcagacactacggcaccagcatcattataaacagcgatgcccactgcgaagcggacgcgggcaatcacgcctttgcccacgctctcctggaggaagtgaactttccacgggagctgatagtcaacacctccctggaccggctgtgctgctttcttcccaaagcagccgccatcctggcccagcaggaggatgagcgctgcggtcacctgtaccggcccgttacaatggaggaaggaaacgctccgggaggaaatgagtcatgattaatttcctgaacctggaatatttcctggtggctgccgaggagctcaattttacccgggcagccaggaagctctacatctcccagcagtccctgagcaaccatatatccaacctggaaaaggaatttgacgtgattctcttcaaccgcacctcccctctgactcttacctatgcgggaagggccttaaagaccagggccagggagcttctggatctgcgggatgagacctacaaggaaatctccgacataaaggacttctccacgggacagctttccatcggcgtatcccatacgcgcggcagggtcatcctgccggaaattctgcccacctaccagtcccagtttccgggcatcgagcttcacctggcggaaggaaattccagccagctggcctcagacctgctccacggaagtattgatctgatgattgacctgctgccctttacagcggaaaatgtggagacagttcccatctgtaatgaagagatcctcatggttgttccggatgacattctggaaaaggcatatccaggccaggtggaggaaatgaaggaaaagctccgcgccacctctgatatccggattctggagcactgcccctttgtactgctaaaaaaggggaaccgtgtgcgcaccatagcggatgagattttcgaggatgcccagatgagcccccggatcgtgctggagacagaaaacattgaaactgtgctggctctcagcggcaagggtatgggaatcaccttttatcccaagatgttcatgtccccggaccctgcctcccgttcctaccgcagcgcggttctggagcagaaccacctgaacctctattccctgaactacacgcgggcccacggcgtcctgggaatcggctaccacaaaggccgctacatgtcccgggctgcccatgaattcatacgcattgccaaagaacggctggactacgcaccaaaaaaataatgcatcatgcctgatatatgtatgatataccctgtttccttcataagctggatgcagggtattttcaacccttgacagggtatccatcctctgctaaaatataaacagtaattattattattatctttataagagaaggagatgcgatgaaagctctaaagtatagccgtcagagggaatccatcaaagcctgtctgatgaatcgtcacgaccatcctacggcagacgccctatacgccagcatccgtgaagaatttcccaatatcagtctgggaacggtttaccgtaacctgaatctgctggctgagaccggcgagatacgaaagctgacctgcggggacggtgctgttcactttgatggagatacccgtcagcattaccattttgtgtgcagcgagtgtaatcaggtttacgacatggaattaggcgccatggaggacctgaatgaggaagcccaggaacatgcgccaggcatcattgacagccactacgtactgttctacggacggtgcaacagctgtttacaaaaaaaagttgataaagctattgacaaaccagcctaaatgatttatattgatatcagtaataattactattattgattatcagcaacatgtcaggatgaccggacatccattgtccggctcctggtcatcattataaaaaggaaaaggagaatattgattatgaagaaatgggtatgtacagtttgcggttatgtttacgagggagagaatgcacctgagaaatgtccgcagtgcggagttcccgcttccaagttcaaggagcaggcttccgagggaatggcatgggcatgcgagcatgaggttggcgtggctcagggcgcgcctgaagatatcatgatggatttaagagctaactttgaaggcgagtgctccgaggtgggcatgtacctggctatgtcaagggttgctcacagagaaggctatcctgagattggcatgtactgggctaaggctgcttttgaggaagcagagcacgcagccaagtttgccgaactgttaggcgaggttgtcacctcctccaccaagaagaacctggagatgagagttgcagctgagaacggcgctaccgcaggcaagttcgacctggccaagagagcaaaggctctgaatctggacgcaatccatgacactgttcatgagatggctaaggatgaggcccgtcacggcaaggcatttgagggtctgttaaacagatacttcggctaataaacagccgctatccggcttatgacttttacagaatcaggagaagatcgcgatcttctcctttttatcgtctgaaatccactggcccggaatgtgtccggcactcgctgttttctactgcatgcggcaattgtcatagaatcttcataattaaagccttgaacccattatccatctgtgctagactaagcacgaaaatgcttgaaaaaatacctgctgtgggaggtcctattattgatacagaatgtcctttgttttcttgaagaatccgcagaagcctatccccataaaacggcttttgccgatgaacatacaagccttacctaccgccggctgtcagacctgtccatgagaatcggcagtgttttgggacagaaaacaggcccgcgccgccctgttcccgtgctggcagagaagaatgtatttaccctgaccgcctttatgggcattgtccgggcgggctgtttttatgtcttcctggacgcaggccagccgtccgaacgtctgaaccggattctggacaccctgcaggcggaccttatgattgccgataaggaaagccttagtctggccggccctgtctccttttcaggggagatactccccctggaggacttaatgtctctgccggatgacgccctgaatcccggtctccttgcatccatccgcaggcagtccacagatacggatcctctgtacggtatctttacctccggctccaccggcgtacccaagggtgtggtggtaagccaccgctccgtcattgattttatcgggcattttacggacctgttccatataacacaggatgatatcatcggcaaccaggcgccctttgactttgacgtatccgtaaaggacatctactctgcccttaaaacaggagccacactggaagtcattccaaagaaactgttttccatccccaccggccttctggactacctgtgtgacaggaaaatcaccacggccatatgggctgtttccgccctgtgcatcatcaccaccctgaaaggctttacctaccgcgtgccctctcatctgaataagattctcttcagcggggaggtcatgccggtaaagcatctgaacacctggcgcagctgcctgccaaaggccctgtttgtaaatctgtacggccccacggagattacctgcaactgcacctactatgtagtggaccgggaatttgaacccggaacgcccattcccatcgggaggccatttcccaacgaaacagtatttctgctggatgaaaataacaggctgattacagagcccgggcaaaacggcgaactctgtgtggcaggaaccgcgctggctctgggctactacagggatccccagcgcactgccatggcctttgtccagaaccctctcaattcctgctatcctgagaccatatacaggaccggcgacctggcctgctacggcagggacgggcttctgtatttcaacggccgtaaggattttcaaatcaagcacatgggacaccgaatcgagcttggcgagattgaggcggccctggaaaccgtggagggcgtggacagggcggtatgcctgttcctggaagaaaaaaataaaatcgcggccttctatgagggaaccgcagtcaaaagggacattgccattggcctggaatctcttctgccgcgctacatgtttcccaatttatacagaaacctgacggaacttccccgtaccaggaacggcaaagtggaccggcaggcgctcaggaggctctatggataaccatatattgcaggaagctgcccggacatacaatacgccgtgttatatatttgatttagacgcgtttatctcgcgcatccggcgcatggaacagctcctcggaaaacaggtgaacatctattacgccatgaaggccaacccattcctgacagctgccgctgcccgggctgccggcggcctggaggtctgttccccaggagagtatgatatctgccgccgcgcccgtgtgccggccccaaaaatagtcctctccggggtcaataaggaggaagcccacatccgttgggtcatggcggagcagggagccggcacttacaccgctgaatccttaaatcagctcagtcttttggaaacctgtgccgcagcagcaggccgtaccggggtcagggtgctggtccgcctgaccagcggcaaccagtttggcatggacgaggaggatatccttgcctcaatccgtaaccggggctgctatccccatctggacctggcaggcctccagtactattccggaacccagaaaaggggaatggaaaagataaaaaaagagctggaaaaactggattcatttctggattttgtcagggaacatatgaattttgagttccgggagctggaatatggccccggtttccagataccttattttgaaggacaggagcagacggacgaagaaactcttttgcaagaattcaaaaaaattcttgattccctgaatttcaaaggtatcatttttctcgaggcaggccgtttcctggccgctccctgcggcagctatctgacccgtgtggcggacgcaaaacgctgccagggacagaattactgcattgtggacggcggcattaaccacgtaaactactatggacagaccatggccatgaaggtgccagcttaccggtatctgcctcaggacaatccggcccggccccccgcgtcccaaacctccggcgatcggtggaccgtgtgcggctctctctgcacatcgggagacatacttgtaaaaaatcttcccctggagggcctgatgacaggggatttgctggtatttgaccgcattggcgcttattccgttaccgaaggcatttatctttttctgagccgtcagcttcccgtagtcctcacctacacacagaaacaggggctttccctggtgcgggacgccttccccacggatatactcaacgacggctttgccatggaactatatcaagcacaaatcggttttcagggatgcggtgacaacacataaacacataaaaggagaacaataaaatggatgaattattagaactgttagaagacataaaaccgacggtggatttcaggacatgcacgggcctgattgacgacgggtatctggattcctttgatatcctgtccattgtcagcgagctgaacgatgcatttggaatcgagatatctccggtggacattattccggagaatttcaactctgcccaggccctctgggacatggtagagcgccttaaggccaattagaggggtatgtcatgtcttttctttcaatgaagttcctgctgtttctggccgcggcagtggcaggatattatgtgataccaagacagctccaatgggtatggctgctcatattcagctatatattctatctggcctccggcccggcggcggcagtgttcatcctgaccactaccgtcactacctttctgggcggactgtttctggagcacacggaccgcgttctaaagcgcgccctgcgccccgacgatcctctccgccccctttccacggacgaaaaaaaagccctaaaggagcgcttcaaacagcgcaagaaatggattgccgctctggtcctcctcataaacttcggtatcctggcagcattaaaataccgcaattttgctgcggataacatgaaccttctcttcggcacccatttttccccggcaaagcttctgctgccgctgggaatatccttttataccttccagtccatgggatatctcatcgacgtgtacagaggcaaatacgctccggaccggaatcctttccgttttgccctctttgtctccttctttccccagattctgcaggggcccattggacggtacgaccgcctggcatcacagctctacgggcagaaatgcttcagcctcacccggatagagaggggacttcagctcatgctctggggctatttcaagaaaatcgtcatagcggacagggccgctgtggttgtcagtgaagtattcggcaattaccagtcctatcacggcatcctgttgatagccggcgtactgtgctattcccttcagctctacggcgatttctctggcggcatggatgtagtcatgggcgccgcggagtgctttggcatatccctggacgccaattttaagcgcccttattttgcacggtccatatcggacttctggcaccgctggcatatcacactgggcacctggatgaaggactatgtgttctatcccttttctctttcaaagggcatgaacaaattgggaaaatactgcaaaaaacattttggaaagcatgtaagccgggtactgcctgtgtgtatcgccaatctgctggtattctttctggtaggcgtctggcacgggcctgcctggaaattcattgtctacggactctataacggaatcatcattgcggccagcaatctattggcccccatttacacacaaatggcccggaaactgcatataccggctgaatccagtccctggaccgcggtccggattttaaggaccttccttcttgtaaatatcagctggtattttgacatggcagaaagtttgggagccgcattggccatgatgaagaataccgttgccggatttaccctgtccgccctaacggacggcagccttctgaggctgggtctggatctcaaggactgtggggccctggccctttcctgcgtggtcctgttcacagtcagccttctccaggaaaaccatgtcagcatgcgggatgccctggctgcaaagcccctggccgccagatggtgcgtctatctgatgctgctcttttccataccgctactgggccagattaccatgacaggaggaggttttatatatgcgcaattctgaccaaatgacggaccggtttcacaaacagttcccagagtggctgagagccatcctgtttccggctctgtgcgtatgcatcacggcagccctcaactatggttttatacccccaagctccgtgagaatcaaccttcataaccttagaaacggcgaaacatacgacacgattttcattggcacctcccatgggcagtatggcattgatcccttctgtgtggatgctgcctccggcggcagctccgtcagtctctgtatggcggacgcctaccctgacgatatgtaccacatgctgcggctggcctgtgaaacccagtcgccttcccgcgttgtatacgagctggacccctcatactggatgaatgaacagcgaagcggttccacccagattttcttctatcaggagttccccgcctccagttcaaaggctgcctacttcctggacaaaatcataaatctggattttcgctctgcactggccccatggagctactaccgcaacctcataggccaggtaccggaccatatacgccgcaagcaaagcccttcctataaaaactacgacccgtccgtcctggaaatccccgggggccattacgcgggccgcggcttcatctaccgggaccgtgtggagggcgaggataaaggcaccttcaacaacattccctgggatgagagccaggtaaagcccaaggcagagctttactttaaccgcatagcagagttctgccggaaaaacggcattgaacttactgtcatcaccacccctgtcccacagaaaaccctggatgcgtttgccggttcctatgggcagtcccaccagtatttcaaaaacctcttagaaggctggggcctggaatattataacttcaattatatgaagcctgaacttatggatcgcggtatggaggggtactgggactacgacggccacatggacggcatcaaagcgcaggaattcagcaccctgttaggccgcttactgggcagcctggaccagggtaatttaaaatacaatgaatttttctcaaatacctattgacaaattcctttaaatagtttatattaatatcagtaacaattactattattaattcaataaataaatgaatccctggtgattcacattaagctctataaaggaaaaggagaatattgattatgaagaaatgggtatgtacagtttgcggttatgtttacgagggagagaatgcacctgagaaatgtccgcagtgcggagttcccgcttccaagttcaaggagcaggcttccgagggaatgtcatgggcatgcgagcatgaggttggcgtggctcagggcgctcctgaagatatcatgatggatttaagagctaactttgaaggcgaatgctccgaggtgggcatgtacctggctatgtcaagggttgctcacagagaaggctatcctgagattggcatgtactgggccaaggctgcttttgaggaagcagagcacgcagccaagtttgccgagctgttaggagaggttgtcacctcctccaccaagaagaacctggagatgagagttgcagctgagaacggcgctaccgcaggcaagttcgacctggccaagagagcaaaggctctgaacctggacgcaatccatgacactgttcatgagatggctaaggatgaggcccgtcacggcaaggcatttgagggtctgttaaacagatatttcggctaatttgacatagaatcaattttaccctccaagccaggaatgcaggcggtctccccagggctgcctgtattcttatctggcatagctgaacggctgtaaaattattgatttttagattgaatttctgtaaataacaggatacaatcgtttataggtagtaaaaaacgaaacaaaagagaaaggtgaggtacaatttatggcatcaaaatacgcaggaaccaaaacggaacagaacttaaaggacgcattttcaggcgagtcccaggcacgcaacaagtacacctattatgcatccgctgccaagaaagcaggctatgagcagatgtccgctttatatctggagaccgcggaccaggaaaaagagcatgccaagatgtggttcaaggaactgcacggcatcggcactcctgaggagaatctggctgacgcggcagcaggcgagaattacgagtggactgatatgtatgcccgtatggcccgcgaagcacgggaggaaggcttcgaggaactggctgttaagtttgaactggttgccaaggttgaggctgcacatgagagaagatacaacaagctgttagagagcttaaagaacgacaagacttttaagggcgatgcgcctcttggctggaagtgcagaaactgcggatacgtccacgagggaccggaagctcccgaagtatgtccctgctgtgctcatccgaaggcttattttgagaggaaagcagagaactattaaaaggtacagtggcgggatggtactcctacacttgtagggaacttcgcccgtaactcttcatccaccaaatatttaaaagcgcccgctgtcttttcccacgctagggagaaaagacagacgggcgcttttttgctgcagtaaaatattaattcaaatttaggttcacgtacaagttccgccaggaacacccgcgtgccatccacatcttaccggttctcaatctccataatcatattcaccctgcgctcatgccttccgccctcaaactcagcgtccagccacgcctctgttatcatcttggccagctcgctgcccactaccctggcgccaaaggcaagtacgttggagttgttgtgcaccctggacagctttgcggtataaggctcgctgcacacgcaggcccggattccctttaccttgttggctgccagagagatgcccacgccggtgccgcagatggcgattcccaggtcagcctggccgtcggccacggcccgtcctaccttttcgccgtatatggggtagtcgcagctctcagtggagttggttcccaggtcaatgacctcatagccctttccttccacaaactccttgatgatgttcttaagctcaatggctgtatggtcgttgccaattgcaatcttcatgattcctcttctccttttattcattccctatattatgtctggtcttttataccctgtcctgcgcaaagaatgcctgcacccggtccagcctggatgtcatggacagaagcagcatgtcggccgccgtcaatgcggccatggcttccaccaccaccacggcccttggcacgatgatggggtcatggcggccctttatctccaccacggtctcctcacccttttggttcacggtgcgctggggctgcccaatggagggcgtgggcttaaacgctgcccgcatcacgatatcgcttccatcactgattcctcccagtattcctcctgagtgattggtctgctttccaatcctgccgttaaaatacaggctgccgtccgccgccttatgggatatgccgaatccgtcattattctcagacccccgcgccctggaggcggcaaagccatctcctatctcaaatcccttgaccgcgccgatggacagcatggccttagccaggttggcatccagcttctcaaatacaggttcgcctgctccggcgggcataccgcggatgatacattccaccacgcccccgcaggagtccttcccggccatcagctcctccagccgtgtctctgcccgggctgccgcctgggcgtccggcatgtacagcctgttattccacatctcgtccaggtcaaagcgctccagggaaataccgattccgcccacctcgcgcgtataggccctgaccgtgattcccaggctctccaaaagcctgcaggcgatggctcccgccgccaccctggcaatggtctccctgcctgaggaccgcccgccgcccctgtaatccctgaatccatacttctggtcaaaggtgtaatccgcatggccgggacggtaaatatccatgatattgctgtaatcatgggaacgctggtccgtattgcgcacctccagcgcgatgggagttcctgtggtccttcccccgaacacgccggacaggatttccacctggtccccttcctgtctggccgtggtaaacttgctctggcccggctttctccggttcagataggactggatgtctccttcctccagaggcagtccggccgggcagccgtccaccaccacgccgattccctttccatgggattctccccaggtcgtcactctcaatattgttcccaatgtagatcctgccatatgctgtctcctgtcctcctgtatcaatggcccaaccgccttatcagcctaatttccaatctttgcaatggcgcagcagtttggctcgttcaccatgacgctgcgtccgcacataacgatgaggcccttctcataatccacctcaaagaagctgatgctgccgctgtcatggttgatggacgcgatgtgcttctgatccggaaatacagccacatcctttggatattccccgctgacaggcaggcagcaaatcatggtgagaagtcctgatttctcatccctgctgtagatgcttactgtattttcgcctgcgttggtgcagtaaacgtatttctcgtccggagacagcctcatggcgcaggcagccgtcagattgcccggattcctggtggaggtggtggaaatggtctgtatcttctcaatcacaggcgccctgtcgcctgtttcataggaataaacgcagattacattctgcagctcatgcatcagatagaggaaccgtccgtcggagctgaagcggaaatgtcttggagctgactccaggtcgcagtgaatggcgtccacctggaacagtctcttatccttgtcgttgaaacggtatacctttacctggtccgttccgttgtccacagacagaacatacctgccgtcgggcatccttctggtgcaggtcacatgggaacggaagttgcgctcagccacgctgccgtatcccttattgaacacctcgtccacaatctgccccacggaaccgtccttgttaaggctcagaaccgtggtcttgccgtcatggtagcctgagacaaacacatatttatcttccatatcagtacacaggtggcagcccctcatgccgcggatgggagcgctgttcagtcttgcaaggcttccgttctgcaggattcggaaggatacaaccccctcgtccgcgatggagtacagggttttcccgtcgctggaagcaatgacataggaggagttgtccacttccatctcacacctctccctaaatgtcccgttttccacatccacgtcatacactgtaattccttttgcttttccggtgtaagaataggatcctacatatgccatatattttccgctcatacctgtctgtacctccctgatttatgtgggtttttatttcaatttagactaaaaacatcatatcataaatttgtgaatttgttaactggaagtttgtgaaattgtcccccgctgttcatctccaaacctgtccctgaacttgtctgccaaatctttcaaaaaaggtattgacataccactgatttaatgtataatgaaattcgcgcttgtttattattactaaactttttgcttatttttatagtcagttagtatttgtaaactttttgttcagaaacgcgagacagggaggagctccatggaaatcggaagtaaactaaaggaactgcgggtgttaaagggtctgacccaggaagaactggctgaccgggccgagctttccaagggattcatttcccagctggaacgtgacctgacatctccgtccatagccaccctgatggacattctgcaatgcctgggcaccaccatcggtgaattcttcaatgagacgccggatgaacaggtagtatttggcaaacaggattattttgagaaaatcgatacagacttaaataatgaaatcaaatggattatccccaatgcccagaagaatgtgatggagcccatcctcctcaccttaaaggccggaggctccacctatcctgataatccccatgaaggggaggaattcggatacgtgctccagggaagcatatccatccatataggcagcaagacatacaaggcaaaaaaaggggaatccttctacttcacgccggataagaaacactacctgacaagcaagaacggggcccttcttctgtgggtgagctcgccgccaagtttttaatcacattaagataaaggagattttgattatcatgagccagcctttcattgatttacagcacatatcaaaaagttttgacggcgagctggtcctggacgacctgaacctttccatcagggagaacagtttcgtcaccttgctcggccccagcggctgcggcaagaccactaccctgcgtatattaggcggcttcaccacccctgacacaggaaaggtaatcttcggcggacaggacatctccatgattccacccaacaaacgcccgttaaataccgtattccagaagtatgcgctgtttccccacatgaacatcgcggaaaatattgcctttggcttaaagatcaaaaataagccaaaagcctatattgacgacaaaatcaaatacgccctgaagctagtaaacctgcccggctatgagaaccggaccgtggactccttatccggcggccagcagcagcgtatcgccattgcccgggccattgtcaacgaacccagggtgctgctccttgacgagccccttggcgcgctggatttaaagctgcgccaggatatgcagtacgagctgatacgccttaagaatgagctgggaattacctttatctatgtgacccatgaccaggaggaggctctgaccatgtctgacaccatcgtggtcatgaaccagggatacatccagcagatgggttctcctgaacagatttataatgagcccgaaaatgcgttcgtggcagacttcatcggtgagagcaatattgtgcccggaatcatgatccgggacgaactggtagaaatcttcggcgcccgctttgcatgtgttgacaagggatttggcaataataagcctgtggatgtggtcatccggcctgaggacattgaccttgtaaagcctgaggacggcaccctgcagggtgttgtgacccacctgattttcaagggcgtccactatgagatggaagtgaccaccccggacggtttcgaatggctggtgcattccaccgatatgtttcctgtaggccggcaggtgggcatccatgtggagccctttgaaatccagatcatgaacaagcctgcttctgaagacgaggaggcgctgggagtcaatgaatagcgaaaaaaagggcgccgccatcggcaaggcgctgttatcaggtccctatctcatttggatggccggctttacactgattccgctggctatgattatatggtacgggctgactgacaagggaggcggcctgaccatggccaatgtcattgccattgcctccgcggaccacgcaaaagcgctgtggctgtcccttggactgtccctagtgagcacggttctctgtctgctgatcgcatacccgctggccatgatactgaggggccgcggagccgcggctggaggattcattgtattcatattcatccttcccatgtggatgaactttctcctgagaaccctggcctggcagacactgctggagaaaaacggagtcattaacggtatccttaactggcttcaccttccttcacagtccatgattaacaccccgtcggccattgtgctgggcatggtatataacttcctgccctttatggtgcttcccatttacaatgtgctgtccaagatagacgataatattataaatgccgccatggacctgggagccaacagctttgaacgtttcaccaggatatggctacccttaagcataccgggcatcatcagcggcatcaccatggtgtttgtcccttccctgaccaccttcgttatttccgatttgctgggcggcagcaaaatcctgctcatcggcaatgtcattgaacaggaatttaccaggggaagcaactggcatctgggaagcggactttcactggtcctcatggtctttatcctaatcagcatggccatgatagccaaatacgataaaaacggagaggggactgcattctgatgacaaagagttcaaaagtactgcggaaaatcatatcagatttttatatggtgctcatactgttcttcctttatgcccccatccttaccatgatggtcctgtccttcaacaaatccaagtccaggacccagtggggcggatttaccctgcagtggtacacccagatgtttgacagccgctccatcatgagcgccctgaccaccacgttaatcatagcctttgtatcggccctggtggctacgatcataggcacggcagcggccatctccatcagttccatgcggacagtgctcaggaccattgtcatgggcataaccaatatacccatgctgaacgccgacatcgtaaccggtatttccctgatgctggccttcattgcttttggtatttccctgggatttaagactgtgcttatatcccatattacattcaatataccctatgtcatactaagcgtcatgcccaagcttaaacagacggacaaatacacctacgaggcagccctggacctgggcgcatcccccctgtacgcatttttcaaggtggtgttcccggatatcatgcccggcgtgctctccggcttcctgctggcgtttaccatgtccttagacgactttatcatcacccacttcacaaagggcgcgggcatcaacactctgtctaccctgatttacagcgaagtgaggcgcggcatacggccgtccatgtacgcgctgtcatccatcatatttttgaccgtgctgattcttctcatctttgttaacttccggtccattaagaagccggaaaaggcataaccgaattcagacattaaaggagaacgattatgaaaaagaaaatagcaatcacccttgctgctgcatccatggcagtcctgtccgccgccctcttaaccggctgcggcaaatccgaatcttcccccgaaggcggaaacaaggaagacaacaagctgaacgtatacaactggggagagtacattgacgaggatgtcatcacccagttcgaggatgaaaccggcatacaggttgtctacgatgtatttgagaccaacgaggagatgtaccctgtcattgaggccggcgctgtgaaatacgacgttgtgtgcccctccgactacatgattcagcgcatgattgaaaataaccttctggctgagctcaactttgacaacatccctaattataaggaaatcggccagcaatatctggatatctccaagggctttgaccctgagaacaagtattccgtaccctactgctggggaaccatgggaattctctacaacaccaagcgtctggaggagctgggcgttcccgctcccaccaagtggtctgatttgtgggatgagcgcttaagcggcgaaattctcatgcagaacagcgtaagagacgcatttaccgtggctctgaagatgaagggatattccttaaacagcaccaatcccgatgaactggcccaggcccgtgatctgctgattgagcagaagcctcttgtccaggcatatgtgattgaccaggtaagggataagatgattggcggcgaggctgctgtgggcgtgatttattccggggaaatgctctacatccaggatgctgtggcggaacagggtctggattacagcctggagtatgtaattcctgaggagggaaccaactactggattgactcctgggttattccggctaacgcggagcacaaggaaaatgcggagaagtggattgacttcctgtgccgccctgacatcgccaaaaagaactttgaatatatcacctacgccacgccaaacacaggcgcctatgatttgctggaccacgaccttaagaacaacaaggccctgttccctgatttagataagctgtctaactgcgagattatccagtatctgggagacgatgtggataccatctacaatgacatgtggaaggaaattaaatccgagtaaaatacaccgctttaacctaaataaggccacaacataagagggggctgttgcactgaaaaaacaggaaattttcagtgtaatagtcctttttccatttcttcagctttaattaagcacctaaaggggggttctgctttttgtcatttatttttgggcacactttatcggaccctgccatgggcagcgtcttgtcggttttaaacgggctaattttacgcctccttcttcatcgggaacaagtgtccctgtccgcccagattggatttaagtttactacaaaaaaactgcactttgaacgctattgaaaggttatgggatacggatagctccatacgccgaattccttctctaccgtcagatagtgagcctaaaccaaaagcaaaaatctacaataaaaaacctcatttcgtgcagaaactgttgaaaatatataaaaaccggtgtaaaattaagcttaactaagtgtttatgtacaaaagaagaggggatgttttgtgagaaaacggaaaagatgtagacaattagcaggaagggctgccagtcttttattggtaactactttgatggcgcccaatatggtgccgctgatagcctatggggcggaggccattcataacaggccacgttatgtgtcttttgccaggccgacggctcttaccctgaacgaagtaggtattagtgacctgggaaattccgggagtggtgatggggctggcaatgacagcggctccgataccagcaatgattcaggtagcagtagctctaattctgatagcaacggttctggcagtgatggatcagagtcaggaggcggttctggaactggcggttccgaacctgacggaggctccgagtccggcggaggttctgaatccggcggaggctccgagtcagggggcggttcggagtccggcggaggctccgaaaccggcgatggttcggagtctggtgatggttccgaaaccggcaatggctccgagtccggcggtgattccgaaaccggcgatggctccgagtccggcggaggttccgaaaccggcaatggctccgagtccggcggaggttccgaaaacggcgatggttcggagtccggcggtgattccgaaaccggaaaagaagaggagtccggtggtgcagataaagagactggaagcaatacagatgaaagtaaggacgaaaccaaggaatctacagaagaaaccgaagaatccaaagaagcggatgagaacggcagccatagcggcggagcaggcggtaatcgacctgccggacctgatgtgccagaaagtacagaagcagagctggaaaccttacctgccgaggttctttcgaagccagaggatgaaaaggaggccagagaaccagaagacttttatgatgacctgattgaagaaccggaaggagagctggtccagtttaatgaccgataccgtacctaccaaaccggcgatggggagtatgtgactgtcattggcgggtattccggactgtatcaggataaaagcggagaggtccttgaggccaacaacatgctgaccgaggctgatgtggaggatgaggaaatatccgtggccacaggttccaacgccaggaggatgagaagcatggtatccggtgggacaacttaccggaatgaggatgggccgataaacgtgcttttgcctgaaaagatgagcggcggacgcgggtataccatctcaaaaggcagtgattcccttgaaataataccggagggtggggattataccttaagctgtgtgggggataatgcaatccgttatagcgatgtgtatgagaacgtggatgtccagtataccatcctgaatggcactgtgaaggaggatatcatcctgctggagaagcaggaaaaggacagcttttcttacaagcttaagtccggaagccttaaattcaagaaagaaggtaattcggttatcgcctatcacgcaagcgccagcgatcctctgttccgtttgacggctcctatgatggtcgatgcggcagggtgcgctactgataaggtgaagctgtcctatgattcatcctctaagacagtcaccatcaaaccggaccgtaaatggctggaaagtgaggcgagggaatacccggtccgcattgacccgggaaccacccttgtaacaccatcccagtttgcatatgccatggtgggatctggcgtacctaaaacctactttggtgataatggccatacaatggtcggttactcagaggattacggatattgccgggcctttatggagataagtcctgactgggaatccttaatggcaagacgggatgagaatggtgatggtccatccgtcaacgatgtccagctgactgtttatgtgatgacaaaggatacggtccagcgcagtgcgtttattgcacttgcaccagagcgcgcctggaaccaggaaacaataagctggtatacgatgcataacggtgagatagataaggccttaaatggcggggacctgccgcagctgggtgattatcaatactcagaaggtgaagcaaagccgatgtcctttaacatcacggaagcatatgataaatggctgcgggacccctctacgcgtcatggcctgatgctgaaggtgcttgcagaattaccttacaaagactccattgaagatgtcatgtgggctgaaaccatttataatggctggaacgcgaaatatgggccgaggctggaagtggcctggtccggagaattaaatgacaaggacttattaacccttccgatgagcgagtttaccctgaatgttgacccaggcgtcatgccaagtgacgcaggcggcagaagcacattaggcgtcgtaccatggggaatatcacaggcaggttctgagattacatataacctttacgaagcggaaggggataatgagacagacaaaggcggcgtgacggctgaagattccctggcgtatccggatttccggaaggtatcagatgactgtatcaatttcggatacttagagggcaactggcagggtgaccctgctttcatgacagaaaatcttcagacagatacaaaatattacataacagcacagggggaaggaaaggaagtaatcgaggatgaggaaggcagccccgcgttaggggatgggactgaaaccagcgatttaaagacttcggatgaattcctgttatatgaagtgcaggtcaaagacgatattgccaggatagcgaagcattatggaatcctaatccgtcaaatcaaaaaagataatcagatgacagcggggcagcttacaacggccggggatatcctttttatcaggaaacctctgacggatgtcccatacacctttaagattcctaaggataagctggagaaatatctgctggaggccatactgggcggttatgacccgcgttatgacttcggcggtgacccgattaacatgtcgtccggatcctattatatggagcataccgatgtgtccatagaggacttaggcggcacctttgaaatctccaggagttataactcaaagaacccattcttccgttctgaattcggaaagggctggagtacccttgcaggcgagaaaatcatggtcctggaggatggaaggatattctattccagggaggacggtaagggaatcatattcaaaaaggccgaggatggaacatacaaggggcctgatggctatgattataccctgatgccggtcgattcaattgaagtttcaaccatggaaaacccggatgacgaggatgaggaggaagaagggttcacaggtgatgcggaaggtgaaatccgtatagccagtccgttatctgctgaataccgcacagccagcccgtcctccgcggctatgaaaatgacacttgctgaggatgaggaagacggggaagagaccggagccgttaaaccttccatcggatgggaaatcacacagccggacggaagtgtcaagatattcaatgcatacggcctccttgtcactgagaaggacaggaagggctataagacatcttatgtctacgacagcgcttatcagctgcgccagattatcacaccttcaggtaagatttttgagattgcacaggatgatgaagggaagattaccgatatcacacttccggatggcgggacaatccactatgaatttgatgaccaggataaccttgtttccgtaactgaccctgaaggcggtgtgcgcaggtatgaatacgacgatgccaaccacatgacggcatggtatgatgagaatgattccatgttcatacggaatacctatgacagcgaaggaagagtcactgagcaggaagatgcgttaggaaatgtcagcacctattcctacgagcgcaaccttaccatcatgaaagataaccgtggaaatcatgtgctgtatcatctggatgaccgcggacggaccgtgaaggtggagtatgcagacggcgataccatacttacttcctattccgctgacaacagggtagcatcacaaacagatgccaatggcatgaccacttcctatgaatatgatgaggaagggaatgtgctgacagagacaagacaggatggaagccaggcccattttacctacaatgaacttaacctgcctttgaccgccacggattatgaggggaacacgaccacctttgaatatgatgaggcggggaacctgctgctcatgacagacggggaaggcaatacaaccagatatgaatatgatgagctgaaccggattgtgtccataacggatgctaatggcggtactacaactttcagttatgaagatacgcaggcagtgccttcctccataacggatggggaaggtaatacaaccagatacagttatgatgagatgaaccgtctgttggccgcaacggacccggaaggtaatacaaccagccatgtttataataagaacggttgggagatatccacccaggcggcagatggcggggagactgtttatgagttcagcccggcgggagagatcatctcaattacggatcccatgggggcaaaggcagcctttgcctatgaccgtatgcataatatcatctcaggggaagacgcccttgggcatacattggattacgcctatgattctaattacaacaaagtaagcgagacggatgccaaaggcaataccacacgttatacatatgattccaggaaccggatggcaggatatacggatgctctgggcaatgaagtcaccttaagcctggatggagcgggcaacatcattatacagacggataaacgtggacatgatacggaatttgtatatgatatggtcctcaaccggcctgtctcatataaggaccggactggtgccataaccagttatgaatatgaccgaaacggaaatatggtcaaggttaagtacccggataagagtacggttacatatacatatgataaagccggccggatggtatcaacgacagcccggaacggactggtgacgaagctgtcctatgatggatgcgggaatatcatacggatacaggacgatgaaacacgggtgtacaaatacgggtatgaccataataaccgtctcatccgcacggaagacccactgggcggcgtaacccgctatgcctatgacggcgctgggaaccagatagccgtaaccgacgctaatggaaatacggccacctatggctatgacgcggttggccgcctgacggagatgaaggatgccctggaaggggttactggcttggggtatgacttaaatggaaaccttgtaagcggcacagatgccaacggacattcggaaagctactattatgatgtcctggggcagctcctggcccagaccgatgcggcaggcaatgtgaccgcaatggaatatgacgccgttggaaatatatctaaggtaatggatgcccttaaaggtgagactgtctacgaaacggatgccgtacaacgtactgttaagataacggatgcgatggggcatgactacctttatgaatatgatgggaatggtaacctgctcaaaaccactatgccagacggcgataccgtgtctatgacatatgatgcggaagaccgtatggtaacccgcacggatgaggcaggcgtcatcaaccgttattcctatgattccatgggacgtatcataaaagcctcagacaatatcggaaacataatgacatatgaatatgacagcagcggcaacctgataaaacagacggataccattggacgggaagctatttatgtgtatgaccagttcagccatctggtgcaggttacagggacagatggagccactacatcctatacctatgatgcacttgaccggctgaccggcgtcacgcaggcagacggaaccgtgacttcatacgaatatgaccctgtaggcaacctgattaagactacagagccaggcgaggccatatacacctatgcatacgatgccatcaaccggctgacagaaaaggtgaacccgttaggcgccgccacaaccttccggtatgatgcaaaaggcaatctcacaggaagcgttgacggtgaagggactgcgactgcttacgcctatgacgccattgaccgtctgacccagtttacagacggccgcggtaacaacacccagtatgagtatgacgagttatcccgtctcctggcatataccacgccggaagggaataaggaggaataccggtatgacccgttaggcaacctgaccaagcgtaaggacgcaaacggcctgattacggaataccagtatgatgtcatggggaacctgataaaggaaatctcccccaagggagccgtgaccagctatacctatgacaagcatgacgaactgaccagtatcacggacccggcgaagaatgttacgacctacgaggtggatctgaaccgccaggtgacgaagatgacggccaagaacggcggcgagtatacttatggctacgacgcggtccaccggctgacggatatcaccacaccgctgggactgaccaggaccttcatctatgatacggcggataacgtggtaaaggatacggataacctgaaccggaccactgcctatgagtatgacatcatgcaccggctgactaagtccgtgaatgccaagggcggggtgtccacctacacctatgatatacgtggcaaccggaacggcatgaccgatgccctgggatacaagtggaattatacctatgacctggtagaccagctgacaaagagcgtggatccggagggtaaggcaaccgaagtggcctataacctggtgggagagatttcatccattaccaagccgggggaccgcaggaccagcctgggctacgatggcagctataacaggaccacactgaccgaccccaagggatacgtctatgaatacacgtatgacaaggacaaccgtcaggtaggatttaagaacccgctggaggagactatcatggccgcctatgacccgggaagccgtgtcaccagtgtgacggaccgcatggggcttacagaagcatacacctacgatccgcatgggaataccctgagtgtgaaggcaaccaatggcctggtgacccggttcagctatgatatcctggataacctggtgcgtgtgaccatgccgagtgagctgaccacttcctacacctatgatgtgatggggaatatgacctccatgacggataccatgaagcgcaccactgcctatacctatgacctggaaggcaacatgaccagcatccatgacccgtccgggcggactgagcggatgggatatgacatcggggggcgcctgacctcctacataagcaatggcgggaacaaggtatcttatgattacgatgtcctcaacagcctggtggagaaagcctatgaggacggggacggcaacgccgtaaatgaaggtgtggtttatggctatgatgtcctgggccggcgtgtctccatgatggaccgaagcggggccagcagttatgaatatgacgggcttggacggattaccaaggtaaccaccggctccggtgaggtcaccacctatgcctatgacggatgtgaccagctggggagcatcacctatccggatgggaagagtgtccgttatgaatacgataagaatgacaacctgacaaaggtgacagaccgaaccggcgccgtcaccacctatgtatatgatgccatcaaccgtgtgacggaaatccaccgcccgaatggggtgaatacctacaacacctacaatgccagggaccagattgtatccatggtcaaccggtgcgatgaatgcggatggattgtcagccggtatgattacacctatgatgaccgcgggttcatcgtggcggaggacgcggttgaaagcctgtatgcgtatgcctgggatgacaagcatgacgggaagcatgagagctggcacgatgacctgttcccgcacggcaacaagcatatcaacaaacatgacaaggacggtatctacaacttccagatcatagagacgaaacgtgccttcacatacgatgatgatggcaagctcctgaccgcaaccgagaatgaggaccgccagggccggtatgactatgtgttcaagtatgatgatatgggaaaccgtatcttctacagcaaggcccggaacggaagcgtgcaggaaagcgcggagtacacctacaatgcatcgaaccagatggtgaaggtccgtgaatacgacgggaagcattacaggaacgtggaatatagttatgatgccgatggaaaccggatcctggaagaggaggtcaagccggatgggaaccgtaaggtggagaagagctatgagtacagcgtggagaaccgtcttaaggcagtgcgtgatgcccacgaccttttggtggccatggcctatgacggcgacgggaaccgcatattccagctgaactacaacctgcataccgatgatgactggaaggggaattccggaaatgggaacggaaacaacaaggacaataccggaagcggcaacaaaggcaatggaaacggcaataagaagggcgccgtggcagccatcgcagatttctttaccggtgaagagccggaagcggggaaactcggtgccggcgtaagccaggcattggctgagcgtctcttcagtgaagaaatccttggaggcctggcggaaggtttaggaatcccggaggagactgtaacagcccaggaggagacaggaacagacagcagtgatacggccaacgctgactatgggcaaaccatgactgcgacaccaagcaatgcatccccgggtgccgtaagcccaggcaatgcggcagccagctatgccggaaagaatgataacggcaataacgggaacggcggcaatgggaaccattatggctgggggaacggaaacaatggaaacggaaacaatggaaacggaaacaacggaaacggaaacaatggaaacggaaacggcaacagcggaaatggcaacggcaacagcagcaccggaggaaccaatgacaataacggtaatgccagcggaaacaccaataatacaggcgggagccagaaccagagcggcatcctgttcccggtggcgggcgaggtatccgagctggagcaggaactgattgacatgattaagaccaccgggaaacagaagaattatgagctggtggagtatgtcaatgatgtgaaccgcgaccatgtggaagtgttgatggagctgaatatcaatggtataatggatacggcatacagctacgggaatgaacgcctgaccaatgagcgctttaccggctggaccggctactatacctatgacccaagaggcagtgtgacaggtgtgacaggaagtgatggatatatctggcagtcgtaccggtataatgcctttggtgatatcacgttcggcaagccacagtataacaatgtatacagctataatgccgaaaacttcaatcccaatatggatgcccagtatttaagggcgagatattacagcgtgaagacagccgggttcatcagtgaggacagttacctaggagatatcacagacccattgacactgaaccgatataattacgttaagggaagccctttgaattatatggatccgagtggacactctggtttagatatctttacaccacctagcaaatatgtccatacaggtgatataccggtggcaaatgacagtaatgcatcctatgacataacaaagaaggcaaatacggaagcagcctgttcaatcatcaactcttatataaatgataatcaaggcgcatttatgggggttacagcaggtgtagcattggttgtactgacggcacctgcttcagcacctgtcctagccgtaattggggctgggatggcaggtggggctgttggtatggttataggaggggttctcgaaaaaggaatcagcagtgcagatatagccaggactctaaaaacaaaatataatattgacgtcacagaacatcagaatctggatttggattcattgccatccgaggtcaaagacttatgcagccaatatgataagaactttgaagatatggaaggttattttgagacagggtcagtgctcatggggctgggagtggcatttcatgaggcaggatatttccttgattcccttcaagcatccattgcagagaaatcaaagaaggcatatgagagccttaaaagttggttcaataaaacatttaaggggggaagtggaacttttgaatggccaagtgccaagggattagtggggcatgattttgaagattatcttcataatgttataggtggagaaagcagatatataaaaggatctaccgcaggaagagattttgatggagtttttggaaacaggtggtatgaagcaaagtctggtaactattggaataaactgttgcaagataaatctatagagctgaaatttaaacaaaaaatggcagaaggtttaaaaattgcacaagaatacggagcaacatatgaagtgttttcaaattctccaataccggacagtataaaagaatggcttacaaaaaaaggaatcccctttactgaaattctaaactagcctgcaaataaaaagtcaatagaaaaatgaaaaaaattttaaatttattgttgactgaatttcaggtacaccaaatagaccaccgttatccgctggtctgaaaggatgtggtattccttattctggaagagatgtgagatattctttaactcttccgtaatagatgcgcagaaacttgttagcacctgcggtcatatagacgtaataaggctttccctgagcacgtttcttatctataaacgcatatacagggtcatcctgcggctttgtcttgatgagacagtccatgacctggaataaggtttttctaagggaagaagagccacgtttggaagtcggaacgcttttttgttcataggttccggattcattgacacccggatctacaccagcaaatgcagtgatagcacctttgtgagtgaaacgtgtgacatctccaatctcagccataagctgaggtccgagagacgggccgacacccttcattcccatgacaacgggatattccggtagtttggcggctgtgtcattcatcagagcacggagttcttccacggtcttggaagcagtgtttaattgttctatggcctgtttcatgatcagcttggttagatcatcttttggaagtacaggaacaagctccctggcagctccatagatttcttcagccttgtctttgctgaagttgtacttcctgcgtttgcaccatttctgataatggtcgacaaatgcgtttaatgacagtttacgaacacagtccacatgccagtatgtagcggcgaaatcaacccacttctggctgccatcttcacgggcaggactgtcaaagtaagcattaacacctgggtaagtctgatcaagaataccaatgaggttattcttcatggctgttttgtgtttcatatagaaaccaaactgacggttcatagtctttaattgaatgcgtatttcgtccataagactatactgttttaattccgtccaactgtcaagtgtgtaacgggctatttttacagcatcagctttatcagattttactttacggagagagttatctccgaaatccttaatgagcttgggatttacggcagtcacaaaaagacctgccagagaaagctcacgggccagtggttcgtagtaacgaccagtatgctccataacgatgcgggattcaccatcgatagatttgatctgctcaatcaaagattgaatgttaccggaagtgtgcttgatttcaaagggtgaagaaacgattactccataaggacggagaatggcaaccatactttttccttttgatacatcaataccaactgcgttcatgttcataaatttgtcgctccttaagattattgcaatggataagtaccagttttactcattgcctattctatctactgtggtgtgacacgaacgtacctgaggcagttcaacctgcataaaacgaacgctgcaaatgaggagctggttatcagtctaatttacggacgcgaagtccaagaaaggaagccgatataccgattgctccatcattataacagcttaagcaataagatggataattccttactggctgtaagggatattaaccataaatatattgtagtagaaaggaggacttatgtcgattacttacaattttcaaataaatattactaaaagaaaagaaaacagtttgtcttcaactgatattattgaaagtttaatagaagcagggtggagcttgttttcagaaaacaatttaattatttatacagatgtaggtgatgatgatgattttaattttctatcaaagcccatgaacaaaagagaatactatgatatagtgaataaaaaacaaagaaataaagaaacaatcgcattagctttgtttcgttcagagaataattgcagatatagaattgatgtgattattactattacttctgtatttgaggttttaatttcaccagatgatgcaacaagaaaaatgttgtccaatgatttgaaaatattagatgttaattggtatatttccagaataattccgtatttaacaaatgaaaaaatgttagtggagaacttttctttttcacagtattaaacgaacttataaatattcgcctagctttgctgggcgatgtcctccggtcgggtggctttatgccacccgcctttaaccggcacacattttgaccctactattttctcaattttcaaaaaaaagtggttgtttcacatcgagccaacgagccgatatacttggctcatggtacatcttccgataccagctggaaaagggcaacacgggtggtcacggtgcgttacaggggtaagagaattgcgggtagagatagggtatcggtgttcggacggaaagctgctctgtttttcagtaaataaatgatattcgctgattgagcctgactgaattaaaggttttccttgccaaaagccgggaaatgccttaaaaccgtgggtttcagcagtatctgcgctgtctgccggtataagtttttctggaaacccggagaaagttattcaaaaaacaagggcatccagcataacaaattccggcttttccacccagcgaattccatgttttcagcgatgctttagagatgccgggtggcagaattctgaaaaccacaaaagctgggtgccgccaagccacccatgaataacgattttcatcctttttcgacccattgaaattcattcgtcagtaagatttcagtaaaaaaaacgcaagggaattgaaattgacacttcggatagttccatggtacaatggcgcacacccgggggtttaagggggtggaaacacaccggaaaaatctcagcaagacagacacaccggccgctccatgatggatctggtcggtgtttttttcctgctgttataggttcatgataaattttatggcccgaatgccgtctttcactctgcgaacttaccatccattctttttctgtcagccacctcacaatattttcagcttgtgcggaagccaataccacaatggaacaaatatctgctccatagatgaagcaccttacataaatcgaaaaaagagccgggaaaagacttgaatctatctgtcaccagaggtaacatacgacacacttccagagagatttctctccggaaggaataacctgtaaagttcgtaggttgtggagatggataggcttattcccccttgcgatggccgtagccctgggcgtaaaccggcacataacgcttatcagctgaggttgccggcagatttacagttacggatggagacaggaaaagaaggaaggatggcatctgagaaaagaaaacatcatctatgtggggattgacctgcataatgaaacccacacagcggtcatgctggaatacaaagttgggagagattacgtttggtaataaaccatcggagtttccgaggcaggtaaggaaggtcagccgttttgtgacagaagataagacggcagtgtatggtctggaaaacgcctgcggttatggccgcgccttggctgtatggttgattgaaaaaggattccatgtaaaagacgtaaatactgctttgtcttacgcccagagaaaaagtgtgccgatgtatcaaaaaagtgacagttatgatgcggaagccgtggccttggtgctgattaatatgctggacaaactgccggatgcgataccggatgataaatattggacactgggccagttggtgaaccgaagggataatatttgtacccatttgcatagactgaaaaatcaattctttaccggtgaagagccggaagcggggaaactcggtgccggcgtaagccaggcattggctgagcgtctcttcagtgaagaaatccttggaggcctggcggaaggtttaggaatcccggaggagactgtaacagcccaggaggagacaggaacagacagcagtgatacggccaacgctgactatgggcaaaccatgactgcgacaccaggcaatgcagccccgggtgccgtaagcccaggcaatgcggctgccagctatgcctgaaagaatgataacggcaataacgggaacggcggcaatgggaaccattatggctgggggaacggaaacaatggaaacggaaacggcaacaacggaaatggcaacggtaacagcagcaccggaggaaccaatgacaataatggcaatgctaacggaaacaccaataatacaggcgggagccagaaccagagcggtatcctgttcccggcagacggggaggtatccgagctggagcaggaactgattgacatgattaagaccaccgggaaacagaagaattatgagctggtggaatatgtcaacgatgtgaaccgtgaccatgtagaagtgttgatggagctgaacatcaatggtataatggatacagcgtacagctacgggaatgaacgcctgaccaacgagcgattcaccggctggaccggctactatacctatgacccaagaggcagtgtgacaggcgtgactggaagtgatggatatatctggcagtcgtaccggtataatgcttttggcgacattacatttggaaagccgcagtataacaatgtatacagctacaatgcggagagcttcaatcccaatatggatgcccagtatttaagggcgagatattacagcgtgaagacagccggattcatcagtgaggacagctaccttggtgatatcacagatccgctgacactgaaccggtataattatgtgaagagcagtccgttaaattatatagatccgagcggaaatcaagccatatccagttatgcggccaactatcaggctaatgatagtggaaataatccaattccgtcgtatgcagcatcacatgacagttatgggcggggtctgccgaaactgacaagcagtgttggattcaagaccgcggtagagaacgcagtaaatcaggtgatagataagggaaaggaaataaagaattattgtgagaactgggtagtaggtgcaaaagtaaccttctataccaaagagactgaaatgacaaatatgttcatgttgatgttcggaggtgataatataacatccgatgcggagatgaacgcccatatagctgaactgataaacagtatagataatttcgattatgtggcgtaccgtgacggaacgattgatggagagatgctgtatattatacagtatatggtagcagctaacaacgcggacaaaatgttaggaggtttagtagcaggaggcggtggagtagctactggaacaattgtaacgccagagggttatttagtagaggtagaattgtctggtggatatgccggtgtagcagagaatatcggaagtatggtagcggaaggtgcattggctggtgttcttgctatgaatggacaaggaggaccgaataagggggagtctgactctaaaaagaataaaatacctgataatgattcaacaacaggacacatttttagagatgcagaggggcatattccagatacgccagaaaatagagcattactggaagaggttgccaatgattctgcaaatttccgcggaaccgacaagtatggaaatgaatggtatacaaagactcagagcgatggaagccaagtatgggtagaatcaagaaatggaaatatttttgagggtggagttaataatacaccgaaaccgtggaatccagatacaggtctgaaaaagccatgataaggagaaaatatgaaagaaatgcaatcgttcttaatgtttttctatattttagatcagtgctatgatcaatgcccagaaaatgacttaggagggttcttagggtcaatatctcctgaattgtgggaagatggtaaaccaatggatgaagctgtgtataatgattggaaagatcgaaatgatgcatcccttcttaatagtcaaaatattataaacgcagcaattgattttttacgattttaccagacaaaatttggttttgatttttcaaaaacccaaagtatccttaagagcacagttggtattgagatgcttgaaaaagcagctactaaaactgatttgatgtatcaaaagcatagttatgatgattgagtatttattcgcccggctttgccgggcgatgtcctcagaggttatgcgttttccagcataacctctttaacttgcacacttttcgaccctggccatattggctgatttggggagaaatgcctttgtttcatattggcccttctcattttcagcggtagttttagaggcgtcgggtggcagaatacggaacactggaaaaactgggtaccgccgagccacccacgtaagacacgttcgaccctttgaaattcatggcaagtaagttttcagtaagaaaaacgcaagggaatcgaaattgacagtccccctgacgctatgttacaatggcgcacacccgggggttttaagggggtggaaacacaccagaaaaatctcagcaagacagacacaccggccactccatgatggatctgaacggtgtgttttctttctgctgttataggctgttgataaatttcatagcccggacgccgtctttcacgccgcagacctgtcatccattcttcctctgtcatccgcttcataatattttcagcttgtgcggaagtcgataccacaatggaacaaataaccgttccatagatgaagcaccttacacaaatcgaaaaatggaccgggaaaagacttgaatctatctgtcaccagaggtaacatacgacacacttccagagaggtttctctccggaaggaatcacctgtaaagttcgtaggttgtggaaatgggtaggcttattcccccttgcgatggccgtagccctgggcgtaaaccggcacataacgcttatcagctgaggttgccggcagatttacagttacggatggagacaggaaaagaaggaaggatggcatctgagaaaagaaaacatcatctatgtggggattgacctgcataaggaaacccacacagcggtcatgcagcttccgcatcataactgtcacttttttgatacatcggcacactttttctctgggcgtaagacaaagcagtatttacgtcttttacatggaatcctttttcaatcaaccatacagccaaggcgcggccataaccgcaggcgttttccagaccatacactgccgtcttatcttctgtcacaaaacggctgaccttccttacctgcctcggaaactccgatggtttattaccaaacgtaatctctcccaactttgtattcctggccttggtgctgattaatatgctggacaaactgccagatgcgataccggatgataaatattggacactgggccagttggtgaaccgacgggataatatttgtacccatttgcatagactgaaaaatcaattctttaccggtgaagagccggaagcggggaaactcggtgccggcgtaagccaggcattggctgagcgtctcttcagtgaagaaatccttggaggcctggcggaagatttaggaatcccggaggagactgtaacagcccaggaggaggcaggaacagacagcagtgatacggccaacgctgactatgggcaaaccatgactgcgacaccaggcaatgcagccccgggtgccgtaagcccaggcaatgcggcagccagctatgccggaaagaatgataacggcaataacgggaacggcggcaatgggaactattatggctgggggaacggaagcaatggaaacggaaacaacggaaacggcaacagcggaaatggcaacggcaacagcagcaccggaggaaccaatgacaataacggaaatgccagcggaaacaccaataatacaggcgggagccagaatcagagcggcatcctgttcccggtggcgggcgaggtatccgagctggagcaggaactgattgacatgattaagaccaccgggaaacagaagaattatgagctggtggaatatgtcaatgatgtgaaccgcgaccatgtggaagtgttgatggagctgaatatcaatggtataatggatacggcatacagctacgggaatgaacgcctgaccaatgagcgtttcactggctggaccggctactatacctatgacccaagaggcagcgtgaccggtgtgacaggaagtgatggatatatctggcagtcgtaccggtataatgcctatggcgacattacatttggaaagccgcagtataacaatgtatacagctacaatgcagagagctttaaccccaatatagatgcccagtatctgcggtcaaggtattacagtgtcaagacggccggattcatcagtgaggacagctatctggggaatatcacagacccgctgaccctgaaccggtataattatgtgaagagcagcccgttgaattatgtggatccaagcgggaattggccggagacggaaagccatatagtccggacggatcatgtaccagtagcagactggagcaatgcgacccgaacctcccatgcaccggagcgcccatcgttggatgactggctaagcgagatggccgtcaaactggctgtcagctcaaagaaacgtcagatggagcgggaactggaaaagaacatgaaagcggcccaggcagcatcccagtccaccggttgttttgaagcggtggtggtggcggacagcgtgctgagttttctgatgagcatgacgctgggagccgttggagcggtcattgaaaacggaacggcactcgtccgacagcccaagaactttgtgcaggatgtgacggggcaagcgcgtgataagaccatgctggacctgatgcgggacttatcaaccaatagccttggatttgaaatcggccgcctgataggggacctggcaagcatcatgataggctatcacaccaccctgctcgggctggggaccttggtagcgtcaggagcaaccgggcagatacaggttacgccggccggcatcgtaatcgttgcggaaggggtggcaatcaccatatccggagcgttggatacggcggatgcattgggcgccgttgaggtagagctaagcaaggccacctctccaggagactctaagccggggaatgaggatgagggggattctaattctgatcacatggttggggaaaacggaactcagacatcaagcaagacgacttggcaaaacggtaagacggagcggattgatgtagagaacccggctccaggagagcgacctggacaaattcactatcatgattccaataataataaatggtattatgacattgaaaataatactttctatgatcagaaaacaggagacttatcaccaaagagtgtgcaaaaattactaaaagacaacaatttcatgaaaggaataaaaaaggcattgggaattttaggtgagtaatatgattaacatgaatgatacgatgaaacaattattacagaaagagggacaaggtaaagaaacaccaagaaccaaaaaaatagcagaagaggtggtgaataaaacgagactcatcagagattgtattatctttgatgagaatgaaaagctagatgaaaataaaataaattttagtagaattctaaagattgttaaggattggacaggatatgaaattagctgtaatgaattaagattttcaaaagaagaaattccttcaaatcaatttttgtatttagcggagaatttacattctatgttatcacagaaatatgaggggagaaaatttggaattgttatatctttatatgatgaggctattgatttaagatttcacacatataggagtgatgaaggactatggcttgataaagatttaaataaatacgataaccctattctttaccgagtgtagttttcgcccggctttgccgggcgatgtactccggcctgggtggcgtcaagccacccggcctttaacctgcgcacttttcgaccctgcgatttttcttgattttcggaaaatggtggttgtttcacatcgggccaacgagccgatatacctgctcatggtacatctttccgaggtcggtcagaaaagggcaacacgggcggtcatggcgcgtcacaggggcaagaaaaatcataaatcagagacatccctgctaaaggtgccgctttgccgggaaaactactattagccgggagtacttctgagccaccccataatcctttgattttgtggtgtttcgggcgttttgggtggcagaatccgatttattacaaaactcgggtgccgccaagccacccagcagattatttttcgacccttgagatatgagctgccagtaagaaaccggtaagaaaaacgcaaggaaaatgaaattcactatcgggatatttccatggtaaaatggcgcacaccagggggtataagggggagaaaagcggctgattgaaactgccagaaaaacatagtaatgaaccagcggtcataggatattggctgctggttccttttcttttctggcgataccactataacacaaatcagtccgccatttttgtatcacatttcacaaacattcagtactgatcccaaatgacttgcggatgttccttttcagagttaatatacgacaactccgacagaagaataacctgtaaaatccgtaggttagggaagcagacaggcttaatcccccttgcgatggccgttgccagatggcgtaattcggcacataacgcttatcagctgaagttgccggtgattttgtaaatgaggatggagacagggagtaaaggaaggattgatacgaggaaagaaaatatcatctatgtggggattgacctgcataaggaaacacacacagcggtcatgcttgactgctggaatcagaaattaggcgagattacttttgataacaaaccgtcagtgttccacaaactgacgagaaaggtcagccgttttgtgacaaaggaaaagacagcagtatacggattgaaaaatgcttatggctatggtcgtgcgctggcggtgtggctattggaaaagggctgcgctgtgaaagacgtgaacacggcgttatcctatgcccagagaaaaagcgttccgatgtatcagaaaaatgatagttatgatgcagaagcggtcgcactcgtattaatcaatatgctggacaaactgcccgatgccgtgccagatgacgcttactggacgttgggccagttggtgaaccgccgtgacaacatctgttctcatcagcagagattaaagaagcaactgcacgaacagctctgtgtagcttatcccagctataaagggttcttcggagatatcagccgggctacggccttgtatttctggcttaactacccatcgccggaacatctgcggggaaagacagcggaagaactggcatcagaactgcgcccaatcagccataataattgctccatcaagcgggcagagaagatactggaacgggtacgcacagacggtcagactgcaagggaacaccaagcgagccgggatgccatcactcgtagcattgcaggagacttggagcattaccgggaacagcttaagattgtggaatcagcgatagatactatgctgccttcatttagatgtaccttgatgaccatgcccggagtggacgtgacaacggctgcgaatatgctgtcagagattggagatatccaccgttttcccaacgctgacaagttggcgaaattcaccgggatatgcccaatcaatttatcatcagcaggaaaagggaaagatatgtgtccgaagcagggaaacaggcggttacagtcaatcttctatttcatggcaatccagatgattcaggtttccacgaatggaacgccgaggaataaggtattccgggagtattatctgaaaagagtagcagaagggaagaataaacagcaggtactgatttgtattgccagacgtctggtgaatatcgtgtacggaatgctaaaaaatcacacagaataccgggaacctgagcaataatggttgtcggttacgaacagtctgtgctaagatgaaagcagcagaaagacagtaattggtttaccgccttttccaaaagaacagagaaaaaggcgcaaatgttatgagggttcagcgtcagtgccaagggggattctaagactcaaggaaatggtgttccagtaaaagaaaagactacagcatcaaatgggttagattataaatcaaatcctaagcatacacccggtcaacctggaaatagaccgaatgcaggaatagagcctaagaattccttagatttgtttggtgactcagttccttcaacgtcaaaaccaaatcagagatatacatatgatgcggatactaacacattacatcgtttttataatggcggaaatggtatttggcattggagtggttcaacgaatcaaggagcaaattccataaatggaagtcaggttccaaacgacataaagaatatatttgatttaccaaaaaagggtggtaattatgatattaggaaatccgtatagcttttcagtttttatcaatacaataaaagagtggaatatagataatgaattttgtaatggtattttgcttttttgtgtcgatggggatttttttcctaagagaattgtaactgcgactcttaaatgtgaaattcaaccattaaaagaaaagttgatgaatcttgttgttgatgaaatattatataatatgccaaaggatagagcctttgcgaatctatatagtattacgtttccagaagacactgacattgacaatgattatcgttttgatatatcaccagattcatttactgatgacaactgtttcatttttgctgtcagcaatggtgagaaagtgcgaattctggcagccgagttgtattacaatatagaagagtcaagacatgaagttacaaatgttgatataagtgaagcatatattacaattgatgaactaaatgaaataattgcaaaattggatatatattgatgtcaaattttgcaacgagttattcgcccggctatgccgggcgatgttccacggctggggtggcgaaagccatccagcctttaacctgcacacatttcgaccctacgatttttcatggttttcagagaaataggaccattttacatcgaaccaacgagccgatatagttggctcatggtacatctttccgagtccggccggaaaacggcaacacgggcggtcgtggcgcgttacagaggcaagaggatgatgggagcggcctcatggaaacaggatgaaagaaaaccgccggatagggactcaaaaaccgtagactgcctggtagagtaattttgtagctttgccacatcgaaaaagctttttatgtgggcgagtgaagcattttaggtagcagaattccgaaaatgagaaaagctgggtgacgccaagccacccaggagattatttttcgacctttgaaatgaatgctgacagtaaggaaccagtaagaaaaatgctctgattaagactacagagccaggcgaggccatatacacctatgcatacgatgccatcaaccggctgacagaaaaggtgaacccgttaggcgccgccacaaccatattctacatagcggaatatgatggtagcattcgcccagctagtacagcattgcttaaatatcagtgattaaattactaatggtatcccggcatatgtccacttaaatgggtgtgctgtaagattgtattgttcaataaagcgcaggatgcttgcttccagttcttctattgataggtagcttttccgcttcagcagcttccggttaatgatgccaaaccatatctcaatctggttcatccaggaactgtgtttcggagtatagacaaagcggatccggtgggaagggtcatgcaggaaatccgctcggctttccatacttttaaggatccctgttttcccttttttgcccagttccacgccaagggcacaggcttctgccacaaagcggacaagggcttccgatttatgggtgtttaggccatcgcatataaatgtccatggggcttgcgggtctgtccctaccaatgctttcacggcttccacaaaatcctcttctgtgcgtgtggagtttaaatacggcatttccatacggcccgttgcaacatcaaagaacccgatgaggctggtcgtgccatggcggatatactcaaactccattttggcgcactggccgggtaatgggagcttgtcaggatatttatgttccagcgcttgtaccccggtcatttcatccgtggaaacaatgtgtgcaccttcccggctttgttcctgggcactctggtacaggccgcagatttcgtttactttccgcgcaaaagattccggggcttccgtcttttccgaagaatgaagccagtaacggattttgtggggatgtaaatctacctcatttttaaaaaacggctgacagatttctcagaaatctgttcagcgatcccctgctttttaatttctgccactaacagcgggagactccactggcttacttcgtacccaaaatcatttgggttgctgcaggcaaggtcgatgatccgcatgatctggtccggcgtaaaaacagacggggcaccggggcgttttttatcggacaggactgcccgtatctcatcttcaagctttttcgggtcgtccatttcaatcctccgcaaggctgggagcgccgcgaggaaccgactgcgccaggtggcaacattattataatgaagcccgacctgtggtgcaatattctggttgagttccccctgtgacgcaagcaggacaatgctggctcttttgaccagtcctgacggaagggagcggctttttgaaaaagcagataatatgtttttcatggcatcagataaaaccgggatagtatcaattgttttccttcgcataataacccatccattctttagtgatagaattattatgcaccgactacaataaaaaagcaacgtctattcattattattttggcaatgctgtactagtgggcgatgtcctccgtctgggtggcatcaagccacccagattttaacctgcacacatttcgaccctgttattttccggtctgctggtacatcttccgatcatgggtggaaaaacggcacacgggcatccccctgatttttcgatgtttcgggcactttgggttttctggcgataccactatgtgacaaaccggtctgccaattctgtataatttcacaaacattcagaactgttcccaaatgacttgcagatgctccttttcagagttaacatacgacaactccgacaggagaaacgaaaaggaaggattcgagacgagaaaagaaaatatcatttatgtgggaattgacctgcataaggaaacacatacatgcagcggaaaacaaaaacttttgaagagggattcacaaaaaatactctgtaccgcttcctgaacatcgtgaaaacaaactggcagcgttttactgcgctcttgtcttcgaggatcatcaaagttttcatgaagccgctcacggacgaaaagcggaaggacgtcttcattatagatgacagcctgtttgaccgctcccactccaaaaaggcagagctcctggcgaaagtgttcgaccactgttccatgaagttcaaaaaaggattccgcacgttgaattttacagctttttgtgtataatataagtagcagaaacaatgtgaaatcaaggaaggagctgaaagaatatggcaaatattttaccagtatctgatttgagaaattataacgaagttctgaaaaactgtcacaaaggagaaccggtatatctgactaagaatggcagaggacgatttgtagtcatggatattgaagattatgagcgtgatcgtgcagaaaagaagcttctcgtgaagcttcaggaagccgaagaagcagtgaaggacggcgaaggctggcttgatctggacgaactgaaagcacttgtgggggaataagatgttaaaattgcggatcaatccgattgttgcaaaggatctgaagaatatccgggattatatcgctgaagataatgaagaatacgccgcaaagaccataaaggaaatttatggtaaatttgagaatctccagatgtttccgggaatgggttcagatctttccaaacgagtcagctttcggacagattataaatatgcggtatgggaagattatgtgattatctgcaaggtaagtaacgagtatgtagagatttatcgtgtcatcaaccggtatcaggatattacgagaatctttaattgataacagagatttgataacaaattgataacaccgttcagtacagcctgtggacttaggacagtggaacacatataaaaccatatagaaatactcggaacaagaagatcatataagagcatatatttagaagttttactacaagtaaagtatactcaagacagatgcatacgacgatcgcgaggttccgcaccctgcgctttgctccctgcgcggagcaggtcatggcaggggcgccagaattcttatataagtcaggggaaatatcgggggaagcggtcttcataggatgggacaaaaatagaggcggacgccaacaaatacacatttgtatgggcccacccccttttttatgtcaggctagtactacagcgaactccctgagtggcgtgtttcccctttctttggtataataaagaaaaaggggctgatactatgatgaatcctgcgatgttcgatccgattgcattagatgcttggtattccgatgaaaataatgattccttactccaaacggaactggaacactatcttcaaaattatttttcctgtttttcccagcagccacaacgaaggttgttccaaacttttatacaagggcttttgagcccgttggaacgcaaatcgattgagccaattgcccttcacttttccggtgaaaagtatgtcagacccttgcagcagttctttacccgttccccttttgatgagcagccccttctggatacctaccaggagctcctgtccaggcagattggggcaggctgcggcatgttgtccgtggatgacacaagctttgtaaaaaaagggaagcattccgccggggtaaaacggcagtactgtggctgcctggggaaaacggaaaactgccagtccggggtgttccttgcctacgccggggacaaaggatatgggcttgtggattatgaactgtacatcccaaaggaatggttcagcggggattattccaagctgcgtgaggaatgccatatcccggaagaaaagacatttgccaccaaaaaccagatagcccagcgcatgctcaaccaggtaatcaggagcggccggttccaggtccagtgggtggggtgtgatgcagcctatggaaatgaccacggtttcctggacggattgaagctgccggaaggtgtatggtattttgcggcaaccaatgcaaaagagcaggtattcctggagtatccgcagcagtccttccccgaaacgaaaaggggccgtccccgtaagcacccggtactatctaatggcccgacatccgtgcgtgatattgcagaggatccatccctgccatgggaaacggtggtgctggcagaaggggcaaaaggcccaatcattgcagaacggaaattcctgcgttgtttttcctgccgtgcagacggaagccggaattatgtgaagccaggggatgaaatatggctttatctgaggaaatatgcaggtgatgaaataaaatatttcgtcagtaacgcccccgcggacctcccggtaggggaactggacagggcagcaacgttaaggtggccgattgaacaatgctttgaggaatgcaagagcaatctggggatgggggattatgagtgccgcagctaccaaggctggaaccgccatatgctgtttgtaatgataacccatctgtttgccacccagatacgggaaatctttaaaaaaaagcaatcccgttgacaatgccgatggtaatcaaactcatgcatgggataattgtatatacagtaactgatatgaaaaaaatagtaagttaccatatacgcaggaaccataatgcatatctatcacacagaaaaaccaaacttttaaaaagttcgctgtagtactagagtgtgtgttatttctttcgctgaatcgcatgtttggccgccgcggcaatatgctctggcgtcaaaccaaatgattccagcagttcttttggagcacccgaatgaccaaatttatcttccacaccgataaactcaataggaacaggttccgttccaactattacttccgaaacagaaccgcccaagcctcctatcacattatgctcttctgctgtcacgatagcccctgtctcttttgccgccttaatgataatatccctgtcaatcggcttaattgtatgcatatcaattacacgggcatttatgccttccgcttccagaatcttctctgccttcaatgattcctgaaccatcaggccacaagcaataattgttacatccgtaccgtcagccaactgtacccctttaccaatctcaaatttataattctcaaaattgtccgttacgcaatccagggcgcagcggccggttctcaaataacatggcccttcatattccaaaactgcctttgttgccaaacgtgtctcatgagaatcacagggcacaattactgtcatctttggaatcgtacgcatcaaactgatatcttcgatgcactggtggctggctccgtcctcacctacggtcaagccggcatggcttcctattattttcacatttaatcctggatatgccacactgttacggatttggtcataggtacgccccgctgcgaataccgcaaaggtatgtaccagagaaacagccccacaggtagcaaaacccgccgctatatcaaccatatttgcttccgcaataccgatattaaaaaagcgttccggatatttctccgaaaaatactgagtcattgtacaactcttcaaatccgcatcaaagacataaacattatctctatcaccaaattcttccaatgcgaggccatatgctactctagtagaaatattttcgcccattttatcagtcctccaattctgcaattctttcgtcaagttctgcatatgctgttttaaattcttcctccgtgggttttcctccgtggaagcgaacctgattttcaaatatggacactccttttcccttaacggtatctgcaacaattaccgtcggcttcccacctgttgaagatgccaattcaatcacattatgtatctgttcgatatcacttccgtctatttccattacattccacccaaaggctctgaacttctctccaattggatagggtgacatgacctcttcaagggagccatccaattgcaatttattattgtcaacaaatgcgattaaattatccaccctgtaaaatccagccgccatagccgcttcccagatctggccttcctgaatttcaccgtctcccataatacagaatacgcgatatcccagttttctgctttgtccatacatagccatgccaagtgcaaccgacaatccctgtcccaacgatccccctgacatatcaacccctggaacatggatttccacatgtcctgaaaggtcactgtcaattttcctaaaagttgcaagatgttctggtttaaaaaaacccttcatcgccagagccgtatacaacgagggggagcaatgtcctttagataacaccaatcggtcacggtctatcttctttggctcatttatatctacattcatctcatcaaaatacagaaccgataaaatctccgctatggagaatgatcctcctatatgtcctgagcccgcggtttcaatggtctgtaatgcaagtttacgcattttataagcctgcagttctaattgtctttttaatttaccgtccattactacaaaatcctcctgaaatattaattaacagtacttatttggatgcattctgttttttctgttttaggatatcaaaataaacagcggaaatgataatcatgccctttaggacaaattgccaatatgaatttacatgcatcaaattaagaccattggaaatcacgccaatgattaaaactccaatcatcaaaccaccaactgtaccggtaccgccaaagaaggatgttcctccgagtactgccgccgcaatagcatctgtctcatacccttctccggtcgaaggctgaccagaggagagcctggccgccaggacaactccacagaatcctgcaatcgttccgctaattgtccataccagaatttttatctttttgacatcaattccggaaaaacgggcagataattcatttccaccaaccgcgtaaatatgccgcccggttcttaatttgtttagcaagaaataatccataatcaggaatattatcatatagataaccggatatggaaccactcccagagaacccgtcccaaacgcgctaaaattcgtattcttcgtagttaccggagaaccatttgcaatcagatatgcggctcccctgcatacagactgcattgccagtgtcaccacaaaaggatggattcctgtatatgtaatgatgacgccatttatcaagcctacaaatgtccccaccaggattccaacagcaatacccatgggtatggggagtccaaagctttcaaaggtcataacgcacatgactccactaagggcagccaaggctcctcctgtcagatcaataccagccaatataatagcaagctgtactccaatcgccagataacagttagtagcgcaagttctcaataaattcaccatattggttttagttaagaaattatttccaaaaattgcaaaaagcgtgcccatagcaaataaagcaataaggataccgcagtttagcctgaaatagttacgtgttgcgcgaaccatagcactattggatcttctattcatttttgttcacccccattgcgtatgttaaaatcatctcctgagaaataccatcttggtgtgccagctctcctgtaatccgcccttcatgcattatcactacacggtcactcatattcataacctccggcatttcggaagaaatcaatataattgccaatccttcctttgccaggttattaatgatagtatatatctcagctttagcccccacatcaataccacgtgtaggttcatccagaatcagcacctccggatccgttgccaaccactttgcaagcaacaccttttgctgattgcctcctgacaaagttgaacaatttacattaggggacggtgcctttattttcagtgcatctataccctgttcaacaatccctgcttccttatcagcatctacccgcatccctctcatgaatcggtccagaacaggaagggatatattaaatgcaattgtattctttaataacagcccctctgttttacggctctctggaacgagggcaacacctcttttttgcataaacattgggtctggcttttttaccaattcgcctttcagatatatctctcctgaatccaaaggatccagtcccataacaactttcatcaattccgaccggccagcacctaccagaccgtaaaaaccgagtatctctccttttcgcacggaaaaactgcaatttatggctctttttcctgcacatatatttctagcttctaacacaacctgtcccagctcattaaatgtccttacataataatttcccaagtcccgtccaaccataagggatataagctgcgcctctgtacattttttagattggagttcacccataaattctccgtcacgcatgatcgtaaccgcatcacacaactgaaacacttctgccattttatgcgtaatgaacacaatccccataccctgcttttttaaatcgccgacagtcttaaaaagtatgtccacttccttttctgaaagcgaggatgttggctcatccaagatgagtatctttgcatttaaggaaaacgactttgctatttctaccatctgctgctgtcctattgaaagttttccgacattttcattaggatccacttcaaggccaactcgttccaataagggtcttgcggcctctgccatcttatctttatttaccattccaaaagaattcctcatttcacggcccagaaagatattttctgcaattgtaagatacggttctagcgcaagttcctgatggataaatgccacccccatattctgggagtcgtggactgagtggatactgaccatctttccttcgatatatatgtcgcccgaatccgctgtaaatacgcctcccagcacattcatgagcgtagactttcccgcaccgttctcacccataagccccatgacctcgccttcatgtacggtaatcgccgcattattgagcgcacgtacacccggaaaagtctttactatattttccatgcgtaaaagctcttttttcatcttctatgctccttactttgttacaccttgacaattcgaaaggggaaaacccccataggtcttcccctttcgagagcactcttcatgcaaactggttgggacttactgccaatctgaaatatcaaaattaccaatattatctgctgtaatcagttcaaccggaacaactatttcactttccacagtctcgccagccaagtaggagagcgctacatctaccgcaccagctccaacaacagacggctgttgagccgcagaaccggttgcagaaccatttgccacataactcataaaatccggattcccgtcaacaccatatattacaatatcagacctattggacgctgcgcacgcttgtacacagcccagcgcagccatatcgttgatgcaaaagaagccagcaagcccgctgtcggctgtaattgcgtcttcagcaaccggcagtgtcgttgcagtatctcctgaagtatcagaagtccctataatattaaaataatcgccaatggtatccctaaatccctgctcgcgctgtacacacgcagttcccgaaggctgattcataatataaattttagatccctcttccagcttttccatcatattttttgcacattcaacacccgccgcatagttatcagaagcaatcaccgataccactaaatctgtgcgatctgcagcggtatccacattaacaaccggaatgttggcatccgcacacgccaaaagcgcttctgtacatgcagtacaatccataggcgccataatgattgcatccacttcctggttaatcaagtcataaatgtaattattcatggttgcctgatcgctttcagcatctactgtaaccaactgtctgcccggatccattcccttatcagtcatggcatccttgataccccccatcatagctgtccaaaatggattattcatcgttgttgggacatacgcaatcgttatatctgatacaactttatccgactttgcctccgctgatgcagccttatcggctcctgatgacgtttcctctttttcagaagacacttccgccgtctttgttggttcgccgcttcccgcatctgtgccggaacttccgcatccagctaagtttgcagccattgccactgccatcataatgctcagtacacccttctttttcatatcatcttctcctttttaacatgttttatatctttttatcttttcccgcgcgtaaaaaagacaaatagtatcctgtcagcataatgcctgccgaatcctttccagtaataggttgtttttaaacagcttttccagcgcaatataataccctcccagcaaaaccgtatcctctttcagctttgtgcatcttatggaaacattttccattatagatggatggacgaactgactgactgaccgctgtaccttctcgaggaattccggcaaatctggataatccgctcccaatatgacacagtccgggttgataatataaacaatactggcaattccatatccaagcatccacgccatcttatcaattgcataaaccgccagcgggtcaccatttttataagcatctaatatttcccaataggagcttttttcggttaatggactttccggaaattcataaagacgttccaacatataccgcactgcgctttctgtgcccgcacagtattcataggtaccctgtatcccattctgcacatgctttccgttataattgatacccatatgtccgatttctccggcgattcccaactgtccctctacaatttttccattaattataattcctgccccgatgccaaatcccacggagcccagagcaactaaactgacatgcctatctgtctggcgttcttcggcacatttccactcagcataggctaataattttgcatcgtgttcagatataatagggcggccaaaagcctcctccagttctttatgtatattgacccagcttaactgctcaaatcccgatacaaggaattcttcccggtctacatctttatctttacggatatatggtcctggtaatcccagacaaatttctatcacacggtctttaccatactgttctatcagattctttcccgtctctttcagccttcttattatttcataaatatctcttttttccaaaaattcaaatcgtatatgattaatcatatgtccgtcaacggaatacacgctaactcggtaatctttccgattaatactaatcgacatgatgtaaattccgtccagtttaaggcaaatcaattcaccacgtctccccgaagcgctttctccatccacagcaataatacccaaatctaaaaattcatttatgatattggttatggttgccttctgaagtccaatccgcgccgaaaggtctgtccttgtcatacttccattttccagaagggttttaaggacaagagtacggtttgtcttctgcatttcattactattcattccatacttcataatcagccatatcctcctctctatttatgttcattattttaatatataactaaaagttttggcaatatagtttatttaattaacttaaatatcttttcttttgtatatattacattattattttctatttgtcaacatatgtttgactgttttttatattatagtgttcatttaattaactatatattcttaatatacttaaagcccctgcttttgcgaccgaactcacagcagggctgaagctctttcattatcgtagcctgaatacaggaaaaggcaggagaaaatctatgctcctgccagtacatatctatttttatccctatctggtttaacacatcacggatacccttacaaaaaatcgctataactatggaacaaaaaagaacttcacaaacaatcggataggggagattttaacctccccttccacaccacgtagcgtaccgttcggtactacgcggttcaatagtttactcggactttcagatagtgggcagtcatatcgggataaccaagtctgtccactatgattcttttggtgagtgccgagttgagcattcccgccgctctccacactccctttcggcagttcgccatctcatgcaccttccactctggtaaatgtaacgcccgcaacattttatatcttgtgcgtaccttcttccattgtttccagtacaccgctcggattctgtggcgcagccactcatccgtctgttccatcaggcttttcatgtctgcatatcgataatagttaatccatccccttgcatagcttcggcgtttttcttccctctcctgattgctccatttgttccctctggttgtcagctcccgtatccggttcttcatttttgccaccgacttcgggtgtatcctcatgcggcatttccctttatgccggtaaaagccgtagcccaggtattttatcttgctgacgtggctctctgtcgttttctgaagattgactttcagaaacacttttcctgtgatgaatggcacaatgttttccatcgtcctctctgcgcttttcctgcttttgcacagaatcaggcagtcatccgcatacctcacatacttgtgtcccctgcgctccagttccttgtccaactcattcagcatgacatttccacataagggacttagcgggcctccctgcggcacgccctcggtcgttgcgtgaaatcctccgtcctccattactccggctttcaggtacttgtgtatcagcgagattaccctcccgtccttcaccgtcctcgacagcacctctatcagcttgctgtggttcaccgtgtcaaagtaggattgtaaatccatgctgaccacgtagacatatccttcgttgatatatttcctacatctttccagtgcgtcatgcgcccctctgccgggacggaatccgatgctgttgtcagagaactgttcttcatataagggcgtcagttcctgtgcgattgcctgttggattaccctgtctaccactgtgggtatccccagtttccttgtttttcctttctcctctttgggtatttctacccttcggactgggtttggcttgtatttgccttccctcacctgctcgaccaattcggactggtgttctctcaggtagggtagaagttcatccacctgcattccgtcaatcccaccaacgcctttgttcgttttgaccttcttataggcggcatttagattgtcgcttctaagaatcgtatctagcaggttgtccgtccgaaagtccgtgttggtgtcggggttcccggtaatcctttcatgggcgtactctcctgtttcccttccctgttccgcaggtatctctcgcaggtagtcctcaatatgaagttgtctgtacttaattccatgtccggtttccatttggtaacgacacctcctactgttcagtccttcccggtgcgtttgcgaccgcccggtactatgacctctgctgacttctcacggcaggctttactccgtgacagcgaatgttttatcgccactttcacgtccgtgagacctccccgggtactcacacgttctttcccacttatacctgccccgtttactgctggcgttccgtgcagttattggactttagtttgttaggcaacctcatccacgcttcacagcctatccggacaacttttacaggccagtggtttgcctccggcttccttcagaccccacctcacgatgacgcccttgccattggctgcacccttcccactgccgggcgggtcagggactttcacccgttagaacgtgcgcccgccgggcgcacgtaaaaacgagatgtattcctcatattatacacctcgttttattcctagtacattattcaagacagcttttaacccgagaccctgcagacactaaacccctttcccagccttctcatggcttccatgacacatagaggaacccgcgcaacctccgcatcctcccgcacatcctccgcatcccttgcctgacttcttgtcctttatcatgacacggacgattgcccctgtgagcaggaccaatatgaccagaatgattaatgtcgaaagattcatttgtatcttctcctccttcctgtttatgcctggacagacaccggttctgaccctttcccaatctttttacaggcgctcttataagcactcttacaggttagccatttctaactccattcccagattagcactttctaactctcttgtcaatcgtttttttatatgttacacttagaactatcatactaaataaacgggggtatttacagacttgaaaatacaggaatcagcagagaattatctggaaaccatactcatgctggccagggaaaagccctatgtccgctccatcgacattgccaatgaacttgggttctccaagcccagtgtcagcgtggccatgaagaatctccgccagaacgggtatgtccagatggacgatcaggggcatatcacgctgacgccttccggacaggccattgcggacaccatgtatgaacgccatacgctgctgtccaactggctgatttacctgggtgtggaccccagaacagctgctgaggatgcctgccgcatggaacacaccctgagcgctgaaagctttgatgccatcaagcgccacatcacccacggccatgaactgccggattaggaggaaacctatgctcaaagaccttgttaaacaatgccgctcttacagaagattctatcaggataccgccatcccatacaatgaactggctgatatggtggatacggcccgtctggccgcttctgcctccaatgcccaggccctcaaattcaagattctgtgcacaccggaggaatgcgccgatatctacccgtatattgcctgggcgggcgccctgaaggattggggcggaccagaggagggcgagagaccctccgcctacatcgtcattgcctgtgacctggctatcggaaaaaacaagcagtgggatgacggaatcacggcccagaccatcatgctggctgccgtggaaaagggatacggcggatgtatgattggcagctgcatgcggtcagagattggccggctcctgggacttgatccggagcattacagcatagacctggtgctggcccttggaaagcccagggaagaagtagtcctggtgccggtaaaggaagatggatccactgcgtactaccgcgacgggaatcaggttcactatgttcccaaacgcagcctggaggacatccttctgtgatgttcctttcatgatttggttttcagcactgcggcattatattctgccatgaataaaacaaagcgcatcgggcggacatgtattttacatgtacccgatacgcttttttcatatttccggaaggtaactatttcttcgctgccaaaaggctttacgcttattacagtgacagggctctcattgcgtttagtatggcaatgaccgacacgcccacatccgcgaacactgcctcccacatattggccgcgcccgcggcgcccattaagagcaccactgccttgacccccagcgcaaaggcgatgttctgctttacaatggacagggtctttcgcgatatgcggaccacatccgcgattctggcagggttatcgtccataagcacaatatccgccgcctcgatggctgcatctgatcccatgcttcccatggcaattcccacatccgccctggagagaacaggcgcgtcattgattccgtctcccacaaaggccagcctgtgctttcctgtctgccgcgacagcagctcctcaacctttgccaccttgtctcccggaaggagctccgcgtggacctcatccagtcccagcctggccgccactgcttcccctacctctttcttgtctccggtgagcatgattgtccttctgacacccacctttttaagattcctgattgcctccaatgcctcatccttgattgaatccgatatgacgatatatccgcagtacacgccgtccagagccacatacacaaccgtgcccatgctggtgcattcctgatactgcacattcatttctttcatcagcttgctgttgccggccagtacggtatgaccgtcaatctccgcccgcactccatggccggatatctcccgggcattgctgacacggttcaggtccatggtatctccccacgcatccttgatggagcgtgagatggggtggtctgaataactttccgccagtgccgccagttccagcagggaacgctttttctcatcggaaggctggctggccgcccacaccctggtccgcggcacctcagacgcctccgggacagggctgccggccactgcgtgaatctcagtcaccttgaattctcccttggtcagcgtacctgtcttatcaaagacaatggtgtccatctcagacagagcctccagatagttgcttcccttgatgagcacgccctttttggaagcagcgccgatgcctgagaagaagctcataggcacggaaatcaccagggcgcacggacaggagattaccagaaaggtgcaggcccttctgacgccctcagaccaggtctggccaaagaacaggggcggaatcacagccaggagcacggctcccatcaccaccaggggggtataatatctggcaaaccgggtgatgaagttttccacatgggcttttttactgctggcattctccaccagctccagaatctttgccacggtggaatcatcaaactcctttgcgacctgcacccgcagaaggccgctgccgttgacacagccgctgatgacgtcgtctccctccgctaccttacgtggcacggactcaccggtcagcgctgaggtatccaccatggagtccccaaacacgactttgccgtcaagaggaattctctccccggacttgaccacgatgatatctcccacctgtacgtcgtccgggtccacctgctttaactgcccatcctcctctatgttggcatactccgggcagatatccataagctcagtgatggactgcctggaacggttcaccgcgtagctctggaacagttcgcccacctgataaaacagcataaccgccacagcttccgaatattcccccacgccaaaggcgccgaaggtagccactgtcatcaggaaattctcatcaaaaacctgtccgtttcggatattgcggaatgccctgtatacaacatccaatccaatcagaacatagggaatcaggtacaaagccatctttccccacagcccaagccattccggcaaaatctccatgtggtctgacactgccagggtaatgtaaatgatgaaggctgctatgatacgggacagcattgccttttgtttcttagtcatatcgttttcctttccggtgccgtcctgctgcgtttaaagctggatcacgcagtcaggctccaccttcctgcatacagacactacttccttcataatttcatcgaacctgctgtcatctgcttctatggtcatcttctgggtcatgaagcttaccgttgcatctgagactccctcaatcttcttgattgcttcctccatcttggctgcgcagttggcacaatccaggtcctgcagtttgaatttcttcttcattcttattctcctccatatttgttattttatttatgatccgttttccatccctgcaccatcggcatctgccgcaaaacctattcctctatatgctccataccctggttgatgatggtcctcacatggctgtccgccagcgaatagaatacggccttgccgtccctgcggctcttaaccaggcggttctgcttaaggattctcagctggtgtgatatggctgactggttcatattaagcagctgcgcaatgtcgcagacacacatctccgcctcaaagagcacatacaatatcttgatcctggtggaatccccaaacaccttgaatatctccgccaggtcatatagcttatcctcatccggcatcttgtcattgactgcccttaccacatcctcatgaacctggtaaaaatcgcagcattccacatcattcattgccatggctggtaacctcctcttcttatttttatttgattaaatgaatgtgtgttcatatgtttatatctacattatatgctcagattttaaaatgtcaactggaaaattaaaaaaattagaaaatcccactcagtcaggcaaaatcggataggggagattttaacctccccttccacaccacgtagcgtaccgttcggtactacgcggttcaatagtttactcggactttcagatagtgggcagtcatatcgggataaccaagtctgtccactatgattcttttggtgagtgccgagttgagcattcccgccgctctccacactccctttcggcagttcgccatctcatgcaccttccactctggtaaatgtaacgcccgcaacattttatatcttgtgcgtaccttcttccattgtttccagtacaccgctcggattctgtggcgcagccactcatccgtctgttccatcaggcttttcatgtctgcatatcgataatagttaatccatccccttgcatagcttcggcgtttttcttccctctcctgattgctccatttgttccctctggttgtcagctcccgtatccggttcttcatttttgccaccgacttcgggtgtatcctcatgcggcatttccctttatgccggtaaaagccgtagcccaggtattttatcttgctgacgtggctctctgtcgttttctgaagattgactttcagaaacacttttcctgtgatgaatggcacaatgttttccatcgtcctctctgcgcttttcctgcttttgcacagaatcaggcagtcatccgcatacctcacatacttgtgtcccctgcgctccagttccttgtccaactcattcagcatgacatttccacataagggacttagcgggcctccctgcggcacgccctcggtcgttgcgtgaaatcctccgtcctccattactccggctttcaggtacttgtgtatcagcgagattaccctcccgtccttcaccgtcctcgacagcacctctatcagcttgctgtggttcaccgtgtcaaagtaggattgtaaatccatgctgaccacgtagacatatccttcgttgatatatttcctacatctttccagtgcgtcatgcgcccctctgccgggacggaatccgatgctgttgtcagagaactgttcttcatataagggcgtcagttcctgtgcgattgcctgttggattaccctgtctaccactgtgggtatccccagtttccttgtttttcctttctcctctttgggtatttctacccttcggactgggtttggcttgtatttgccttccctcacctgctcgaccaattcggactggtgttctctcaggtagggtagaagttcatccacctgcattccgtcaatcccaccaacgcctttgttcgttttgaccttcttataggcggcatttagattgtcgcttctaagaatcgtatctagcaggttgtccgtccgaaagtccgtgttggtgtcggggttcccggtaatcctttcatgggcgtactctcctgtttcccttccctgttccgcaggtatctctcgcaggtagtcctcaatatgaagttgtctgtacttaattccatgtccggtttccatttggtaacgacacctcctactgttcagtccttcccggtgcgtttgcgaccgcccggtactatgacctctgctgacttctcacggcaggctttactccgtgacagcgaatgttttatcgccactttcacgtccgtgagacctccccgggtactcacacgttctttcccacttatacctgccccgtttactgctggcgttccgtgcagttattggactttagtttgttaggcaacctcatccacgcttcacagcctatccggacaacttttacaggccagtggtttgcctccggcttccttcagaccccacctcacgatgacgcccttgccattggctgcacccttcccactgccgggcgggtcagggactttcacccgttagaacgtgcgcccgccgggcgcacctataaaaggagccggccccatgggaccagctccgtctgataatcctatatatgatactgctcttcctcagccgcaaccgcaatatgcagctcctccagctgtttctcatccacctgtccaggcgcctccgtcatcagacaggaagcatccttcaccttagggaacgcgataacgtcgcggatactgtcagctcccaccattaacatcaccacacggtccaggccatatgccaggcctgcgtggggcggaacaccatacttaaatgcctccagaagaaagccgaactgctccttggctctctcaggcgtaaagcccagcacttcaaacatcttggactggatatcggcctggtggatacgcacggaaccgcctcccatctccacgccgttcaggacgatatcataagccttggcgcgaaccctgccgggatccgtatcaatatactgtaaatcttcatccatgggcatggtgaacggatggtgcatggccacgtaacggccctcttcctctgaatattccagaagcgggaactctgtcacccacaggaacttaaagtcatccttcttaagcaaatccagctgtctggccagttccagacgcaggttgcccaggacatcaaataccaccttatcccggtcagcggcaaacagcagcaggtcgcccggctttccgtccatgaccttaatcagggcattcatttcctcatccttcatgaactttgcaaaggaggacttgaaggtgccgtcctcgctgattgccacataggcaagtcccttggcgccaaagcccttggcatactccaccagagcgtctatctttttacggggcatatgtccctgtccccgggcattaatgccgcggacgctgccgccattttccagggcgcccttaaacaccgcgaactcacagcccttaaccgcctccgaaacattcttaagctccataccaaaacgcaggtccggcttatcagagccaaagcggtccatggcctcctgccaggtcatgcggggaatgggcagctgcacatcaaaattgcagatttccttaaacagcttctttaacaggcgctcatttacatccagcacatcgtccacatccacaaaggacagctccatgtcaatctgtgtgaattcaggctgacggtctgccctcaggtcctcatcgcggtagcagcgggccagctggaaatagcggtcataaccggaacacatgagaagctgcttgaacagctgcggtgactggggcagggcgtagaaggaaccaggatgcacgcggctgggtaccagataatccctggccccctcaggcgtactcttaatcagggtgggagtctcaatctcaaggaatccctcagatgccagaaaagctctggtcagggtagccacccggctcctaatcataagatttctctggatatccggtcttctcaaatccaggaaacggtatttcaggcgcagctcttcctttgtcttgctgttctcctcaatggggaagggaggtgtctcggactcggaaagaatgcgcatggaattggccctgatttctatggctcctgtggccagattggtatttaccgcgccggagcgggcctccacccgtcctgtaacggcaactacgaactcgctcctcagcttttccgcctttgcaaagctctctgcgccgcagtcattttcctcaaatataatctgaaggatgccggagcggtccctcaaatccacaaagatgatgccgcccttattcctgctcttctggacccatcccataacggtcacttcctgaccgatgtgggcagtggtcacttccgtacatctatgggtacgctttaacccaaccattgattctgccattgtcttatctcctttattttccttaattcttcaggctttccttataaaattccttaaactccgtatacccttccctgcccagctgttccttctggaacttcttgttcttattcatctgggcaaccagaacccgtacgcccttctttctctcttccatggcctcgcggattacagctgccagcctggcgctgtccacgcccttctcaaagagaaacgccttactggcagaagcgccgggcacggtaaagccattgtccataaggatggttacaatgcgctcaaagcctatggagaatccgcaggccggtgtctccatgcctgtaaactttccaatcatcttatcgtagcggccgccgcctgccacggaaccgccaaagccctccatggagacctcgaaaatagtccctgtataatatgacatgcccctgaccagcgtggggtcgaactccaggccgaagtcagcctcagccacctcagccaccgtgtccatgatgtgggccaggccctcgcttacattggcgggcatcacctctgagagcatctgtcccagggcccttaccccggctgcatcctttgtcacgttcttaagcatgtccagatatttgcttacgctctccggacaatagccggattccagaagctccttctccacgccttcatacccaatcttatccatcttgtccagggtaataaatacctggtccatggactcctccggaaaaccgcagtacagggccatgccccgcaggatgcccctgtcattgatacggacagtaaagccgttgtccgggcagattcttccaagggcagtggtggtggccagaatcagctcaatttcagccaggctggtggcatctcccagaatatcgatgtcacactgtacaaactggcggaaacggcccttctgggggcggtccgcgcgccacacgcttcccatctgaagcgccttgaagggacttggcaggttggctgcattgttggcgtaatagcgggaaagggggagggtcaggtcatagcgcaggccgctgtccaccaggtcattctcttcctttgccccttccaggttaagcttgtcccctcttttcagtatcttgaaaatcagcttctcattatctccgccctgtttgctggtcaggttcccgatgtgctctacgcagggtgtctctatctgggtaaatccaaagcttttataggtctctttgatttgattcatcacgtactcacgaatctgcatctcagcaggcgtgatatctctcatgccggtgaccggcttctttgctaatgccatacgcgttctccaatcctgatttttcttcaatatctttattttaagcatcttttatgattttgcaagtgttttcattgattttttcctccctgtgagtccgcgccgccgcgggcttacagttaaaggatgcgctccttgcgctgtatcatctcgtcaatcctgctgatgtactgctccacttcctttacattctcgcagcgttccctgcggttctcagaaggaaataccaccttggtggtggttcccgcgccgcaggcagctatggtctgcatctcctccatgataaggatgttgtagatacaggctttgccgggcagggagtaccctacattctcaaaattaccggccatgtttttctggcggtacagataatagggctccatacccatctcacgggcgcaggcagcgctgagctcgatcatctccggggtgttctgaatcttcagcccgccgtactcctccctgaacatgttgagcctggccgccctcttgatggccagggaatggaccgtaagggaatccgggcctagagcccgtacctcctccaatgtgcgccgcacatcatccatattctcctctggaagccccataatcagatccatgttgatgttgtcaaatcccagctcccgggccatgtaaaaacgctccttcaccatctccacggtgtggtggcgcccaatgaggtccagggttttctggttcatggtctggggattaatggaaatacgggtaatgccgtggtctctcagcaccttaagcttgtccggggtaatgctgtccggccttccggcctccactgtaaactccagcacgcggctcaggtcaaagagctgctccagcctgcttaaaagggcttccaaatcctccgcgggaagggacgtgggggtgcctccgccgaaatagaccgtgtccaggggccttccctccatcttccgggccgtatattccagctccttaaacaacgcctccagataaagacctgtacgccccctccatttttcaatgggataggaggtaaaggaacagtacagacaggtggtggggcagaatggtatccccacatacaggctgtagccccgctcatagtccaatggttccagaagttttttctccctggcggcaatctcaatgctcaaatctatcttatcatcgctggcaaggtaggtctccttcataaaagaacggatatcctcctccttccagccttcctccagcctggtaagggctatcttggtggggcggatgccggtgagggaaccccagggcatttccttgcccgtgcgcgccgccagcatgaggtaaaacattttctttatgacattcttggtggcggaatggtccgaaaggtccgagggacgggtgcgggaatccgataacttccagccctttaacccctccggccgtgatggggcctgatcttttcccggctccagcccggtcccgttcccgcttaagtcctctgaggcggctccattttcccatatacagacggaaaccgtgccatctcccagccgtgtctccacgtaaaagtccaccccgtcttttacctcatgggcataagcctcacctggataaaaggacatcagaagttctctgatgtcctgttcgtaccggttatcctgtattaaaagtccaatcatacaaaacctgctttctataataaagccttcttttattcctgtttgaaggcatccgggccttttacccggaggatgttgtctcttaccgtaagcacgggattccccttcttctcaaacccgatggtggtgggatctccgtgtcctgtatacaccatggtatcatccggcagtttaaacagtacgtccacaatggagctgacaatacgaatcgtattccctgtgggcaggtctgtcctgccataggaaccgcaaaacagggtatcgcctgcaaagacaatgccctcatccggcagatagaagcagcaggagcctgcggtatgtcccggtgtgaacagcaccttccacctggttcccaaaagctccagctcctgtccgtcatggagaagcacatccgcatgaaggctggtctgcgggcctctgaatcctccggtcatattaagctttgtatcggccagcatattttcctctgtctcatatgcatagacctttacccggaatgccctgagcacatccggcacagccatgatatggtcaaaatggccgtgggtcagcaggactgccgtgagattgattcccagctcgctgcacatattcagaatatagggagcgttgtcagccgggtcaatgaccaccccctccttggcctgctcatcataaaccagataacagttggtactcacctgtcccagtacacatgtcttaatcctaatatcgctcatttccttcccctttcatcacatctatcctgttgttctctctatatccagaacgccctcaatctggcgtatcttatcggtcagccggttcagctcatcggtcccatgaatgtcaaatgtcatgatgatggtggccttgccctgcttgctggtccttacattcatggaagtaatgtcaatctgcttttccgtaaagaccttggatatatctgcaaacataccaatccggttattggcaaatatcttgatttccgtggagtactgctcattgctgccggctccctccgccatctgccattctgcgtcaatcatcctgctgcgttcatcctccggcaggttgatgatgttcacgcagtccgtgcggtggatggatacgccccggcccctggtgacaaatcctacgatttcgtcccccggcaccgggttgcagcacttggagaagcggaccgccaggtcatggattcccttgaccatgatgccgctctttgatctgcggacgctggcctcaccggaccttcccgctgtgtcggcaattccgctgagcacatccgcatccgtaatctccctctttaacttcttctcccgctcctccagcatcttattgatgacctggccctctttcaggcccccgtgtccaatggatgccagaacggaatcccaatccttataggcataccggttcataaccttttccatgaactcaggcttgccgatttcagaccaattaatgccctttgccttacagtagcgttcaatctggtcccggcccctgacgatgttgtcttccttcatctggctcttgaaccactggttaatcttattcttggcctgggtactcttcacaatgcccagccagtcccggctgggtcccttggaattctgggatgtgatgatttccagctggtcgccgttttgaatcacatattcgatgggcaccagcttgccgttgaccctggctcccaccatcttatttcccaccgcgctgtgtatacaatatgcaaagtcaatgggagtggaaccgctgggcagggtctttacatcccctgacggtgtaaagcagtacacactgtcggagaacagatccaaatcccccttgaccatactcaggaattccttggaatcgtccgtatccctctgccactccagaatctggcgcagccagctgagctttgcctccgcgcttcccgcagccacctgtccgcttccgctctccttatatttccagtgggcggcgataccgtattccgctgtcctgtgcatctcataggtgcggatctgtatctcaaaaggctgcccgttgcttccaatcagggtggtgtgcagggactggtacatattctgttttggcatggctatatagtctttaaaacggcccggaatgggcttatacatctcatggatgacacccagggcagcatagcagtccttcacggtctccaccatgatgcgcactgcgaacaaatcatatatctggtccagagtcttattctggttcaccatctttttatagatactgaaaaaatgcttcacacgtccgcccacagtggcctcaatgcccgcatcctccatatggctcttgacctcgtccacgatttcctggacaaaggcctctcttgtatccttgcggagggccaccttctccaccaggtcgtaatatacatccggctgaaggaacttaagggacagatcgtccagttcaatcttaatcttggaaatacccagtctgtcagcgatgggagcatagatctccatggtttccctggctttttccttttgcttctccggcttccagtactgaccggtcctcatattgtggagacggtccgccagcttgatgataatgacgcggatgtcctttgccatggccaaaaacatcttgcgcaggttgtctgcctggatttccaccttgtccttatcccagtttaactgtgtcagcttggtgacaccgtccaccaggaaggaaacctcggagccaaactccttggtcagctgctccagggtcatgatggtatcctccaccacatcatgaagaagccctgccgcaatggtctccttatccatctccaaatcggccagtataatggccacgcagagcggatggatgatatagggctccccggatttgcgcttctgttccttatgggcctcgtccgcaatcctgtaagccttttcgatcatggtgatatcatccgacggatgatatttacgaattgtattaatcaagtcctgatacagcacttcagggctggtaaagtcggccggcgcttccaattcgatatccagtttttcttttgttccctcatttgccatatgttcggtcaccttttcctatggatagtcaagatacattataattttttttatgtaaaaaagcaaggggcgcttggaaaaaagcggggccgggccggaaggcggtcttttgacacgctctataccggccctgcctcgtcagacttgtcatagacggcaatcccgttttctctgtgcgcttcaccccgtacatggctctgtccgcccggtttatcaggtccttcatgctctcggattccctccggacataacaaaaaggcccatttttattctaacggggcctttctgtaaccaaatctgtttcattttcctacttgccttcataaataatcgcggaatccacatcatatcccttcagatgctcccgcccgttcagccctttcagctccatgacaaagcagatctttaccacctgtccgcccagctgctcaatcagcttcacaatcgcctcggtggtgcctcccgtggcgatcaggtcgtccacaatgattaccttctggcccggacggatggcatccttgtgcatttcaatggttgcctgtccgtattccagatcatattccatggcaatggtctcgcagggaagctttccctttttgcgcacaggcacaaatcccttgtgctgtgcataggccaccggcactccaaagataaatccccttgattccggacctatcaccaggtcgtaatccaggtccttcaccatgtcaatcagactgtccactgccatgtgaagcccgtccgcgtcctgcaggatgctggtcacatcccggaatatgattccaggctccggaaaatccggtatgcttcttacatactcttctaactttttcatgatggtttcctctcttccacattcagattcttaaccgtatccctgataatcagcttattgttcaggtaaatcctccggttgtcgatgattccctcatccaggcgcctgagcagcaccctggctccctctttggcaatctcacccatgttgcgctccactgtggtcaaatgcatatccgaatagcctgacatatcccagttgtcaaagcccaccagggaaacatcgtccggtaccttaagaccggcctccacaatggctgtcctggctccaaaagccatctcatcgttaaagcacagcagggccgtgggccggaaggcgagaagctgttttgccgcggtatatccgctggcataccggtaattgccgctgatgacgggaagggcatccggatccagtccgtggctggtcatggacgtcctccatcccctgcggcgcagccggctggaatccagtcccggatttccttctatgatgccgatgttccggtgtccgttctccagcagatagtccatggcccgttccatggcaagggcctcatccgtggtcacattgggcgcgtccacgtccacggcccggcagatgactgccatgggaatctttttgtccaggacctcattcataaactccatgtcctcgcttcgctgggacaatacgatgattccgtcaaaatagctgggattcagtgttccgggttcgtgcatatcaatacctttaaccactacattatacttgcttcccgcaacactgtaaacccctgtcagcacgtcgtggagcacaaacggcgatgtcatcttactgatggtagagaaatacagccctattacataggatctggacttcttcaggttgatggccgcctggtttggcacataccccatctcctgggccaggcgcagtatattcttcctgctttccgtgttctccactcctatgccgtttaaggccctggataccgtggaataggaaacccctgcccttttcgcgatatcctttatcgtcactgccataatatccccctctttgcaatcccccacaagcgtttacatatcatttccgttcaggcgtacgaatacaatctaactcgttttccgccttctgtcaaatgcttccgcagacacagccgatattttccgtgatgacggccggaccgtcctgtccctccaccttcacgtccttgagaaccagctcctcaatctgattggcgtagattcccatgcggcatatatgggagtcacagccatccatcatggcgggctgcccttccctggcagacgcagcatagctgacgcggacacgctccatctccacccgtccaatccgctgttccggaagaccatacatgtaggcagccgccacatggcagttctccgcctctatatccctaaaacacaggctcttgataaaaggcgttttgtcatccaccggaagcgcttcctttgtgcgcacatactcgctgtgtccgtccgggtcacaaaaatagaaacagttgatgacaaagggggtcatcacatggtccatgcggatgtgttcaaagacaattttgtccaccacggcatcctttcctctgcccctgcgcgtcttgatgcgcagtcctctgtccgtgtgcaggaacatacagtccttgacagtcaggtcctttaccccgcccgccatctcgcttccgatggtaacagatccatggccgtcccgcatacagcatcttcggatggaaatgttctttgacggacatttataggtggaacccatatagatttttcccgactttacggcgatgcagtcatctcccacagagaagcagacgccggcaatctccacatccttgcaggattccgggtccagtccgtccgtgttgggcgaatccttgggactcagcaccttaaggtcaaagaatcttaagtggtcggaaaaatagggatggatgttccagctgggactgttcctcactgtgattccctgaaccgtcacctgccggcacctctccaggaaaatcatcctggggcggcaggccgtgtgtatcaccttgggctcatgccaccagttcccctcacctgtccccgcgttcccgtctatgattccctgtccgtagataacggcttccttcacgttcacgccagttatgatgccggtaaacatgggcagcggattgccctcccatgtgcccagattgtattcgccctgctcgtcatagctctggatcatgccctgaaacacaggaaaacgggtccggtccgtatacgcggacagcaccgccccctcagccagctcaatgttcacattatcctttaaaaacagggacactatccggtaggtcccggccggaatcaggacccggctcttttcagggcaggccataatggcagcctggataaacagggtgtcatcctgaattccgtctccctttgccccaaaatcacgcacatccaatgtcacgtattcactgtccgtggcaaaggaggtcttaaacacaaggccatctccgcttctggcctccacctgatagccggtatccggtttcagattataaatacttgtgacagcttttcctgtttcccggatgaattccccattcagataaatgcggtacatccggctggtttcatatgtgcctccgtcctctatctccagtacggcgcagcgcgcatttttataaatcacctttaaatccatggtattatacctcttttcttttctgaccctctatggccgcaatatcaattcaagaatggggcccctcccaggagagcccccattcccatccaggctgaccctggcctttttatattttaacccttaacaccgcctgccgcaataccgtcaatgaaagaatcctgtgcgcagaagaatacaatcagcgatggtacaatggaaatcagggacatggccaggatacggttccactggaagcccacatctccgtccatggacatgcgcaggtatacggagttcgtatatttctgcatatccgcaatgtaaatcagcggcccctgaaaatcattgttggtccacatgaactggaacagggcgcaggacaccagagacggcttcagcataggaacaatcacgtaccacagtgtctttaatgtgttgcagccgtcaatcttggcggcttcctccagctcctttggcactcccctgaggaactgaatcagcataaatacgaaataggtatccgccgcgaacagggaaggtacaatcagaggaagataggtgttgacccatttccatttgttaaacatgatgtactggggcgcattgagaaccacctgaggaagaaacagggtggacatcagcatagcaaagaaaattttctttcccttaaagtcaaaccgcccgaatccataggccgcgatggtggcggacaccacggtgaaaatcaccttgggaagcacaattttatatgtattaatcagggaggtaatcagggatatcttgcctccatagctcttaaaggcattgctgtacccgtcgaacacagggttcttaggcagaaaccatgcgctggtaaatatttcggagttggtcttaaaggtggccccaaccatccagattagagggtataccatgatgaatcccaccagaatcagcagggtgtagcggattgccgtgctgaccttccgttttgtctctcttgtcatacatccctacctcccttcctcgtctgaataatacacccattttttctggctgataaatgccaccgctgtcagcgtcatgacaatcaggaacagaatccatgcctgtgcgctggccattcccatcttatggcgcaggaatgcattgttgtaaatcagcatggaaatcaaggtggttgcgccgtttggcccgccctttgtcaccaggaacggggcgttaaactcctggaatgcctggcagagctgggtaatcaggttatagaaaataaccggtgtgataaggggtaccgtaatcttaaagaactgggtccacttgcctgcgccgtcaatggaggcagcctcatacaagtcttcggacacgccctttaaggctgccaggaaaataaccattgcggaaccaaactgccagacacgcagaagcacaatcacaaacaacgcgctgttggcgccggccatccagttaatcttgggacctccgaagaatgtgattaccgtgttaatcagtccatccgtattgaacacagccctccagagaatggcaatggcgatggaaccgcccaggatagacgggatataatatgctgtcctgaaaaaatttacacccttcagcttgaagttgaggatatatgcgataaagagggcaaacgccagctttaagggcacatcaaagatcgcatatttgaatgtcacctcaaatgccctgatgatatcctcatccgtaaatatcttctcgtagttcagaagtccggtctttgttattccgttgaacaaatcatagttggtaaagctgtaatacagcgaagatgcaaatggatataccttgaacagaagaaatccaaccagccatggcagaatgtaaagcaggccgatattcaacgcccagaatcctttcctttttttcatacggttacctccaaacctgttaatctaaatagctctcatacttctccctgagcagcgtacctgtgccgcaccccttttggatgatgtatgcaagctgctcacgcgggccaggattccctcctgccagcatttcctttaatctcatgcggaacatgtcctggagcgccctgtaatgctcgtatatttccggggacatccgctctatggtatctatcagcaggaccatctggtccatgccgggcgttttcaaagtcttaaaatatgtaacaatgctgtcgtaattttccctgtgctttactgcttccctatcatccatactatttccgccaccgcctttttctgtcatcagccgcgcctttcccgtctccccccgctgcccggggcaggccgggatacgggccgcccggggcatatccggcggccctgtctgtcatttcaataccaatatccgtcctgaatcctatctgaaaatcagaagttataacaatcgtcaatacccttcatcaaatcctccgctgcttgggcggaagtaatgtcgcctgcgctcagctttccaaataccttgtaatatacaccgtcaggattggccttcaggtcattgtgctcaaacatggggtccagagggaatttggaatgggccagaacctttgcgttggcctccattaccagcttatcaccgattcccttttcctccagaatctttacaccctccgcggagcatggaatgccgcgctcagtaccgcagatttcaattgcctcatcatcatttaataagtagttaatcagcatggccgcttcctttggatgcgctgaatttgcggatactgccagcgccatggaaatcttggtaaagccgccgtcgtaatcgccgaacttaaggaagtctccgataaccagctcctggcccggctttgtggtgctctccgcgattgccttctgtaccttggaaaccgcggaatcccactcaaatacgcctgcatatttgccgtcgattacctttgcgttcttatctaaggaatccgccatatcgccctgaaggatagcgatggtgggaatcacatgggcttcctccagctttgtcataaagtccatgcctgcctgaatctcctcggccgtgtactgaagctccccgttctcaacccatggcttgccgtatacgctctccagatagtataccaggaagatggccctgtcatattccatcatggccagaggataatagtcttcattataagccttaaacttagcgcccgcctccaggagggaagcttcatctgtgggaatctcacatccaacctcatcaaaggtggtcttattccagtagaacagacgtcctgtcagggccaccggcactgccatcagcttgccgtctgccttgcactggtccaggctgtcctgggaaaactgggtcaggtccaggacatcgctgtagtcctccagatttgcaaagttggtcccgttgccgctgtaggatgtaatccagttccagttaatctgcataacatcagccgcatttcctccctgaatggcaagggactgcttctcttcccatccggtccaggctccgtattcgcattccaccttaatgttaggatactttgccatgaatgcgtccactgccttctcagttgcctcatgtctggagtcaccgccccaccagcagaacttgatggtcacgtcctcagatccgctctctgcttccttgctctctgcttccttgctttctgcctgtgccgccgtagtggtcccgctgccgctgccgcctttgcaggctgtcagtgataatgccattacagatgccagggccagggacactgcttttttcaggttcttcttcatcatttctctccctctcttttctttgtctttgcttagatgtttgcaaaggtttgcatcattgctttaaaaattatgcatatctgccatttgtaagtaattacatttagttcattttaagcaaacatgcatcgtttttctttgtgattccatagtatcactatttatatcgtatgtcaattgtttgattcgtatagttttttaatatatttttgtgtaatatatccaattcttttcccgctttttttgtgttaagatagattcaagaataaaaaaatggatttagaggaattcaaagacataatgcactgtgatttccgggtttgtcccgaattaaattgagctaaatcactattgtttttcctgcaaacgtttacacttccattttttcaaagacgccttacatcaggctcagtgtacatatatgtataaaggagagttaagattatgaaaatactggaccgttacatcgaccagctgattgaacagagcacccctgaggcccccgtgtggaacattgaaaaaatccgggagggttcaaaatctacctggaactatattgacggctgcatgattaaggccattatcgaactctaccttataaccaggaaccgccggtatctgaacttcgcagacgccttcaccggccgctttgtaagggaggacggctccattgaatcctatgatccaaaggagtataacctggataatgtaaacgccggcaaaaccctgttcgacctttacaagctgaccggaaaagaaaaatacaggaaggccatggatactgtatacagccagctagaggagcagccccgcacatccacaggaaacttctggcataagaaaatctatcccaaccagatatggctggacgggctttacatggcccagcccttctatatgcagtacgaggcagagtataacggctgcaaaaactgcgaggattcataccagcagttcctccaggtatacgatcggatgagggatccgctcaacgggctgtattaccatgcctacgatgattcacgccagatgttctggtgcgataaggtgaccggactgtcggagaacttctggctcagggccatgggctggtatgccatggcgctcatcgacaccatggaagtcatgccggaatccatgacctgccagaaggcgcggttaaacgccatctataaagaactgattgacgccatgcttccctaccaggaccaggccaccggcatgtggtaccaggtggtaaaccggggaggtatcgcccccaactacctggaggaatccggctccgccatattcgcctatgccatcatgaaaagcgtacgcctccattaccttcccgacgactattttaaatacggccaaaaggcatttgagggaatatgcagcacatacctctccgagaaagacggcagtctccagctgggcggcatctgcctggttgccgggctgggcaacacggacatgcgggagggcacctttgaatactatatgagggagcctgtggttgaaaatgaagccaagggaatcgctccccttatcctggcgtacattgagaccatgtttcggcgccagccataagacagcggcataaacagtgacataaacagcggcataaaacaggcggcaaaagtgattgaacccatgagctgttttcagtataatgatactggaaacagcttttttgcatatttttcaccctctgtttccggaaaggcgagaacatgaatataaaacattttaatattatggttactgaacaggaatgcggccatgcaagggcatccctgaagccggcggacctgactgcttatctgttagatcgcctgcctcacaagccggagcttctccgcccggccgtggtcctgtgcgcgggaggcggttacggttttgtgtctcccagggaagaccagcccgtggccatggaatttctggcagcgggatgccaggtcttttccctgcactacagcgttgccccggaaacatttcccgtggcccttatggagctggccaaatccgtggctttcgtgaaaagccatgcccgggaatggaatattgacacagatcggattattgtgtgcggtttctccgcgggaggccatctggccgcctgcctgggcatgatgtggaaccgcgaatttatctatggccccctgaatgcggcccctgaggacatacagccaacgggaatgattctgtgctatccggttatcacatccggagaattcggacataagcgctcctttgaacagcttttgggagacagggccggcgaccccaggctcagggaactggtttccctggaacttcaggcaggaccgcagacgcccaggaccttcctgtggcacacctggaccgaccagtccgtgcctgtggaaaattccctgctgctggcccaggccctgaaaaaggcaggcgtcagcctggaaatacacatctaccccagcggacgccacggactgtccctggctacggacgaggtctccgacagcacgggcgactgcctcgcgccccactgtcagggctggatggaactggcaaaagaatggataaaagaaaaggacagggaatgatatgttaaaagaagaacggcaggcattaatcttaaataagcttcactcctccggcaaggtagttgtcagcaggctggccgtggagctgaatgtatccgaggataccatccgccgcgatttgctggacctagaccagaaagggcaggtcaagcgtgtgttcggcggagccattcccatggagcgcccggtcatcaatttctttgaccgggagacaacggatgtggaattaaagcagcgcctggcgctgaaggccctggactttctggagaaggaccagctggtggccattgacggcagcagtaccaacctgcagtttgccaagaacattcctaacggccttaagctcaccgtgctgaccaacagctattccattgcccacgcctgttccatgaaggaccaggtggatgtaatcgtcctgggaggacggctgttaaaggaatccatgaccaatgtgggggaaaccgccgccagccaggcagctctctaccacccggatctgtgctttatgggcgtatacgccatccatcccgaatatggcatgaccataccatacccggacgaggtcagcataaagagacagctgattcagtcctcccgaagggtcattgccctggtgaatcccattaagctgaataccgtatccagataccatgtgtgcggcatcgaggctttcaccacattaatcacggacaacgacgtgtccggcgaaatggctgtggactaccggaacaagggactggattttttatagtcagggcaggtgctccataaaacctgttgcgattttttgcgttacttttgcggtattttatttgtatttcggcgctcccctgtgtgcgttctaacaaaaatcgcatattaacgcatgtttttgcaacaatttgcttgacacagcatgtatatgcgctataatacacttagagataaaaaggaagcgggcaggcgagcctgtcccgcacattttaggagggtatttgctatgaaattttttgtggacacagctaatgttgaggacatcaaaaaggccaatgatatgggtatcatctgcggcgtaaccaccaatccatccctgattgcaaaagagggaaggaactttgccgaagtcatcaaggaaatcaccgacatcgtggacggacctatcagcggcgaggttaaggctaccaccgttgacgcagagggcatgattaaggaaggccgcgagattgccgccattcatccaaacatggtagtcaagattcccatgacagtagaaggcttaaaggctgtcaaggcgcttcacgcagaaggtatcaagaccaacgttaccctggtatttacatccgcacaggctctcctggccgcacgggcaggcgcgtcctacgtatccccgttccttggacgtctggatgacatctccatgccgggtatcgacctgatttacgacatcaccgagatttttcagatgcacaacattgaaactgaaatcattgctgccagcgtccgcaatccgattcacgtaatcgactgcgccaaggccggagccgacatcgcgactgttccttacaaggtactggagcagatgacaaagcatcctctgaccgaccagggcattgccaaattccaggctgattataaggctgtgtttggtgaataatccatctgaaccggtatcgttaaaaggctcccgctgttcctgcgcgggagccttttttatatccgaacttctgtacccatgaatctgtacctatgaatcttctgaattttcctcctctgtaatcagaaccgcctcccccaaatcaaacaccttggagaacgcatacttattcttcttggatgtatccatcagcacatagaccgccttggaatggtcttttacaatcacctttttcctggcctctctgtcatcataggtgtagatgcctccgtccgggatatacccgttggcgccaatgaacgccttgtcaaaatacatgtcggatatcatcttttccgtcagggcgcccagaacggattccaaatcatccctcacctctccccccagcaggatacacttcgcgttcttgacgggcagattgtccagcagttccgtgctgctggagacaatggtgattcgttttccctggagatatttaagcatccccaccgtggtcgtgcctgaatccacgtaaacgcagtctccgtcctccaccagcgcggccgccttcctggcaatgatctccttctcctcgctgtgaatcagttttttctttaccacaggttcatcgaagtcctccgccttatacttaaccgcgcctccgcgcatgacgatgacgctgccttcctgttccagagcagcgacatccctgcgcacagtggacagggaaatgttcaattccgctgccaggtcttttatataagagatatccctttttttgatacttttcagtatctcttcttttctcaactcaggaaccatatgcttacccctttgaactataataactttattatatcaaagagcccatccttagttcaaccatgattcttgcattttctgtcatattttttcattttccgtaaaagttcagacatcgggcaggcggctttcgttcatctcgcttaagcagggcatggcctcctgtgctcctattttggtcacggtcaccgatgctgccctggccgcaaagcagcatgcctggagatccgtcatgcccttgaattttccataggcaaatgcccctatataggaatctcctgcccctgtgctctccgttacgcgctccacctttacagggtcaatgggaaccgctccctcttcccccagaagcatactgcccttggagcccagggtgactataacagttccgtccgtcagctgtctcagcctgtccgcatgagcccttaccatgtctccatccgtcatatcagctcccgcataaaaggatgcctccgtctcattgacaatcaggcagtctaccattttaagaacttccctgtccatttccttggccggggcagcgttaagtatggtgtatacatgatactgctttgcctttcggataatatgctccaccacacctgtgggtatctccagctgaagaatgataatcctgctgcttctgaccagctcgtccagcccgtcgatctcccgggacgtaatatcaaaattggcgcctgtgatgatggaagcatacacagtcccgtcctccagggcatggaccacacccacacccgtggggctgccgctcctgcctatgcaggaacagtccaccccatagtccttcagtttatccaccagggtatcgccaaaggcgtcccttcccaccttccccaccataatggtgtcgattcccagcttggcgcactgtacagcttgattggccccctttcctccgccggaataggttatgctgtcagcggtgtatgtttcccccagaagaggcatgcgcttctgcttcataatgatatcgtagttaaggctgccgatgacacaaatgtaatctctcccgcaatctctcactgtccaaccccccttatgcggttattccgcctttgccttcttattcagtctcatggctgcaagcttaccctggattacgtccacatataccgcgaacactatgataagacccgtagcaatatactgccagaatgtatccacgccgcagaccaccagtcctaccttcagggcctggagaaggattgctcccaggaatgtgcctatgatgcttcctttaccgcctgccaggctggtgcctccaatggccgcagccgcaatggcattggtctcatagctggctccggccgccggctctccggtgcccagtttcgccagcatgaccattccggcaaacgcaacgcagacaccgcagattgcataagacataattttgttgaaatccacattgacgccggacaggcgggtggcttcctcattgctgccgatggaatacagataggttccaaactttgtgtgcttcagcaggatataggcaatcaccgtcacaaccaggaacagaatcatggatgaggacagggtgccgattacatcgccatccataatgtccctgaaattctggggaatgttaagcacaggccagccccctgttataaggtaggcaacgcccctgtatacggacatcatacccagggtagccacaaagggctgtaatttcatcttggccacaaggattccgttcacaagccccagacaaaagccgatggccgcgcctgcaaggacggctgcaaaaggattcagtcccatgaccaggaaattacccacgcttacgattacaatagccagcgtggagccaactgtcaagtcaattccggccgtaatgatgaccagggtcatgccgatggccagaagaccgttgatgacggactggtccaggatatcaagcaggttggacggtgaaaaataaatgggctgtatgacgccaaataccaccatgattgcagccagcgcagcaactacttctaattcccttgaaaacttctttatgatactcttcatagtcagcctcccatcgcaaaactcattatgacttcttcattcagttcatcgtggttcagaaagcccatgattttgccttccctcatgaccacaaccctgtcgctcatacctatgacctccggcagctccgaggacaccataatgatggcctttcctcccgctaccagatcctccatcaggcggtatatctccgccttggcgcccacgtcgattccttttgtgggttcatcaaatataatgatatcggcgtccgtggtcatccacttggcgatgatgactttttgggcatttccgccgctcaggctctctgtcaggtaattcggatccgcaggatgcagattcatttcccccgtataatacatacagttgtcatatatcttcctggcattcacgaagcccttgctgcagaaccggttcatggaggccagcgccatgttgccggcgttggtaaaattctttacaaagccttgggtctttctgttctcaggtatcagccccagactgtaccgcagggcatccttaggactttttatctccgcctttttcccttttatgtaaacttctccgctggtataggggtcggctccaaatatggcccgcatcacatccgttctcttggatcccaccagtccagcaaaggacagaatctcgcccctgtggagttcaaagcttatatgttcaaatactccgttcttgcacagatccctggcctccagcaccacctcaccggcggcgcacagtggattatttctaacggcataggcggacacatcccgtcctaccatgtggcgtatcagctcctccttggaagtctccttcatgttcagggtggcgatatacgttccgtcgcgcagaatgctggccctgtccgctatggaaaacacctcgtccagacggtgcgttatatacagtatcgtaattccctggtccttaagttccataatcatcttaagcaaacggtccacttcacggtccgtcagggccgatgtgggttcgtcaaaggaaatgattcttgcattgtgaaacaatgccttggcaatcagtatcatctgcatctcgccggtgctgagagaggtcacacggtccctgcttctgaatttgcagcccagcttttccagaatggcatctgtctttctgtacatggcatcgtagtccaccagaacccccctggtcacctcgtagccaagggctatattctgccccaccgtcagctcagtcacaaggtttacctcctgatgcaccttggcgatgccgaattcaatggcatcattggcattcttaaagtctacctttttcccgtcaatctccacgcttccatcgtaatcaggatagatgccgtgaaggatattgagaagggtggatttacccgcgccgttttccccaagaagggcgtgtatctcccctttatccaccgtaaaatccacactgtccagcgccttgttgccggggaactgcttagttatattagaaaaatgtatcattgtcgccatattctatcccctctttgaaatatcagccaggggtctgaccctctggctgatgatggtttccttgcttccatttgtctattttgcatatacagggtcggtccagccaatgatttcctctgccggcttatccacgttttcggaatcaatgagggcctgaggcgtccacagcacccttgggatctcctggccgcccaggcttctgagcattacttcacctgcgatctgagctttatagaacgggaaggaatcaatggtggcatccagctcgcccctgcggattgaatcatacgcctctcctatgccgtcaacgccaaccaccaatatatccttgccggaagacttcacagcctccaccacgcccagagccatggtatcgttgttgcagaaaatggcgttcaggtccggatactgtttaatccatgtgtccgccaggtctttggacttctggcggtcccagtcagcattctgctttgccacaatctcaatatcctttgcattggccgccatccagttctcaaagccttccgtcctctgccttgcggcaaacgccttaggcataccgatgacaatagccacctttcccttgccgcccagcttatcagcaatccactccgctgccagctctccgttctgatccgctttgggacccacaaaggaatccgcattggcaatcaggccgtcgttcacattgataaccgggattcccgccttcttggcatcctccacgcccggcgtcaggtttccgtcggaaataggagaaaggagaagtcctgtatacttcttattaatcatatcctttacaatggaaagctgtccctgctcgtcgttctcgccctgggccgaggtcacgtctatggtgatattatagccggcggcggcagccttggtctggtactcgccgtacccctctctcagggttctccagtactcattatcaaaggattttgccactgctcccaatttgacttcgccgtccagcttcggaacatcccccagcttctctctcaattccccgatgctgacccctgcctccttgtccggattaaaggtatccgccgctgtctctgtctgcgccgtggcagccgcctgcctattggtacatcctgccatgagccccgctgccatggcaattgctgtcatagataaaatcaaacctctctttttcatcttctcttctccttttacattaaaatagtttttgtttatagtaaagcaaccatcatgttgcttacagctactgcatcgttttgttccaccaccttctccatccggcagagcccgtaggtgtcaatgagctgttcaatcctgcggcacatccttatatttgcctcacattcctccaccgccttctcccttttcgggaatgtgtcaaaatatatcacaccctggaagtcatatttcttaaggtagtacatgacctccactgtcttccagaaattcacggttcccaccataaggccgtcatccgtggaaccctctccgtcgttgagatgtatattgtagagtttcccccgttccagcagccaggctgccgcaaacgcaggattctcctttttcatcagcatgtggcagaagtccagggtgaccccaagattttccctgtccacgtcgtggagaacggaaaccgcggttccaaagctgtcaatgaaagcatggaccctctcctcataaggcttgtactcaatgctcacaggcaccccggaatagtcgcacacatcccggaacgccttcacaatccggttccagtagcttacataatcaatctggaaggaataatcaaaaccgtcaaatcccagccatataatcatctggtttcctcccagtctcctgcacgcatctgccgcttccctgcataatgctatggcgtcctgtgatatggaaggctcatggtttccaaactcccctcctatgtacttgtccctgaaccttaggttaatggcattacacttcagcccgcattcctccatctttgcctttatcacttctatatcataatcagcaaaatgttccggataattcaaatccacataatccactccctctatggctcctattgactggaatgcattcagcaggttgctgtcaaatctcaaaaacgagttaatccgtgtggcgtacttcatatgattgctacctccttgcagcatcataatagcatttgattcaaattatgtcaatacttttcaaaatattttatttgttttttcggcataaatttctatattttttcatttatatccagccgtattctacgttttttatttttcgagagtggtttttacgtttggcacggttgttttcactaattttatggctttaaagtgagaatcagctcaacatggtccttcttattattccatattttttcatttattttcatttcgatgccgccatttgattatccatgggtatttttaaataaaataatacaaatgccgcagaacaatgctggactcacagcaccattctgcggcattcatcctatttttagcttttagcttatattccaaacgtgtcaaaaagctgtctgcggtactccttatcctttgaggccctttccaaatcatcataccgtttatcagccatgagcagcaggttcagtttgctgacccgctcctcgcctttcatttgacctttcatttcgccttctttttttccgtcctcaatcaactcatcaattgctctgcacacatccatcccctccttctctccatgatttttcattatggccgccagtcttttctgctctcccagcagcgtcttatctgaattatattttaccatactgaatatctgctgtaaacatgtgcggaacacactcatgtcctccatactctgcggggtaaccagattaatcttataattgggtataaagtcccgtatagccccggcctcctccgggcagttgtcaaatcccagcatctggtgaaggccatacaaaaatgaaacttgctatttatataattcgtattactactttatatttttatatatttaataaaaatataaaaatgttattgactaatatcacccccatgcattatattatacttataacaaagtttaagccgatattttcacatattttcacacatgaaaggagcggaacggtatgagaatcaaattaaaagagggtatagtaatggcaatggcattatccttgtgcatgccactccatgcagctgccgcacagggagggtataccgaatctttccagtaggaaaacaaggataccgaagctatctgcatcattgatatgacagaaaaagtttataactcgctaacaagaatgccaagcgtcgtggatggcaaaacacaagttatggctttctctgttgaaaacctcaagagcaattcttatgtagatggttatgactatggaaaatcacttaatcccggtacaagacaaacatactatgtggtttgcactgcaagaagctccggaaccactgctgatgttggtttggcatactataatagccagggaaaatatattatcaacagcaaaacatccttaagtggatatgatagctacgggacagtttccgcgacaccaacatttaaaaattacggatacgtaaaaaatactggctctgctaagcttaccgcatcatatgtatacatgaaataaaggaaaccccctaataattatcggcttaaattttataagggagcatctcaactatgaaattaaaatgcagcattgttatattagtcatcctggcatcttttctttttttagtaagctgccaaaatgatagtggaacagcagaaaaacaacaaaccaaattaattgaatcctattttcaagacttgaaaaacggtaatacagaagaggcttctaaaaaggtccgatttacaaaagcagaaataaacgccggtttaccagatatattctgtgatgccatgcaaggatatgattataaagaattaacgattcatgaaatcaaaaaactgagtgattctatttatcttgtaaatgccacagtcaatacaaactttgacagcgagaataaatctgaatatatcgatgttgaattcaatccttttattgtattctatgataacgaatataaaatcgcttttgtcaaagagcaggttccccaaagcttatatggagacttaaaggcattgccagataattatgatgataatttagactacatcatatttgaggatggtgatgaaacctttaacctagaatagcccatatgcgcctggcagacgatacaatgataacacaacattttctacaatactacctgacagctatcatcgtcaaaagcagatatatgtttatatttttattaagatgtattaaaatataaacaggaggttgtattgtatggaaaaaaaattatcaccaatggaatataagtacatggaatttatttggaaattcccccagggagtatacagtaacttaatatacgacgaatttccgcaggcacaaggcacaaaaggggctattttatttcatatcaaagagaaaggttatgtctcagtccagcagaaaggaaagcagaccctttataccccgctgattagcaaactggagtatgataaaatggcaattaatatgagattgaaggataaattcggaagcagccggttggaaaatctgattgcaacattatgcggtaaaaagagtttaacaaagcagcaggtagataaattatatcaattgattgaagaactgaaagaggaggataatgattaattggcttgaactgatatttgttatgtcagttgtatccagtataatgttcggagctgtccttttgattgaacgcttttataaaactgaatacattgaatacgtatattttatgatgaaagtagttctaattatctttctaatccccatgtttatattgataatgaagattgtcatggacagcatggggtatactatcaatgatattcatggggatgatataatgagtgtcatttgttttaatcgttacaatattgccatgcttccccatattcaggctgctgcaatatgtattttcgtcatatggggattgggggctatcttaacttttataaactcatttatcaagggaaggcggctgttacatcaccttattaaaagctctgaaactatttcaaaaaaagaaccggattacatgatagaaaaagcaaaaacagaactggatatacgaaagctgcctgtgttatataaatctcatctcataagcacaccatttttgacaggaatcttcaatcctaaaatcatatttccaggcagggatttttccgaggaagagtgggacttaatgttgaggcacgaattgatgcatcttaaatcgaatgacttgttgtttaaagccatcattggcattgtacactgtatccattggttcaatcccattgtatatctatataaaataatcttttttgatttcagcgaatacgcttgtgataaacgaacagcagcagcttttaactccagacaaaaatcgcaatatgcgggtctcatcgtcagcctggccgccacaagaccggaatctgaacagacggtcacattcgttgaccgaaattacaaggtgattgaaaggagggttaaagagattatgaaaaaaccaacaaaggaaaaaagcgcattattaatcggaacaatggcactttttatattactatgcccaatggccgcatatgctgcggcatccggagtaatggaagctcaatctatagtagtaaagaatgaacttacgaaaaatattgaagagagcaatatcttcctgagtcaggaatcatccgtaaacatgagagcagatgcagtaaaggccatattagttaatcccagaggaattaacaatattgacatgtctctcgaagcaggcaacacatatatgtttgacactctttctttgaaaaagggacaggaaataactctatcaatcgtatccgataagtcttccgaccgtttctcagtcagtatcactgataaatcaggaaaaggaagactcttctcatccaataaaggaatggtatccgctacctataccgtccctcagaatggcgactataagatttatatgaacggaccaaatagcggcagcgacgatatccatatcagcggaacgatacggattgaatagttaacgcaaagcagcacctgaatttagatattttacttgtctgcttgacaaggggcatatcataattaacaggtgctgcatttttttatctacaaataaatgatattacataattctaacatttttaagagccccggtcttagaaaactgggtccactcacacacatttaccgcgtggtcccctatccgctccaggtacttggccaccatcagcaaatcaattccctggtccgcctggtccggagaggattggagcagatgaatcacgtcatccttcacctggttgaacagcgtatccacctcgtcatcccgttcaataatttccatggcagcgtctaaatcctggtcgatgaatgcttctatggcgtcgtgaaccattgcgttggcggatgcggccataaccggaagatgcttaacaatgtgatatgcatgctcgctttttatcctcagaatcagctcagcaatatccgaggcatggtcccctatccgctccaggtccgtcaccaccttaagggcagtggatacctggcgcaggtcgctggcaaccggctgctggcgcagtatcagggacagacatctggactcgatggcgcgctccatgtcattgactgtcctgtcgcccttaatcacatcctcagccatcatataatcctggtcctcaaatgccgtgaaggtctgctcaatggcactctccaccatatgggccatttcttttaaatcctgttttaatgcttctaactcatgttcgtacgtaaccctaacgctcaatctgataccttccttctgccatcatccgaaacggcctgtaatatagtcttctgtccttttatccttcggcatggtgaaaagttcgtccgtagtcgcatactccactacctctcccaccaggaaaaatgcagtgtggtccgctatacgcgtggcctgctgcatgttatgggtcacaatggccaccgtatatttgctcttaagatcatccatcagatcctcaatcttcagggtggatatggggtccagggcggatgtgggttcatccatcagaaggacctccggctccacggccagggccctggcgatacagaggcgctgctgctgtccgccggacagtcccagagctgatttcttcagacggtcagagacctcatcccacagggccgcccccttaaggctgctctccacaatctcatccagctgggccttattcttaatgccatggattctgggtccataggcaatgttgtcatagatactcatgggaaaaggattcggctgctggaataccatgccgattttctttctcagcagggtggtatccacctgggaatcataaatatcctcatcatccaggagaacggtcccatctatcttaacgcccggcaccaggtcgttcatgcggttcagtgtcttcaggtaagtggacttgccgcagcctgacggccctatgaaggcagtaatcttatgttcatacaaatcaaggtttatgtttttaagggcatgattctccccgtagtacaggttcagattccgggttgaaatctttgttttgctttccacgcttattctcctttgctaattgaaatggtccgacgcatccctatgccccggcttccacattgaaccggtgggacatgtattttgccagaccgttgattcccagtacaatgactaaaaggaccaaggccacgccaaaggcctcattatattttgctttctgcataaacagatagagctgtatggtgagggttcctccggattcaaatatcttggaaagcagattctttggaagataataaccgcttcccgccgtaaacagcagggctgctgactctcccacaattcttccgatggccaggattacgcctgtgaggattcccggcatggcgctgggaagaaggatagtccgtatcatataccattttgtggctccgattccaagggctccatggcggtagctgtccggcacggtcttaagcgcttcctgggtggttctggttatgaggggcagaatcataatggtcagggtcagggctcccgtaagaatggagtatcccagtcccagaacatttccaaaaaacaccattccaaacaagccgaatataatagacggaatgccggacagggtttctgtggtaaactcaatcatccgcaccaccctacccggctttgcgtattcattcagatatacggcagagccaatgcccaggggcgtggcgatgagcagggtaataattacaatgtacagtgtgtttatgatatttcccaggattccaaaggttccctttgtcgcgcttgaggcagtacttaaaaatgcccatgtaacatgcgggattccccgcacaaatacataacccatgatgcctgccagaagaaggatggagaagccggcacaggtatatatgatgactgtaaggaatacatccaggccgcgtacccgcttgccgtatatgctgtcctgtacgacggagtccttatgaacccggaccgcaatatcatttgtcattcctgtttcctcccttctttaaaatcctggtaaggcttatgttgataatcatgataaatgcaaacagtaccaggccaatggtgaaaagaacctgtctgtgaagtcccgcggcataccccatctccgatacaatggctgttgtgaggaagcgcacggaattaaaaggaaggggcaggtttacggagcttcccgacacaaggctgatggccatggcttcaccgatagccctgcccgttcccagcacaacagccgttataatgccggatttggccgcaggcacaattacctggaatatggtctgtatctttgtggcgcccagtgccagggatgcgctctttaaatgggccggtacggatctcagggaagattcgctgatactgatgaccgtggggagaatcatcagggccagtaccagcacggctgatatcagattggctccgccggtaaactgatgtgtttcagaccctttaaacagcatcagttccattttgtacatcaaaggattaagaatcaggattcccagcaggccgtatatgacagaggggattccggccagaagctcgaccgccggacggaccatgtcgctcagccgtttgggggctacctctgcaaggaatatggctgtcatgacgccgataggaactccaatcaggattgccagaaaggttcccactatggaggtcaggatgacaaacagtataccgaagctgggggatgcggctgccggctgccacacggtcccaaacaggatttccagcagacccactttaaacagtgcgggcgtaccgctgataagcatgtacagtgtgatggatgcaacagccaatacggcgaaaaagccgcaggcagtaaagatgccctgtgcagctttttcgacagcggacttgctgccatgactggatcgtatggaaaatgtctccgctctcatgcaggaagtctcctttctctattccgattatttatcaactgcaatcagtcctacggacttcacaatctctgcgccttcatctgagtagatataatcgaagagggcttttaccaggtcattctgctcgcttatatctcccttggtagccattacaaacggacggcttaagaagtaggagccagccttgatgttttcctctgtaggctcagcgccttccagctttacagcctttaccgtatcgtccagtacatccagggaaacatagccaatagcgcctggcgtggaagccacctttgccatcactgcgccggtgctgtccagctcattgctgtatttgcacatgtcctccagctttaacagttcctcaaaggcgcttctggtgccggagccggattcacgtccaaccactacgatgggagcgtcatttccgcctgcatccttccagttggtgatttttccttcgtaaatgtcagacagctgctgtttggtcaggtcctctaccgtattggccccatcaaccaccactgcgattccgtcaatggcaacaatgttctcagccacgccgccagccttctcctcatcctttaaattcctggaagaattgccgatatcagctgttccattgctgacagcctcgattcccgcgccggatccaacgaattcagctgtcaccgtcacatttggatatttctccataaaggactcgctgagggcattggcaaacttctccatggaagtggagcccaccatgctgatggcgccgcttaaatcggcagactgagcattttttgcctctgtagcagcctggtcttttgtctctccggccgtagcggaagcttctgcggccgtctccgcggttgttgccggagcggctgtccctgctgcggttgtctctgtggtgctgttgccgcatcctgccaggatacccatggccagaactgctgtgcctaacagtgctgttaacttctttccattcattttcataatacgtttcctcctgaatcatttcgtttattatcatgttttttcttatcttttctacagtttggagtatacataagatttacatccggagaaatcatgatatggtatagtttctgtaaaatgtatgtaaaaccgaagccccggccctgtgctactcataccggctctccccacatcggcgcccctcataccggtgcccctcataccggtgcatcccgcaaaaaagacgcctgcctccacggcagacgcctttcaccttattttatcccggttttactttagtcttattcttgtctcagcccttacagacatcctccacaatacgttccatctctccccacttcttttccatatccgccaccagtccgaactgggtgcggcagcgatccagattatgcttctccctggcagtcttaaagtaagtgtcgccggacagataatccgtaaggaaccggatgccgcattccagggtcatgagcctggaaccctgaggaagcattttaacctctgctccggtaaggcttcccgcgcacccctccagaaagcctctggtatagatttcaaagagaggaattgacagggacaccctgcttaaatctgtttcatcctcctgcgcggtattggcgccaaagcggatggaatccccaaaatcaaagatggaaagtcccggcataacggtatccagatcaatgatgcagatggcctggccggtcttgtcatcaatcatgatattgtttaatttggtatcattatgggtcactcgcagcggtagttcgcccttagccagcatatccatggccagccccatatcctgctcccggtccatggcaaaccgaatctcattttgaacctctgacgcccgtccgcagatatcttcctccaccgctttcctgaaagccctgaaccttcccggagtgtcatgaaaacccgggatagtctctgccagctctctggcaggatattgggacagaagtctctggaaatgcccaaatgcctttccgctctggtaaaagtcctccggcttctccaccaggttatagcaggtggctccctcaataaataagtacatcctccagtaattcccccgactgtccacatagaaaggagctccctccctggtctttatgaggttcagggtctcccggtccgggtccccgctgttttttatgacctcctgcctcaggaaggtggtgaccccctcaatattgcgcataagggacaccgggtcctggaagatatccgtattcatcctctgaagaatataagggcggttctcacatataagacggaaggtgtcattgatgtggccgcttccatagcgctcgcagctcactgccgccccatccgtggcaaaagccccggccgcctccttgagtatatgtttatccatttctgcactcatttcacatattcctcccaaagtttctccgggtacaatcccttatccttaaggtccttaatggcttttaccactgtctctttatcttctttataggtaactccataccagcggtccacactctttagcacagtcacctcagccagatctgcctttagaagttcatctaccacaaagggcaggaaatattcgcatttcataggatttacaggaaggtttttatccaggaacgccccaaatctgttctccagctcgcccagaatactctttgtaaacccccacatgttcatggaaacaatggtggactcaggaagttctgtccatgtggcgccgtcatcctccgtatattccgcctgattcccatgcttttcaatcctggtccgttcgtggatatccaccagacggctgtctgcatctgtccggcacacgcctcttgccacatatccattgtctgtcagggtattatacagcttgtagcccaccattgtatactggtatctgcccgtgtcctcaacggaggacagctggttataaatcatgcgaaaagcttcttttccataataatcatctgcgttgattaccgcaaaaggcccgtcaatcaaatccctgcagcaaagcactgcatggcccgtcccccacggctttaccctgccctccggcacctggtatccctcaggaatcttatccagctcctggtaaacataggccacatccatatatttactgacgcggtttccaatatgaatcttaaaatcgttctcaatggccttcttgataatgaatatgaccttttcaaatcccgcctccctggcatcaaatatggaaaaatcaatgataatattcccataggggtccacggggtcaatctgctttaatcctccgtaacggcttcccatacccgccgccataatcactaatactggtttctgagacatgctgtccttcctcctcacatgatatatccttattccttcacgcttcccgtttcaccttatcccttcacgccgcctccggttacgcccgctataatcttctctgacaggaagatatacaggatgaaggttggcaggaacacaatgacaacagcagagaacataccggcccagtcacctgtatatttcatggagtttatcatagaatacaagcccactgccaccggccgtaccttatcggaatttccgaatatcagggagatgaaatactcattccagatattgatgaagttgaatattgtaacggtcactattcccggctgggccataggaagcataatcagccagaaggtctttacaggcggacagccgtcgatggcagccgcttcctcaaacgccctggacagattggcaaaaaaggtagttaggaaaatggtggtgtagggtacattgattccgatatacaggaatatcagagtcgcccggtttgctgacacattgttaaggatgttgagacctgccaccgcggcaaacagcggaagcacaatcatgactaccggtactcccatggaagccaccagggatgactgtattagtttattgcacacaaagtcaaaacgtgacagcgcgtaggctgcaggcgcgcaaatcagtatcagcagggtacaggataccgccgcataaaacagggagttaaagaaaatagtggatacattggaattgacccatgccttcacatagttttctatatggaatccgctctccagcagcttattgccgaatatctccttggtggtggaaaagctggccatcaggacccagcccagcagggccagggtaaacagaatccacagggtaagaatcaggtatccgggggccagcttcagttccttcttccagcgcaccggttccctgtacagtttttcttttttctgaaataatcccgacatatgttttccccctttcctagaattccagatctttgtcctgaagcagatgattgcagagccagaacacaatgaccacgcatacgctcagcattacgccgaccgctgctccaatgccggaattgcgctccgtgacgctgttgcccgccccgaatatctgcatgtacagataaaccatgggcgtaatggtctgggtatcagccgtgaccgtggagaacagctgggaccatacgaaaaatccaacgctggtaacgctccacatggtaacattggttctgaacactccttttaataggggaagtgttatatagcggaactggccgaacttatttgccccgtccagagtggctgcctcaaaataatcgtcgctgatgcgctcgatgccgctggcaaatatcagcatgtgatagcccaccatgccgaaacagtaggccaggagcagagccatgaatttgtggtcgttgtccagccactgtatccttgccagggaatccaggcccaaagcctggaagaaatttttaatcagtccgtacttggggctgtagacatactggagccacatggtcgccagggccaccgcgctgacgatgttaggcagataaatcattgccctgaaaaagcttttgaagcggatgctgctggtaatgattacggcaaacagcagagccagggacatgacgatgataccgccgataaaccatatccgggccaggttccacatggagatgcggaacaaggtggtattcgccagcttcacatagttatcaataccgctgaaggtccattttgacatggggtccgtgattccctcaatcttgaaaaagctcataaggatagtcctgataatgggataaaggaataccaggacgaacatcaccaacgccggtgtcatgaacacaattatcattcccttattttttttcacgccggttcctcctaacataaacctgttccggatacgctccggagtccaaaaagaggcggcagcgttatacgatgccacctcactgttgcatattccatgcaaaatgtgccgaatgtattaatctgattactttcctgccgcctgaaggctggatacaaattcattcgctgtaatggctccgctgcaaagcttggtcatgttctctttgatgattggcgtcatatccacattgtcctctgctccggcagcccacggataacgtgtctttaagctttccattacaggcttcacgtctgtaagctgtacaggccactctgagtttgtggtgtcggacgggattcccagggattcctcagaaagcttcttgtcaaactcgcccttggtaatataggtaatcagtttaaaagcatcctctgcattctgtgaattcttgttgatagccagcacctgaccgccgtagtttgccgcttccggaccgtctgtaccgccttccactgccgggtagctgaagcatccccactggaagtcgtcgcctgccatgttctttacttcgtttggaagccaggaaccattgaggtacatggctgctgttcccaatgccagctcctggttctgtcctgccgggaatacgttagatgctatattctctgagaaatatcccttttgggcaaaatccgcgtaagccttggctgtctccatcacagacggatcatcccacttattgttctttacgatatccgatgtcttgtcatagccgttgagtctggacatatggtatccgaagagacaaagtatgtatgcgtcgtcacatgtaataggcgtatagcccgcgtctttgattttccggcatgccgcatccagttctgcccaggtggcgggaacagaggtgacgcctgcttcctcaaagattgccttattgtagaaaaacgcaaatacattaggctgataaggaatggacttaagggttcctcctcccacctcgcggcaggcttccatcaggcttgcattggcagttgcgtcataatcagctgccttggccagttcttccaaatccatcaggtaggcgccccatgtagtattcacacggtcaatatcctcgtcaaacaggtcaatgttggttcccgcatccagggccggctgtaatccttcccggattccggtacgtcccttgaactgtacgtccacggccactcctgtgtctgccgaaaacttgtcaactgcttccttgattacctggccctggggctctgtggactcccacatggaccagtataccagacctgttccgtctccggccggtgcctgagcatccgctgctgtggtatctgctgccggagctgccgtggtgtcagctgctgccgctgccgtggtctccgtggcgccggacccgccgccgcaggctgtcagggaaccaaccatggctgccgccagtgccaatgctatccattttctgtttttcataaaatacgtcctccttgaatcttattgtgtttttgctgattcatattcactactgataatccaattatagtaaatatgcacatgaagttctttgcactataaattaatttatttgcacaaaaaggcttttcctatctataatacacaaatatcgctcttatcaaagattcatgtgggttattttgtatatttattggagatatccctatacaatcccttacacatcagccgccttataagtcaaaccatcttatctcacatggccccagctccatgggtgccccgtgtccatccccgtcatagaccactgttgactgcgcccggctggtgttgttgaccaccgcgtattttcccgcctcaggatatccatgcacctcacagtacagattgtctgaaaaccatatcttcatttccttttctttggaggcagcatagtacatgctcctaatgagaagcctggtgttctcatggctgtaaggaaggcccgcaaggtacacgccccgtcctcttccatatgggtgggcgctgagatggacctcatggtctgaaaattccccaatctccgtgtccgctcccaaagcatatatgttcttcatcccttccccgaaatccagaaccagccttcctgattcatccctcaaaacgtcctgtgtaatgaagtggctgtctgcctgttttgtatgatacttatccgtggacagggtaaatccctgctccttatccacccccagcacatctgccagctggaaataccgtccgccccgctctgcggcgctgggctctcccactcccacaaagccgccgccttcccagacaaaccgcctcactgccgtgagaatctgctcatccagccactcatccccgccggaccaggccgtacccgcatcccctgcattgatgatcacatccacgtcctctggtatgcctgaactgcgtatatcgtcaaagctcataaatgtcacatccacgcctgccccgctcagcgcctccaaaatgccgaaatacgtgtaagtctgcttgtaccaaagggcatgggccaccatgtatggctgccaggagcgcagctttccccagcagtttaacacggctgccttcagcccgcaaaaaggcctgcttcctcctatattgccgtagatttccctgaattcttccgcaactttttcaatgtaatccacaaagcccggaaatttgcaggccagactcagataccccccgtatccgatgcggtcaacaggtttgcgcatcagggcccttcgggcgcaaatccagttctccaccgcctcaggcacaggatcatttccctcataaaatgtatccggaaaaaagtagggtaggaaacggccttccgtatagctcacccccagaatatccgatataaggcgcagcgttgccccgcctcccacgctgcccaccacggcatccaggccgattttcgggaaataagcgccgtaaggctcggttccgatccagttgtcgcccaaaaacatcatggccttacgccccgcctgatggaccagctccaccagctccctggctttgcctgccacaaaccgctggataaagtccatataatccctgtaatgtctggtgggaacccggaatgaggaattatagtacccattgtccacaatatcctcaggtctgagggcatagccgtattccgcccggaattcctccagagccttgacgctgaccgttgccccgtatccgaaccagtctacaaatttctcctttgcgtcgcttccgaataccagcgtaaaatggtagaaaaacgtggtgaaccgtacaacatccgtatccggattatcctttaaccactgtaccaggtactcccttgcaaacaggcccgaagcctcctggcgcacgtcaaagggaatctcatggggtttatctccccagttattggttatgtgattgtacatctgggtaggatcccacaccgcgtataccaggaaggataccgtgtattcgtggaagggcaaagcatgctccatcaccacccgcatgggggcggtagtggcttctgattcgttggtttctgcggcttccccggcaccgtcaaacactcccttaaactccctgccatcgccaaatccttccggcatggacgctcctgtcagctcccaccgggaggcagggaccgcctggcccgtggtgcggtccatgacctcccaccacttctttgggtcatggtaacagtcaggaaccacctgctggccaaaatacccctccataaagtccatctccagatggttccccaccgcggtaaagcgccgggacataaggtagagctgctggcattcctccatatgcttaaccgcaaattcattgtggcctcttgccacaaaataggtggtgtagatctccgcatccagagatttgacatccctgtccagctttgtcccgtcgctgtcacggatggcatcagcgccccagcgctccataagctcccttgtctcgttcaaaaaaccggattcactgggaagcgtaactcttcctcttgtcttagacatgtccgtatcctcccttatatctttctattgggctgtatttcataagcccatggctcttgatttcacttaaataaagtatagcggatagccttttttgtaacaagacagaggacggatttttatttgcacattctatcatttaatttgtatgattgtattctgtgggattgactactgtggtataattcaagaatataagaccgttttagaaaaatacagtgcgggaggaaggattccatggcctataaaagtgtagtactggaagacagcattaccatcaaccgagttatttccgtccactatttccagtatatgagcgacttctcctttcccggagagagccacgatttctgggaactggtatgtgtggaccgcggtgaaatcgacgcgttggccggagagcggcgcctgaccttaaagaagggaaatattctgtttcacaagcccaatgagttccacaacgtgctgaccaacggaaaggtctctccaagcctggtggtcattggatttgtatgccattcacctgccataaagtcattcgaggatcagctcatgtcggtccaggatacggaaaaagagctcctggcccaaatcatcgtggaagccagaaacacattcagaggaaggctggatgacccgtaccaggaggagctaatctttaacagtgaacctctgacctttggttcagcccagctcatcagccattacctggaacagctgattatccatctttacaggagatatttttcctactccctgccagtgcgttcttcccgctttctggccgaggccagcagcgggaatgacacctacaaccgaatcgtacgctatatggaggaacatctgggcgaacgcatgaccatagacagaatctgccgggacaacctggtggggcgctcccagctgcaaaagctgttccgggacacaaaaggctgcggggtcatagaattcttttccatgatgaaaattgacacagccaaacagatgatacgcgacaaccagcttaatttcacccagattgcagaccgcctgggatacagctccatccattatttttcccggcagttcaagcagattaccactatgacgccttctgagtatgccacctccatacggctgctgtcggagaagccttaggacttagaatgcctcttcgcctgtctttcttcatcagatagaaatggccacccgggagtatgtccgttcctcccaaatggccgcttcagaaaatctattggagggctccgcagaaccatcagctcttctttataaaatccgtcccgcacttcgggcaatgaacgctgaccttcccgtgtcccctggggatacgcaccttctgcccgcatcccgggcacttaaagatacggtatttccgtccctctgtaaaacggaatttgattttcctgaaatattccgtcacataaaaccgcaggcgcagataaacctgattttcctgatagcgtttccccacattttttgaaaacatccgtaagtacaggcagataaaacccgccagctccaggatatacagaaacgaggacaatatccttaccctgacaacaacgttcaggaaaaccagcacgagcacagcatacatgataaactggcccagctggtccataccatatcttcctatcatgaaacgctggaatttttctctgattttattcatctgcaaacaatcctttccccattgtccggcctgctgcccggtacattccccaggcagccgcggatcattcatccgaaagtaactataacctaattctcatgggaaagcaatgtacagacaggtttttaatgattattttataaatgcaggcatcaaaatggaggccgcagattttagacgtcacagacgccgctcatcgcaggcgccgctcatcacagacgccgcaccgcgtccatggcaagctctgagcgctcgcactcgctggcattcagcgtaatctgccaacagagcccgcttcccttcatatgttccgacgcatagctgagtccattggtgcgttcatccagaaaggtcctgtctatctggtttggatcgcccaaaaggatgacttttgtccccatccctgccctggtgatgataccctttacctggtttggcgtcatattctgggcctcgtctattatcagataggtcttgacaatggaacggccccgtatatagttcagagcctctgtctgaatcagaccccggtcaaatatctcgtccaccttacccttaagctctgcctcgtcttcataacgtttttcctcgttggaatcaatgagctgctccaggttgtcaattaccggtctcataagaggcgatatcttctcctgttcatctcccggaagaaagcctatatccgcgtcaaactgggcgttgggacggctgatgatgatccgccggtattcccccgttggattgttcagcagtttttccagtcccacggccaatgaatagaaggtttttgccgttcccgccattccctttacaatcaccagaggcgctttgtccgccggctgcatcagcgcctcctgcagaaagtactgccctgaattcttagggctgatgccatatggtttgctctttttgtattccagcggcacgattctgtctccctgaacccgtcccagcagcgttttctttacggactggtccgctttcagaagcagaaactggttttcccacagctgcggacagctgtgtccaccgctttcgtcagatatgtatgctttatccacaggaatcccttttttcttaaactccttcacatcctcctccggtatgaatacctcgcagcgtcccgtgtactgctcatccctgtccgacacctgttccgtgataaagtcctcagcccgtatccctataatttgtgccttgatgcgcagctgttccagcatacggatggaagccctggcattggctccccgctctccctctgccttctttaggttatctaactcttccagcaccaccatgggaagcacaatatagttctcctcaaagcagttcacagcgtagggggcttgaatcagcacattggtatctaatacataggttttaatcattcacagggctccttttccggtttttataaaacgttttggactctttgcagttacttcttacgattacttctttccaattaccatcataccccgctgcttgaccccgttctaccacagatatgtaaaacaatagtaaagatcttgacattatatttcccatcccctataatcagaattgattcgcggaccgcattccacaatataagtacaatatggtataagagaaaggcggctaactgaaatatgattattagatgattgaacagcagcagatgatttacacacaccctttcctggctgtataaaagccgggcggattttgtgtgtctttgtcatttcgttcagtcatacagggaatcatattccacagggccatatttttatataacaggatgcatctgtctatccatatgcctccgccgcatcagacggcatgtcccggcaggcgcgcgcaaaccgctcctgacctgtacattccctctccttcggcttcctcacaggccaggtttatatcccttctgaacgaagtgcgtttaggagggattttttatgttgttaaatgcactgaatattaaaaaagaatatggaattcagactgtgctggatattgaaaaactggaaatccgggatggggaccggattgggctcatcggacgcaacggagccgggaaatccacccttttaggcgtcctctccggaaggattgcctgcgacgagggcgtggtgaaaaggtattgtcccattgcggagattctccagaccggtgaaactgaggatgaacctgaggccaggcttctaagccaattaaagctccgtgacagcgctgtaaaaagcgggggcgaaaagaccaggcgcgccatcggggcggcattttccagccaggccccgctgctctttgccgacgaacccaccactaatttggatatggaaggcgtggcactgttggagaaaatgatgaggggctacaggggggccatcctgatgatatcccatgacaggacgcttttggaccaggtctgcaatcagatatgggagctggaccgggcagccgtgcgcgtctttgacggcaattactctgactgggcctctcagaaggaacgtgaacggggcttccaggaatttgaataccagcagtaccagaaagaaaaaaggcggctggagcgggctgccgacgccttgcagagaaaaagccggaaaatggcaaagccgcccaaacgcatgggaagcagcgagtggatgctctacaaaggcgtcgccgctgtccagcagggtcatgtgcaaagcaataaatcctctgtcatgagccggctggagcacctggataaaaaggaccgcccggacgaaccgccccaggtgtccatgagactgccggacgccgggcggatacgggccaaaaacgcggccgctatccggcatctcaccgtgagctacgggaatcgcattgtactggacgatgtgagcctggaaatagaggcagggaaacggacctttatcatcggcaataacggggccgggaagtccaccttaatcaaagccctgatggacagggcccccgaaaccttcattgcctccgaagcaagagtcgcctatttttctcaggacctggacaccctggacccggaaaaaaccgtgctggaaaatgtagcggaggatgcagcctatccccagcatatctgccgggccgtcctggccaacctctatatgactaaagacgatatgtttaaaccagtcagcgtattatccggaggagaaaaggtcaagacagccctggccaaggttctggtatcaggctgcagcttcatgattctggacgaacccaccaaccatatggatgtgtataccatggagggtctggaacatctgctggaaagctacgacggaacgctgctggccgtcagccacgaccgtaccttcataagtcatacaggggatgtggtgtgccagcttgaaaaaggaaacatacaaaaaagcacggcgcagaaaacagacacacggcacagcgggaaatattaaccgttatattttattgacaataacgcttttccattatatgatagatttactataattatccatatggaggagacgtatcatgagaaaaaatgtattggggattctactggcaggcaccataggatctgcccttataacaggctgcggtgccgcatcctccggcactgcccagtcctctgccccacagcagacacaggaatcagctccggcctctgacgaagccggtacatcaaccgcggacgcagcagacctgacaggccataccctgatgatctactgcggcgcgggcataacaaagccgttccaggaaatagcagacagctttaaatcggtcaccggctgcgagatgaacgtgacatacgccaatgccggccagattcagtcccagattaccacatccgaagagggcgacatgttcatagccggttcagccgaggaactgaaaccggttgagtcctatgtatccgaaagcagggcgctggtaaaacatatacccgtactggcagtacagagcggcaatccgaaaaacattacctctctgtccggcctggccgcagagggcgtgtccctcattatcggcgatgcggactctactcccattggaaagattgccaaaaaggccctgagcgatgcaggtatccttgacaaggtacagatagcggcatccactgccacggctccccagatggcaactgccattgccgcgggagaggctgacgcagccatcatctggaaggagaactgcgatgcagaaggtgtggaaatcgtggataacagcggtttggaagattacataaagaccatccccgcggcctccttaatctgctctgcggatcatgacgccagacaggcatttctggactacttaaattcaggggaggcacgggaaatctggataaagtatggatatgaaattgcggaataaacataggaggcgtagagggacagacctgttctcagccctgaccgtcgcggtggcgctgctggcgattcttttcatcggcagcgcggtctgcgccattgcagccggagggcttcccgcctttgccggaaccatacgccagaaggaagtgctctttgccctgcgtctcagcgcggtcaccgccagtctctccacccttattgtcatggctctggcacttcccaccgcctatgccctgacccggacctccatgccctttaaggagctgtccggcatcatcatcgaactgaccttgtcccttccatacctgcttctgggactcagtctccttatcatattttcatcacctgcaggcaaatggctgaaagagcagggctttaaggtggtgttttctcccgcgggcattgtcatggcccacatcctggtaaatctcccctatgccatccggctcatccgcacggccttcgaggcatccgaccagcggatggaattcattgcccggaccctgggggcttccccctggaaatgctttctgaccattctccttcccctttgccgcagaagccttgtgagtaccttcatcctgacctggtccagagccctgggtgaattcggagccacccttatggtggtgggaattacccgttttaagacggaaaccctgcccggcagcatctatctgagcatatccaccggcgacaaccaggccgccatggcaactgccatgctgatgctgatgatttccgggctggccctctttctctcccgtctgcttaccagtcccgctgacagaaacaaaaggcaggtgttcatacgatgaaccaaatagttatcaacaatttttccgtaaaaagaggcagttttacactgtcacccatctctcttaccatacaaaagggggaaatcttcgccatcctggaccgcacgggttcgggtaagaccgtacttctggaggccatcagcggcatgtttcccggggacaccggcagcatcctctttgacggaattgacatacgggacatcccgcccggtcagaggaagctgggccttgtgtatcaggactatggcctgtttccacatatgaaggtaaaggaaatatttcctatggactgaaaatgcacggatattcaaaaaaagaacaggacagccgcgcacaggagcttatggaaatgctgtccatctcccacataagagaccagtatcccggaaccctgagcggaggcgagagccagcgcacagccctggcaagagccctggcaccggctccccaggttcttttattagatgagccattttcagccctggaccctgccacccggcagtccctgtatcaggagctgcgccggattcaccggcattttggctgcaccatcatcttcgtcacccacgattttctggaagcccggacccttgcaggccgcgcggccattcttctggaaggggaattaaagacagtcaccgacacctccaagctgataaacgggcatttttccgcggaggtggaagggtttctggggagaaatcaaatcattactgcgccagagcgccaaaaagaaaagaggattgtccaatgacatatatcaatgatgcgctgtcattttacagcgaattaagatcacgtttcatgaagctgctgacagaggaagggattctggacgaacaggtggtaatcaacacaaaatccctcacgccggaggaagccataggtattaccaaacggaaggattttcccatcataacaggaaaggatgtgatggttcaggcagaatgtttgggcgcactgggacaggcgtttaccgatgccccctctgcatatcggggcacattggaagaaatatgctccctggacctggcaaatgacccctacagccgcggattgttcatagcggccctgaacgctgtcatgaaacacctgggcagagtggactgtacggtccactgccgcaatgaagggccggaattctgcgccgcggatgtggtccgttagggcagttgacttaagcccgtccaatatcggccagaagcgcttcggagtccttgttgaggacggacgcatccctgagaccagtcagtccctgtgccgtctggcagatctggtactgtgcacgggaagcactgtctgtaacggatccatcgtggacttccttccatttaaggacaaaatcctgttctatggcactaccctggccggagccgcccctcttatgggcctgccaaggctgtgctttgcggaccgttatcaggattccttcttgcaaaatacgtctgcctgatgctatagtatagaaagatttcatcaggacgattacaactaaaggaggactaccatggcttcactgccaaggattggtgaaaccataagcggtttcaccgtcaccgaacttggaaccatacacatgctgggcgccaggaccgttctgtttaaccatgaatccagcggcgcccagcttttatatattcagaatgacgaccgggaactgggttttaacctgatttaccggacgcctcagatggatgaacgggataattcccacatattggagcatcttattctttcctcctgtaaaaagtatcccagcagggatatcttttttgacatggacagcaagagctacgccacctttatgaacggtcttacggacaataccttcacctgctatccggtgtgcagccagagccaggagcagcttctaaaactgatggacgtgttcctgtgctgcatggaagagccggatgccctgaaggacaaaaatttttatctgagggaggccatacggtatgagctctcatccgtcaatggccccctgaccatgcagggcacggtgctcagcgaggactggggccatctgaccgacattctggaaaacgcagacagcgccatgtcccataccctttacgagggctcgcgcactgccaacctgctggggcgggctcacctgcattacagagagctgtcctatgagcaggccagggaaacctttgagcggtgctacagctattccaactgcctgattaccctatatggaaatatagattacagggccatactgaatttcctggacagggagcacctttccagggccgcctcaaaaggccgcagccttcttggggagtttgaggaaccggtgaaaccaggttttaggacctgtacggcacagagtcccgcttatcatggcagcccctcggaacacgcctctgtcatggactacggcatagacctgtcaggctgcacaaaggaggaactcatatactgggacctctttgcggatatcctggataacgatacctctccctggcacagatatgccagggaaatgggactcaaccatgtgatggaggtctatctggatattctgctgccccacccctccttaaaattccgcctgcgcaacggtgactcctgtctgagggaggcatttttggactccatcagaaaggcccttaaggatatctgccgtgatggtctgtcccccaaactgtaccgggcatccatgaaggaaaaccgcctcaccgactcccttacccgggaagccccccatctgggctttaacctgtctgaggaaattggacgttactggagcaccacaggccggaccgattattttcagctctatgaggaagccttccggcgctttgaggaagactcagaccaggccatcataaaaaagctggctgccactgcccttcatccccgggccagcgccctggtcgtgaccgagcccgtgcccggtctggctgaacagctggaggaggaaaaggaacagtatcttaatgaaaagctggcttccatgacagcggctgagcaaaaacagctgatagaggaaacagccgccttccatgactggaattccaggcagcgtagcaatatggactttatcatccggccccaggatcttccggagccggccaaaccatgctccttcacaaaaagacagtggggaaccatcacatgctacacatccccctctccctcgcagggcgtgggcagttaccagctctattttgacatcagccggattgagaaggacgatcttaactaccttacgctttatcagatgcttctcacggaactggatacaaagcggtttacggtggaacagcagaagaacctggagcaggaataccttcacgactgtacctttgacgagctgtatcccgcaaggaaggcaggcccccaaaaccatcccatgatgagcgtattctggttcgggctgaccgaagattttgaggccgggctggattttctcctggatgtaatgggcggcggagattacggcgacacggataccatcatacaggtactggaaaaatatctgcctgactacgaccagtccaagggggacaatgcctctgccctggccttcagcctgtccgaaggctatacgagacaggaatgccgattccgcaatatgttaaacagccaggagaattattattttctgaaggatgtactgaaacggctgaaggaagatcctgattttgggaccatggcggcttccaaacttaaaaccatttcccataccatattaaaccgccgtggcctggtatttctggcagccgcttcaccggacgtattaggaaatctggaacaggctgccgtggatatactggggagacttcccgtttttaaggaagatcatgattctttggctcccgccatctggatcccggaccagaagcaaaggctggccgtgtgcgtggaggcctcctgccaggagacgcggctcatgggcgatttctatgaaaatcccggctttaaagggcgttatctgccctttctcatggctgtggcggataaatatttaaagccggccatacgctaccagggcggcgcctatgacagcggcattgacttttatattcctgccggttatttctccctgtggagtaccgcggacccggaagtcaggagtacgcaaaagctgttcctggcaaccggcgcacagctcatggaacttccgctgacccgcggggaactggacggctacatcctgaacgcctatgcccaggccctgccgccctccgggaccttaagcacccgcatgcggcacatgcgcagggacatggtgaacatggattcctgcaaaataaacgaaatgatttcagatatcaggaatgcggacctctgccaccagcaggaggcagcccggattattgatgagattttgggacgcagcgccattgtcacagtgggaaatgagaaatgtatcatgaaggataaggatgtgtttgaccaggtcttgatatatcatacggattatgcgtaaatggcagggacgggatgagcggctatgaataggcatcttttattgtcttcttctcccttttacaaacaagaaggggctaatgcactaaagcgtcatcccctccttgctttcggttatctcatttttattgtatacttttaaattcgtctaatccgcttcctatgacttcaccagaaatcctccgtctacagggataaccgcaccgtttaaatagtcgctggcagaggaagctaaaaacagtacgggcccctttaagtcctcgggtctgccccaccggcctgcggcaatccgcttcgtacactcgtccttgcgctcctggctcatattagcacacatctccgtgtccatatagcccggggcgattacattgcagcagatgctgtgatccgcgcagtcggaggcaatactcttagaaagctgagtcacagctccttttgccgcagaatacgccggcacggtagttccgccaaagaaggaattcatagaaccgatgttgatgatcttgccaacggtatccttgtcccgcatgacctgaatggcccgctggcacataaaccacacatgatttaagtccacattaatcaccaggttccacatctcctccggaaactcccatggctcataacgtctctggatgcctgcggccggaatcataacatcaagctttcctcccagcagttccatagcctcatcgaacatccggtccagttctgcctttttggacaggtcgccggctacgccgtgggccttatagcccttcccgcagtattcttccaccgcttgttccagcttctccttctggagatccatcaaaaccacctcggcgccgttttccaaaagcccttccgccatacctctggacaggccctgagccccgccggtcacaatgcacttctttccccggacactgaatttttccttatagtcgtataccattttctttacactcctcatcaattatactctatattctcacggcgtctggagagttccgtcccggttcctggtttgggtccagatggtcaccgtgttctcgcaagggtacttagctgcctcccgctcattgatgtccacccccagaccaggcctttcgttgggatacacgtagccgttcctaaattccggaagtccgggaaacacctccaaaagcgcacctttgggaccctttaaatcctggatcacaaagttgggcggctcaatgccggaccactcctgaaccccgaaattcatagctgccagatcgatatggacattggccgcatgcgcgatgggggacatatctccaggaccgtgccaggctgtccggactccgtactgctccgcgaacatctggagcttgcgcgcaggcgtgatgcccccgatctggcttatatgcacccggatgtaatcgatcaaatgcccgctaatcaaatcccgccagtcaatagagcggttgaacagctccccttgtgcaatgggtacctcactatggcaccggatttcccgcagccacttggtttgctccgcacacaccggatcctctaaaaacagcaggtcaaagggttccagctccctggccagcttcactgcttccggcggtgccacccgctcatggacatcgtgaatcagcttgacgtcatacccgattttgtcccggattcccgcaaacagctttaccgtgtcccgcacatagcgggctccgtccaggtaaactcctggcagagcaccttggggggcggtttcaggaatcacaccgtaacgttcccctccgtatcctctgcactggcagcggatattctggatacccagttcccggtacctctcaatattttcgcagagctcctccaaatcccttccatccgcgtggcggtaaacaggcactccctcgcgcaccctgccgccgaacagctgatacagaggcataccagccaattttcccttaatatcccaaagggccatatcaattcccgagatcgcgttgttttcaatgggacctccccgccagtatccattctgatacattagctgccatagttcctctatattttccgcatttcttccctttaaaagcggcgtcagatactcttccaccaccagcttcaccgccagatgtcgataggaaaaggttccgcagcccaggccgtaaaggcccggcacattggtgtccacccgcacggccagaaggttaatcccctctggtgccgtgcagataactctgatattctcaattgtcactgccactgtgctttctccttatgcctgataagtctctaacgccgtgatggcctcccggatcatctcctttgttaccggatacggcgtatgctttaactcctgattctccagcgtcatcttcaacacatcctccagcggatcggtgggatccagctccagatctcccaagcagataggcagcttaatagctttgctaagccgccaggccctgctaagcttttcccagtcatggtctaccatgaggttgaccagcatcccataagcgaccacctctccatggagatgccgctcctcgatacacttgcggctggtcatgccataaaaaagggcgtgggcgataccgccgttgtaatccggatgggcagacacagaaacaatacctggggatataatgatatttaaaatcgtctcctccagctcccggctgatcactccttttgcggcatcctccatggccttctccgccttctccagcataggataaaagcacatactgcctgctgtaattcccagagcactgccataatccagggattccccggccttggcagaccaggcggactccacgtgctttgccatagcgtctccgaggcctgcccagaggtaacgcaccggcgccgccagggtcagcttggggttgataaagcagtgtacaggaacatttttcagcttgagaatctcccggaaggatccgtcctcatggtaaaggatgctgatctgcgtgatgggcgcacagttggaagcaatggaggggattgtgtagaccggcttactcagcctatcacccaccacttttaccgtgtcaatacacttgcctcctcccacggccagaattacatccgcctcctgaaccgccggttccctctccagccgcttcacgttttcccaagttgcgtcctttccgtaaaccactgccccggttaaaataatctctgcccgctccagggacgggagcacataatcttttgaagcctcccatgcctgtttaccgcatataacggccgccctcctccccctgcctatacgctccgggaaagtcccaaaggcatcctcacccatcgtaaaccgggggagataaatggaatgatattgattcatggtctttttcacctttcttgtttcagttcatctgttcccgcctgggatccaataccgccagatcgtaaccacggctctcatgtgtgtgggctgccagtacccaaaaataagcattccgtgtccccggggaggccaactggtccaggcaccgttgcctccccaggtcagcccggcaatcaggcgggaagcctgaatctcctggttgagcgtcataaaaacctctctctgcctcgatggccacactgtttcctcccgccgtgtagaaggagtcaaaccggccgcagtgataatgacggccagccagatccagcccagcctctcccttaatgcatacaccgttcatctcctcgccgccaggcttcagttcatagcgctggcttgccgccaggttcagccggtacattgccgcctcttgacagtcctccctgccaggtacgatcactttatgaaatccatattcctccggggaaacgattttccttttctccatccgctcccttgtcacaattccctgtaccataatcaaacctccttaggtgagaaacgtacaaaaccattctgagaatacacacagaaaaaatactcccacatagccaaccaaaaacggaatctccgccttggcgatctctcccatcttcagccttgacactgtggccgccgagtagatgttcaccgctaccggaggcgtcattgttcccactacattggaaacgcacacaattattccaaaatgtactacattaatgcccatgctctgggcaataggccacagcaccggaaccaacaaaacagctatggctgtcccctccataaaggttccgaaaatcaggagaatcactgctaccaccaggcagaacattgctgcatttagattcatgccaatcaccgtatccaccagagccttggacgcgcctgagattgtgaacacccatgaaaaggctgtggacgcggcgatgatgaacagtatcatagcagaactcttggcggagtccttgatgatttggatcgtatccggcagattcagctcacgatagatgaaagctccggctatagctgcccatacaacagccaccgcagcgctctccgtggcggtcaacataccggaatagattcctcccagaataatgatgggtgtaagcaatgccggaatggcgtccagaaaaaccttcaccacctcggcgggcgtgcgcttcacattctgtttcggccacttttccttatgggcaaaccacagcacctccaccatcagcaccaacataatcacgataccaatcatcataccctgcttgaacatatttccaacagaggcaccggtcagcgtacaataaatcaccatgataatagatggcgggatgatgggcccaagcccaccggacaccaccagaagtcctgcggttcgcggccctggatagccctttttgatcatatccccgtagagcatggttccgatggcaatgactgttgccggggccgatccagacagggcagcaaagaaagcacaggccagtaccagcgccaggctcataccgcctctcacgttgcccaccaggcagtccgcaaaatctacaatccgcctggaaattccacccttcgtcatcagattgccagccaacacgaaaaatgcgatggccatgatagagctggactgcagcccgccaaagatcctttgggcgatagccgtggaggaggccggaaggcccccgaacaccacggccgtcagagaagccacactcaaggagatggacaccggtaccccgatcaccaggcaaagaataaaaatcaaaaataaaatcaatcctgcattcatgtcctgtttccctctttctttccgaattctgcaatctgctgtaccagtgtaatggtctgaatgacgaagatgagtccaaaggccagtaccagcgagaaatacatcagagacatgggaagcttcatcacaggcgtggtttggccggcttgaagctgctttaagaccagggcccctcccgctttaatcatgataaaagcaaatcccaccagaatcacctgccggataagatcaacaatcttgcggaccacaccgtgcagcttgtccaccacggcagtcaccgccacctgggtgccatctcttagacccacctctgttcccagcaacgccatataggtcatactgtatacggctatctcctctgtccagggcatggaagcctggataaaattccgattcagcacagaaatgaaataggaagcgaccatggcaataaaagcagcggccatgactgcatattctgccgatgtaacgcatgacagaagttttttcataaatttcatacgaatcctctcctcttttcctactgcaccgccctcttggctgcgtcgacagctgctatccatttctcgtcgtaggaagcaccggccttttcctgggccgcctgatactttgcctttaacccctcggtatcaatatcatagaaggtcacacccgcaccctctaaattttccactgcctctgcattagcctcgttcagataagtccactgggccttgcatccctcctgcaccgcattggcaaagggctctctcatgtcttcaggaatcttgttccaggcgttgtcgctcatacagatcggaatgtagacgaagcagtgctttgtgttcgtgatagaattcactcctgcctcataatatttattaatccagcagttagatactgcattctcacaggcatcaatggttccctgctgcagcgctgtgaactgctcggaggcagagatggccaccggattagccccaaaagcagtaaatgccgccagctggccctcgttctgcatcacccgaatctttacgcccttgaaatctgccggggtctgaatcggtttcttggagaacacatcccgaaatcctgactccaaatagccaatgacgtgaagtccatgcttttccgcctcggcagaaatcagatctcccaactcattctgtaccgcgtaattagcctggtccgcgctgtcccagagaaaggcctggtctaaaatagacatctcgggaatatagttgctcaaaacggaattagcgcaggtagcgatgtccagatcaccctggatcgccatatccagggtatctgcctctccacccagaacaccgcccgcctggatggtaagctggatgtttccttccgtggcctcactcaccagctcggcaatcttttctgctcccttgtaataatttgactgggaattatccaccaatgccattgtgaaattcagagctccttcattggcagcagcttccggcccgctgttccccgaaacgcttccctttgcctctgtttgtccgctgccggatgagccgcaggccataagcccaagagctgtcagtaccgcaattcctgataataaatacgttcttttcaacacactgatttccctccgttttctaaattgtttgataaaaacaaaaaaatatatccgacgaatgcagtgtagcacatcggatatattttgtcgatacgttgagttttgtttctatatatgcggatatttattgtgtatattgtacaatatttttaaaaatcattcgatgacttttctcgtcttctgctgttcaatctcctcaataatctttcttcgggtactgtttaagtgatcgatcatactgtaacgggctccactggcatctccccgttcaatagattccgaaatcatgtgatggaatttcacagtctgatttgccagctcatcatttgtgaccttacagaacaaagggattcccttaaccacaatctccatcagcctgcaggcaatctcattcttagaacacctggcaatctgaagatggaacgccatatccttctcataatgggattcctgcatctggatctgccagcgcacctccgcctccagctccatcagtttccggcagtcctcataagtcgcgttggtagctgccagggcagcgatatccggttccagcatcagccttacttctgaaaactccagcgctttgtttggcagctcttccggcaaaaatgctcccagaaggtttgacgtctctccctcgctgatctcaatcggcttttgcttctgcctcaaaagataggtgccgctgccttgaaccacctccaccaacccttcaaaccgcagcagctttatcgcgtcccggacagtccctctgccaacctcgcagtattccgccatctgcagctcatttggaagcctatcgcccgccttcatctcattctcaataatatactgccgtatcttcacggccacccgctccgagagcgtctccgtcttttgtctcacctagccaccgcctttttccatcatgttttctgtcgatatataataccgccgggtttctgcgggtgcaggccattcaatcatccaattccgccatacacgattcccagtatgaacacgatcacggccaatggcacatagacatgcttggccaaaggtccgaagaactctcccaggggcttttcacgcccttcttccagttcctcccggatctccttatatcccaggatataatagatggatacagcccccagcactgcgccaaagggcaccacaataatggtgatgaaatccatccatgatcccaccttgggctctgactccaggaaaatccccactaacagggcaatgccgctgcacagggccactgccgctttcctgggaagcttaaaccggttctgccatgactcgcttaccgcctcaaacatattgattaagctggtgatgccagcaaaagcaacggacaggaagaaaatcaccgcgaacagccttcccatgggcatctgccggaaaatctcaggcagggtgataaacataaggggcgggcctgcgtttggctcaatgccaaatgcgaatacagccggcatgatggcaagggcagccatcatggcagccaccgtatcaaaaaaggcggtgcggatggatgccttcggtatatcctctgtcttggccagataggtgccgtacacaatcattcccgatcctgtgatggacagcgagaaaaatgcctgtcccatggccatgacccaggtatccacctttaataaatcgctccaacccggggcaaagaggaatttatacccttcctccgctcccggaaggaaggccacgcggatggccagtattgcgaacaatacaaagaaagaaggcatcaggaccttattaattttctcaattcccttggtggccccaaacataaggatgccggccgctgtcaccaccaccaggacatgccatggaatacttccgaactcgcctgtggcctggctgaaataggccgccgcgtccgctgtaaggatggcccctgttacggaaccggccagggctcttatcacccatcctacgatgatggcatatccaatggcaatacccagggaacccaaaagaggaatccaggccaggaaataccccagcctgccttttcctattttctcccagcaatattcataagctcccagggttccggtcctggcccggcgcccaatggcgaactcagccgacagccctaccaggccgaataatacaatgaatagaatatagggcaccagaaacgcgccgccgccgtattgtcccacgcggtacggaaacatccagatattgcccatacccactgcggaacccacacaggccagcacaaatcccaggctgcttccaaagccgccgttttggtgcacggctgcctgtgatgaatccgtttttttctgcttgttcataacttctccttttaagacgttcatttagacggcctgccgtcctgcgtgaaaatgaaacaggactgcctgtgaagccatctttactatactaccccattaacaccatttagtcaaagctttaaagcaaaaaagcggcaaaaagaaaaaattccgctgttaaaacaaatcaaccacatcatagctgcttccgttccacacagccggacgcacctgccttgtcttaagctgttccacgaaatcctccagacggtccaccttctccggcagccaggtggcatacttcccaatctggcccgtggtgtgggcatcgctggcccctatggtcttaagacctaactcccggcagtacgagagagccctgcggttggcttcaagtgccgtactgccgttgagcacctccaccccgtggagccctttgaccacgcggaggttttcctccagaccgcggttattgttccggaaaggatggcaggagacacagaaaccgccggccttattgacatggtttataaattcctgggcatccacccggcagccgggataatcttcaatcccccacgccgtgatatccccctgaagggaaaaaaactcaatacccacaaaaattgggaaaccggtcctgtgtgaatactctgttgcatatcccctgagtcccatgctgtcatggtccgtgatgcagacagcgtccagtcccctgccccgcgctatggtcacgatttcctccaggtttattttgctgtccgatgaataagtacactcgtgaagatgcatgtcaaccagcatttaggttcctcctatctcttaataatcttgagcagcctgccgtcctctgtccatacgaggctctccaggtccatgaattcggctacaaacgggctggccggcctccggcaaagttccaggggcgcgtcattctggaccagctcgccctggtccatgatggcgatgcggtctgccaggataatggcctcctcctggtcgtgggtgacgaacaccatggtcagccccaggtctttctggagccgcttcagctcatggcgcattttggtgcgcagggcagcgtccaggttgcagaagggctcatccagcaggcacagcttgggctctacaatcagcgccctggcaagggccactctctgctgctggcctccgctgatttcctggatataggcccgggcataatctgcaaggcctaccatttcaagataacgcatccctttctgtcgggcctgctcccgcttcactcccctgaatttcagaccgtaaattacattctgaagcactgtcatatggggaaacaggccgtaggactggaatacagttgtaaccggacgctgttccggagggatatgggtaatgtcctcgccgtccagccgcacgctgccgctgtccggatccagaaagcctcctatcatattgagggtcgtagtcttcccacaccctgacgcgccaaggatgcagagaagctggccctgttccagggtaagggacagatcccgcaccacctccctgccgtcaaagtgtttttttaaatggtcaagttcaagatacacgccgcttacctgccttccatgttattaaataagccatgccttccaccgccagcaccaccagtataatgctggtggcaatcagggaggccagggcgtagtccccggtataaaccgcgtcaaaaagtttaaacactgccagcttacggcccggatctatgagaaacaggattgctcccgccgtagtcatgctgctggaaaagttatatacaaaacaactgagaaaagccggcttaagaccgggcagtattacggtcttaagcaccgaaagctggccgcctcccaggtcccgcaccgctttttcctgtgccctgggcacctgtgtcagggtggcggaacaaatctttgtggccgtgggaagctgcttgaacagcatgttggaaatgacaatcagggccgttcctgtcagctttaagggcggagaattaaaggccagtatatagccgattccaaagcaggttcccggcagcatatagggcagcgtgaccagacaatcaaagaaattccggccgggaatctgtctccgctccatgtaataagcgaacagcattgcaaaaagggttccggccagggatactatgaacgcatatgccacgctccgccccatggtgtccaggtcaaagcggaccatctgctccagataacgcgtggtaaaggaatacactcccctggtgcttttgaggaagccggatatgaatatgcatccgtactgcagagccatcataaaaaagaatattatgcttcccaggtttgagagaatccctgccgccccgcattttcccagtgaaagggccagcggctcctgtctccctctgcttccctctgtcagcatatccgaacgcttcatcagtttccggtaaatgaaaaacgcggctatggacggaagcatcagaaccatgttcatggcggaggccttctccaggttggagtatcccaccagctgaagatatatctctgacgcaattgtgctgaaccgccctccgatgatgaccggagttccaaaatccgccagggaacggacaaaggaaaggagcagggccacccagatccccggccgtatcagaggcagtacaatgtcacccaaaatggccctggggctggctcccaggtccctggctgcccggatgctgtctccatccagcctggtcaggattccccccaggaacagggcatttaagggtacaaaggaaaggctctgcatcaggatgacaccccagcagttataggggtcccagctcagccccagcagccggtaggcaatccacccccggcgtccatagagctggatataagccagggatgacacaaagggcggtgagaccatggtaatcagcagaagcgccatgcagagcagtctgacggctccccgtcttgtggccaggaacagggccgccgccgtggagaaggcagtgcagagaagggatgcgcatatacccacgaacacactgttacagagatttcccctgtattggttccagacagaagcataggagtcatagcttatggatttcccgtcccaaaggctcctaatcaggatgcagagcatgggccagaacacaaacaggaaaaggctggccagcagaactgccagcagcagtttatccgccccatatcccgcaatgccaaaaaggacatctttcgatgcccttttgccatacatgtctccatgcatgtttctgtgtttatctgcattcatgtttccatgggtgctgtcaaacctattcatctgctgccttatctcccatcagcgcctcaaaatgctccaggatttccgtacgcttttcaccgaacagggacagatcctccttcatcagcatgccggtgtcataccccaggtccagtccttccagggatggcttgatggtctttacgctgttcttctggtctatctctgccagcatccgcagattatcgtcattgctaaacagccactctatgaagtacctggccgcgtccccgttctcagcgttcttaaatgccgccactccctcgggtacccacggaataccgtcctccgggtaaacaatggacacatcatactcgtctaacagagactcgatggtaccgtcaatgtatgtgatgccgatggcatattcatctgcggttaccttattcttagggtcggagccgcgttttgcatagtaagctatgttcttattcagtccttcaaaataggaccagccttcatcttcccccttagcctgaagcagggcattgaccacggcatagttggtaccagatacagccgggttggacatgatgatttcgccttcgtattcggactttaacaaatcatcccagttggcgggagcctctatattgagctcctccatgaggccgtcattgatcagaaagcctacaatggtaattcccttggaataccagtagccttccgggtccttaaactcctccgccaggtccgcagaagcatcaaatgaaacctgctctaacagtccgtcatcctttgcgctcatgaatgcgtcgataccgcctccaaaccataaatcggcagaaggggtgccgccctccgcgcggagcttggaaagcacctctcccgaggacatggagagcagctctgccttaacgccggtatcctcagtgaatttgtcaaacagggttacataattctcgctggtagctaccaccttcatggtgccggagagagccggggcttctgcttttgtttccgctttggtttcctcctggctctgagcttcagtctcctgggctgcggtggtttccccggtctgtgcttcggtggcggactcgctggtattattgcctgtgttattgctgctcccgcaggctgccagtgccggcaccatggacaatgccattaacagggcaatcattttctttctcatctgtggtcgtatcctttctttcataacaatattttgcctcgctatcctatatcctcctcttaaggacagtaattaccattgttgaattataatgagcagcggtccttaagtcaatgaggagtcttcctgtatagaaaaaaacgaacattcaggaaatcggatagaaaaattctattcttattcagagctgcttttcctgtattattttgtaaaaaggaatggacggtgccagggcattgtgatagaataaacgaggttattttcccggcatacggccgggatttttaatggatataacggaggagtcttgaaaatggaacataaaagaagtcaatgggccagcaacataggttttattctggccgccgcaggaagtgctgtgggattgggaaatatatggaaatttccgggaaaggtggccgccgcaggaggcggagcgtttttaatctgttatgccctgattgtcctgctcgtaggattcccggtcatgctggcagagctttccatcgggcgcagcacccagaaaaatgtagttggcgcctttcgccggctgaacccgggctggagctttgcaggcggcatcggcgtcctgactttgtttgtaatcatgtcctactacagtgtggtgggaggatgggtgatgaaatacattgcggtgtatctcaccggagcggatttcagcgcctttggaaatgacagcagcagattttccgcttattttgcagatttcatatcacggcccggggaaccgcttatatggggcgctgccttcctgtttctgtgtatctacgtggttgtgcggggcgtgtcggaagggattgaacgggtcagtaaatttttaatgcccggcctgttcgtactgttaaccgggatcgtcatctatgccatgactctggatggggctgccgagggtcttaaatatatgctggccgtggaccccgcaaaattcaacggaggaaccgtggtggccgccctgggccaggccttcttctccctcagcgtgggaatgggcatcatggtgacctatggctcctatgtgcccaggacagagaacctggcaaaaagcgccggctgtatctgcattctggacagccttgtggctctcctgtccggacttgccatcgtgcctgtggtctatatcaccgctggtcccgaagccatgggtatgggaggcggttttgccttcatggctcttcctgaggtgttcagccggctgcccggcggcgtgttcttcgggtctgccttcttccttctgctgttcgtggcagccctgaccagcgccatcagtatccttgagagctgcatcgcatggcttacggaagaattcggtttctccaggctgaaagccaccctgtttcttatgattcccatgtcattcttaagcgcgggctattcgctgtcccagggagccatggacataaagcttccgtggtttgattttaccaatggcgtccaataccttcccatgaacgctgtcatggaaaaattcaccgacaatctgatgattcctctgggagccctgttcttctgcctctttgtgggatgggtatggggaacggacaatgcctcaaaagaaattgaagcctccggccacagcatggcctggaaacgcctatgggcctttctgttaaagttcctggctccggcggttattatggtcatattatattttacggttggacgcggacagggcctgtcctgataaatccattctgtaaatcatgaagaaacggttccggtatccgtttttccggaacctgtatttacagattatggaggattatccccctgagaaagtggctgaaatctgccacatccgtcaggaggacctgatacaggctgccattccgatattaagcatcctcttccaatgcagctgattccattcttattttcaatgataactccataaattaggttgagccggcaagaaaggccctctgccaatcccaccggcttattatgtatggtatctatatgaaaagctctgactgcttgtttatgtcttatagtataccggctatttgtgtcataagtttgactgattgctaaatagtttctaaagagacttaagaaaatataacagaatctttttaatttcttgtgttgacatataatactatatgctgtatagtattatcatattatataatgtataatataatgcagctaataatattgtttctagaacagaggggtgcttatgatatttaacactggttccgcacttttagacgccattgtgctggcagttgtctctaaggacgcggaagggacttatggatataaaatcacccaggatgtccggcaggccatcgacatttcagaatccaccttatatccggtgctgagacgtctccagaaggaggactgcctggaagtgtatgatatggccattgacggcaggaaccgcagatattacaggctgacggaaaaaggcagggtacagctgaatttgtaccggggggaatgggtaacttattcacagaagatatcccagatatttaaggaggcgaagctatgaccagggatgagtttatgaaggagcttgcatatcttctgcaggacatccaggatgaagacaaggacgacgcggtccaatactatacagattactttgaagaggccggtcctgataaggaagcagaggtcatacaggaattgggaagccctgagcggattgccgccatgatccgggccgacatagccggacatctggaggaaggcggtgaattcacagaacagggatatcaggatgaacggttccgggaccccggctatgccatggcaaagcgcctggacctgccggaagagcaggagagcggcggtcagggaaactacggcaggggacaggactttgaccgggaacacggttttaaccaggagcagagctttaaccatggacccggggagacttataccgggggaaatggcacttcccgaacacctccgcccaggaccagcagggtgataaaactcatattatgggctgtcctcatcattgtggcctttcccgtgttcctgagcgttggcggcggactgctgggtctggccgcgggtatcctgggcattctggcagccatcctggtgaccctgggcgccaccacctttgcagtgctcctgggaggaatcgtcatgctgccctatggtgtgttccacatgttttcccatcccccggacggactcatggcctccggcacaggattaatcctgctgggcgccggcgccctgtgcctggccctttccgtactgttttacggaaggtttgttcctttcgtcatacgaagtatcgtcaatgggcttagccgcctgcttcaccgagggaggtaataaaaatgaagagattcgtaaaaatatgcgctgtcaccggactggtactccttcttcttggtttgggcatcactgccgtctcagccgccatgggagggcggtatacaaacagcctgccgtcccgcctggcctccagggtatggcacaaccacatgccatggctggtccgctggggcaatgactggcaggataaccgggagcgccgggatgaccgggataattggaacggccgggatgacccggatgacacagaccgcgccagtggctcttcgcaggtaagcacggtgtccgatccctcatacgcacaggccagaaagctggatgtggatatagacaaaggggtaatccgcgtttccgaaaaagagggcatttcccaaatccaggtcaatgtacaggatacctataaccgcacacaatgctacatggatgaatccaccctgaaggttaagagggaatcaggacgcagccggggcaatgaggctccgcgaatcgagattctgattcctgcgggatatgagcttgacaaattatccctggatatgggcgccgcggagtgcacggtccttggcgtcactgtctccaaactggagattgacacaggcgtgggcgccattacattttcaggcactgtcaacggggatgtggaaatcgagacaggggtgggcgatgtgaccctgaacctgaccggttcccaggccgggtacaattaccaggtggagtgcggcgttggcagcattaacgtgggagctgaacactacaccatgctctcccacgaaactcacatcaacaacaaggctccctacaccatggaactggaatgcggcgtaggaaacattgctgtgaactttgatcaaaccttataggattctacagaaaaggagatagaagtatggataagaaattataccgttcaaacataaataaaatgctctgcggcgtatgcgggggcataggagaatactttaacattgaccccaccatcgtccgccttatatgggctatcttcgcctgctccggccccggaatcatagcatattttgtggccgccatcatcattcccctggcgccaaactaaggccgggaatccacctcctccgggagccgcagccatacggatgcatagaacatgccggctttttgttcaaataatgtctctcctccatatctgtccgccatttcccggatggagcattttacattcttctcacaaaggcgggcctccgctgcatttttcagcaggttgcccaataggaccgtcacctccgtatccgggacagggcactgttccgggtaggctgcctgggcttcaaagcggtttttgtgccttcggacctgggaagcatagtagcagatcagggcattgaccgcctggctgcggcagtagatttccctgatatcaggcggcagctctgtcttatatatcttaatatactcagacagcccggccttatcgtccctccctatgcaggactggaccacggccagatgctggcgcaggccgtacgcgctttattcatttcttccatatggaccgatatggttttatactgccttttctgagccataaggctccggcacgcatattttaactccttctccagataggtgataagcagcaccacatacctgtaccagattttcagtttatccccgtgaatccggttccggctcctccccctcgcaattctcacgtatatagcgcagcagatattcttttatctcctgtctgcacatgtctaaatcgtctataacggcaaatgcaaaatcgggccaaaatctgcaaaatgaagccaccccattgaaagtatggcagaaaaacgttatgtttgaaccagatataagaacccatataagaaagggggagcactgcatggaaatcatcatctgtgacggcaacctgattctccgccacagctatcctttaaagcctgcccgcgggcggcccaagacggtcccatccccagtgaagccttaacctgtcaaatacgcactggaacggccgcggcagcactttggccatttccgccagaaacagggccggcaggatgcaaaactgcatattgagtcccggatggggcagcccttttggcactcccgcggtttggtccccgccggcccggaccacatcaaaacgtccttctgcaatgcccggcctccgtcttatacattttcctgaaattagatggcgtcatacccataaccgacttaaacaccctgttaaaatgcgtgatgttggagaatcctgtatcccggctgatttccgtgatattcttatccgtttccatgaacatcctctgggcgttcataacccttgtgacgttcacatactggatgatggtgctgttggtataccgcttgaattccctgcacaggtagcaggggcttacataggacatccgggccagttggtctatggatatgtcctcctggtaattctgatggatatagctgattacatctgttatacggttgcgctgttccggcttcaccggtgtctgaatttttcttgcaatggtcagtaaggccatgtttaacagggtatggatatagtcctcatgatacgcctgaggatcttcctgttccttgagcaggtcatccagcatgcggtgcaccacctgtttttcccgatgatccggcttatataccccggttccctgttccagcgcttttaacagctgcttagaatccacttcctccctggcaaaatacaccagaagccgcttaaacggcacattctcctggccgtaggaatggtgcatcacgtagggggaaaatatgaggaattctcccggatggatgcagtagagacggtcctggataatgtggtaccgttccccttcctccagataatataattcaaaataatcatgataatgggactttgacatattgtcattgaccccctgtatgcgttcgctggcaatgctccttccctgggccatcatgattccagcctggtctatcaatctgtttcctcctttttggtatttatatccaattcccgtatttttatatgcataaaatacacggaaacatcatagcgcttccaaattaatacagcaagatatgtttaatttccatcataacactgcaaatattgtctagtttaggcggccttaattctatatgataataacataaaaccggttgaaataaaacaaggaggcaacaagttatgaaggtttgtacgaatgcttacacggtcaccaaaaaggataattacttttcagtaatgacagacagtgtggaaatccgcattctttttttgacagattccatcctgcgtatcagggccggatttgacggcgatttcgcggaggaatcctacagccttgtgatgacagcatgggaagaccggatggatgatttcctgaaaggccgcagaacgcgggtggaagcggcagacgcagtcctgtcggacggggacagggaggcagtaatcgagggacgtaatctgaaggtagtggtggagaaggacccgtttcgcatctgcgtgtatgacaaagagggaaccctgcttcacgccgatatcgtggacctggcctatatggaggacagcaaccaccgccggattcacaccagcgagatttcaccggaggactgtttctatggatttggagagaagagcggcgacttcaacaaagcccagaaattcatgggcatgagccccaaagacgccatgggatacaaccccagggaaaccgactcactttacaagcatatccccttctacataaaattaaaccgcggcacaaaaaaggcagtggggtatttctaccacaatacctacgagtgcgattttgacatgggccgtgagaagagcaactactggaagccccacagccgttaccgcacagacggcggcgacatcgacctcttcctcattgcaggccctgccgtgcgtcaggtcgtggagcgctatacggacctcacaggcaaatccgccatgcttccccggtatgcccttggatacctgggttcctccatgtattatccggaactggatgagaactgcgacgacgctattctggatttcatcgacaccacaaaggaagagaagataccggttgacggtttccagctttcctccggctactgcaccgtggagacagataagggtatcaagcgctgcgtctttacctggaacaaaaagcggtttaaagaccccagggaattctttgcccagatggataaaaggggcgtatccgtatcccccaacgtaaaaccgggcatccttctcatccatcccaagctggacgaaatgaaggccaggggcatgtttgtgaaggccagcgacagcgatgagccgggcatcggaacctggtggggcggaaaaggcgtgttcgcggactttaccaagccttccacccggacttactggaaggaaatgctcagggaaaatgtcctggaatacggcaccagttctgtgtggaacgacaactgcgaatatgacagcctggtggacaaggactgccgctgtgattttgagggcaagggcggcaccatcggccagctgaaatccgttatgtccaacatcatgtgccatattacggatgaagccatccatgaaaccttccccaatacccgtccctacattgtgtgccgctccggccactgcggcatacagcgctatgcccagacctgggcaggggataacctgacctgctgggattccttaaaatataacattgcaaccatcctgggcatgagcctttccggcgtggccagccagggctgcgacatcggcggcttctacggcccctcaccggaagcagagcttatggtccgctggattcaaaacggcatattccagccccgtttctccatccactccaccaacaccgacaacacggtgactgagccctggatgtacggccactgtacggattatatccgggaggctatcgggctgcgctaccagttaagtccctacctctactcgctgatggaacgggcccatgagacaggactgcccatcatggaacccatgtgcagtgcattccaggaggatgtaaaatgctacgaggagggcgtggacttcatgtttggagattccctgctggtggccaatgtggttgaaaagggcgcctccaccagaaaggtatacctgcctgagggcgagaccttctacgattttcaaacaaggacagcctatgagggcggccgcaccgtcgaacttcccgtggacctggggtccatccccctgttcgtgagaagcggagccatcattcccatggcggaagataagcttgataacctgaaaacccaacaggcgcagcacatacgaatcctgtgcgcggccgacagggacggccggttcgccctttatgaggacgacggcatttccatggattatgagcgcggagactatctgaaaacatccataaccatgacggccggagaacggactgttttggatttttgccaggaaggccattatgagacagccgtaaagacgctgtatctggatatgatacaccgtgagaaagcgccttactgggtcaaggcggacggacagaccattcctcatttcctccacaggagaaaattcgaggaggcggactgcggatggtattacagccagaggcttaagtccgttcagattaaataccctaatcctaagaaggattatcaggtgattgtatcctttgagcagtttgacctgattggtatgtaaaaagagagcatacgcttcccctcccgcttacagaggggaagccgctatatagaaaggggatatggaaaatgaaaaaatttgcagcagcaatggcagtggctttgagtctggctgtactggggctcaccggatgcgcccagagcggcgctaagaccagcacggaagccaccgcggaaaatccgatggtgcttactctggctcacggcctcagcgagacccacacggtacatattgcaatgacagaatttgcagacaaggtggaggaacggacaaacggaagaatccaggtgcgcatccttccaaacggccagctgggttctgagaatgagaacatggaacagctgatggccggtgtcatttccatgacaaaggtatccgcgcctggccttgccacctataatgaatcctaccatgcctttggccttccctatatctttgacgatacggaagacttttatcatgtaatggattccggtcagatgcaggatttcttcctgtcctcctcggacgacggattcgtaaccctgacctactacacctcaggcgcccgttccttctacaccaagaacaaggcaatccgcacgcctgccgacctaaagggcctgaagattcgtgtgcaggacatgaaatcccagaccgatatgatgaaggccttaggcggtatcccggtagccatgtcctacggcgatgtatatacttctctccagaccggcatcattgacggcacagagaacaatgaaacggcccttaccaccggcaagcacggtgaaatctgcaaggtatactccacggaccagcacgccatgattccggatgtaatggtcatgagcgccaaggtatggaaaaccatcagcccgcaggaccagcaaatcatcctggaagcagcccacgaatccacagaaagccacaagattgcatgggatgccgccattgatgaggccatccaggaagcatcgacccagatgggagtggaattcgtgaatgatgttgacaaggatgcgttccgccaggccacaagcggtatgattaacgaatactgcgcacagtatccgggtgtaaaggaactgcttgacatcattgattcggtagaataaggggaggtaatcacatgaatgaaatattatctgtcatcaaaaagtggatgacccgtcttctggccggcatagccaccgtgctgctgtccgtcatgacccttctggtcctgtaccaggtatttacacgctacgtgctcaacagcccggccgcctttaccgaggagctggtgcgctactttctgatttggaccggtttcatcggcgctgcctatgcttttatcaccagggagcacatgtgcctggtgctggtgcgtgacagcttaagcccggcaggacgcaggattctgatgacagtcatcgatgtgctgattctgctctttgccatctttgtcatcaccctaggcggattcaagcttgcattaagcgcccagaaggtattctccgcgctgctgggaattcccagaagcctggtatacgccatggcgcccatctccggactgttcatcatcctggcacagattatcaatatctatgaggatgtaaccggaatcaccatcgaaggagggaatgagtaatgagtatcggacttacaacagtcatcctgtttgcggtatttggcattctgctgttcctcagctgcccaatctccgtcagcatcgtaatcgcatccatcgtaactgccatctccagcctgtcctgggaccagattacattcatcaccatgcagaagatgaacagcggcgtggagagtttctccctgcttgccatccccctcttcatcctggccggcaacatcatgaacaacggcggtatcgccagacgccttgtaaacttcgcaaagctgttcgtgggctggattccaggttccctggcccaggccaatatcgtgggcaacatgctctttggcgcgctgtccggttcttccgtggcggccgcatcagccatgggcggctgtatctaccctatccagaaggatgagggctatgacccggcttttgccacggcagtaaacattgcctcagcccccaccggactcctgattccccctaccagcgcatttatcgtgtactccacggtagcgggaggcgtgtccatatccaccctgttcatggccggatacattcccggcatcctgatgggagttggttccatggtagtggcttttatttacgccaaaaagcataaatatccggtatccggccgcacacccgccaaggaagctgttaaagtgacgctggaagccatccccagcctgctgctcatcatcattgttatcggcggtatcgtgggaggcatcttcactgccaccgagggcgctggtatctgcgtgctttactgcctgattctctctatctgctataagagccttaccgtgaagtcctttatgaagattctggtaagcagcgcatgcaccagcggcatcatcctgttcctgatatccgcttcctccgccatgtcctttgtcatggcgtactcgggaatcccggcagctatcagcgagggcatcatgtccatctccaccaacaaatacgtgattctgctgctgatgaacataattctgatggttgtgggcatgttcatggatatcacaccggctatcctgattttcacccctatcttccttcctatcgcccagagcttaggaatgactgacattcagttcggcgtcatgttaatcttcaatatgtgcctgggcaacatcacgccgcctgttggttccgtactgttcgtgggctgcggtatcagcaaaatcagtatcgagcaggtgaccaaaacgctgttgccctactttgctgtactgttcctccttctgctggctgttacctatatacctgcgctgtcactgggagtacccagcctgatgggattaatttagtggaaacataagatacattttagtatgtaacacagcattttgagatgaaacagtcaatataaaaatccaatccgtaaacgtatcagcgggaaacgcggggcatgaaggaccgcgaccgggcactatggcagtggcggagtatgtgcttgagcaccgggatttattgatgcctgaaagataatccttttccattccttaacggttccctgaccacttccataaaacgaaacagcaggcgcctcctttcagacccatgtcaaaagcaggcgcctcatagcttcatgccgtatacgtctcagaacaaggtctgctgctcatactcacagtcccttgccagccggggcggttcctgccccagcagttcctttgtctttttgctgtccagaatccattccctgacctgttccctctcaagaaccagaggcatacggctgtggacaggggccatggatgcattggcctgggtagtcagtataacgaagcggtccccgtcctcatacctgccataaaatccggccagaaacagaatccggctcccttccttagtgaatgtaaatttctctttattcttattccactcataaaaccatgaaacagggaccgcagcccggcgctggctcacactgttccggaacatccgcttttcaaacacagactctgacctggcattaaaaaccagcccctttccgcccggcccgggatatccccacttctgcctgcaggccctaaggctcccgccctggtccccggccgccgtaatgaccggagccgtgtcgcccggatggatgtccctatccagcactcccagctccagtttccagtccttctgttctgttaagtcccttatctcatctaataattccgcgctgaaatgatatctgccgcacatgatattcctgccctttcccgggtattaagtttccgcggcggcattttgtccgcctactgtattatatacccaaaccctttaaaatcaatgcaggcattcagcagggacacagccttcacacccgtcacctcaccgcctccaatatcccctcgctgaacgtaggatgcgggaaaataaccttagccatatcctccagcgtcagctcattggctatagccaccgcaaactggctgatcatatccgtggccctggcacacatcatctgggcgcccaggatgcggtgtgaatcactatccgccaccacctttataaatcccctctcctgctgggacagaatggattttccgttggcagacattatatacttctttgtcacggcttctattcccctggccttggcctcatccgcgctgattcccacgcagccgatttccgggttggtatacacgcaggacggaacgatatccgtacggattaccatattctctcctgccatgtgcgccaccgcgtttctgccctgggcagtggctgcatgggccagctgaatgccgcccgtcacatctcctatggcatatatgcccggtacgctggtttcatatgtttcatccgtgacaatacgcccccgttccatggccatatccttcacttcctgactgctctcgtctgttataagaccgcccgtataagccctgcgccccgcagcgataaggatgccgtccgccctggcctcgcagggtttgtccttttccacatagcggcatataagtccggctccatcctctgtgcgaaggatctcctccacctttgcccctgtatggatatccacgtttcttttcttcattatcatcttcaggttctgggcaatttccttatccatggtgggcagaatgcggtccagggcctcgattacagtcactccatggcccagtgaactgtacacagacgcaaattccatgccgattactccgccgcctatgataatcagatgttcaaacaaatccttcttgtccagcagtccgtcactggtgaccactcccggcagggatgagcccggtatgggcgggcatgccggaacagaaccagtggcaatgagaatatgacctgtttccaggacaacctggtcctgtttctgtccgtccggctgttcctctgctttttcacctgtcttttccccagacagcgccaccttcacatgctccctgtccaatatggttcccgtaccgtaaaagactgaaatcctgttggtcttcatgagggaggcaatgccctttctcagctgttccagcacttcgtctttccgtttctggaccatttccatgtcaatcaccggttcccgggccgtcaggccaatggatggccctgactgtaattcatggtacagctctgctgtatggagtattgttttggcgggaatgcatccccggttcaggcaggtgcctcccagttcgcggttttccaccagagcgaccttcattcccttttgaaccccttcgacggcagcctcatatccgcccggccccgcgccaatcaccaccaaatcaaatttgtcagccatataaacttaacctctcttccatttatgttctgtgtttacagcgattccctcacaagggccttgatatcctctttgatctggcgtgactgcggtacatccgtaccggtttgttcctctgcctgaaacgcgtccggtcccacggcttccaccgctgcgcatatatcctcctccgcatagccgcagcccttcagctgttttgccagcgccccaaacatttcctggtccatggcgtctgagaatacattcacgtcctgtatcacgccttcatccacatgtagctgtatctgtatattgccccacgggaaccgcttttccatttcgtactcaaagggaattttccttccgtatttccactgccaggaagcaaatttctctgtcagggcgtctatctccggcttgggcagctcctcttccttcatcctcacggcaggctgtccgtaaaccctggaaaatgcctccaccagggccgctttcacttcctccagtgtgatgtcaggcttaaactcgcacaaattggccaccctggactttacagaggtcacgcccttggaggcaagcttttcttttgatacattcaaataccgggacatattttccttgtccgcccgtatcagtatggtaccatggtggtagcagccgtcctctgttctgtaaaacgcgttgccggagaacttgcgtccttccacggtgatatcattgcgccctgtcttttccgcatggattcccaggctccttacggcctccagtatcacgtccagctgccgcgatacatcgtaatcctcagcgcctacaataaatgtaaaattcagattccccagatcgtggaacaccgcgcctccccctgagaggcggcgcaccaaataaccgtcctcctgctctaagaagttcaccctgcattccctccagcagttctggttctttcctatcaccaccgtatggcggttctgccacaggtaaagaatgcaggtgccctgaggaacatgaagggtcatgtactcctccatggccagattccggtaggggtatgtattatctgtctccatccacacaagtctgtttatcatgtcagtctccattcttatagaaaggctgcctgggcagccccttccccggccatgaacagatatagcggatatccgtgcataaccagggacatgccggctgtccaggcagtcctatttcattttcatcattcccaggtatagcgcagtaccggcttgcgggccgcggtaacctcatccggtcttccaatcggtgtaaggtgaggagcgctgtgaagtgcctcaggatcagccagagcctgctcataaatcttgtggaatacctcgattgcctcatccagggtctccttggactctgtctctgtaggctccaccatcagcgcctcatgtacaatcagcgggaagtacatggtcggcggatgaatgccgtagtccagaagtgccttggcaatatccatggcattcacgtccttgtcgtgtttcatcttctccagactcatgacgaactcatgcatgcaggtctcgctgtaggccatgtcatagacatccgacagcttcaccctcatatagttggcattcagcaccgcgttgcgggcagcctccggtatgccctcctttccaagggtcaggatataggacaatgccttaaccaccaccaagaagttgccgtagaacatcttcacatccccaatggattcctgcgccttcacaaagtgatatgcatcctcctccttctccacacgtacgccgggtataaagggctttaagaattccttgcagcccacaggaccgcttcccggtccgccgccgccgtggggtgtggagaatgtcttgtgcaggttcagatggaccacgtcaaatcccatgtcacccggccgcacaatgcccataaccgcgttcagattggctccgtcataatagcacagtccgcctgcatcatgtacgattttggttatttccagaatgttcttgtcaaataatcccacggtattggggttggtcagcatcaggccggccgtgtcatctcctaccgctgcctttaactgctccaaatccacgcagccgtcctccctggacggaatgctcaccacgtcgtatccgcacatggcagcgctggccggattggttccgtgggcagagtcgggaacaataattttggtacgctttgcatcattgtgatggacatgatatgccttgattaaaagcagtcccgtaaactcaccgtgggcgcctgccgccggctggaatgtcattgcgtccatgcccgtgatttcgcagagatatttctctgccagatataatacttccatggaaccctgcaccgtagcctcaggctgcagcggatggactcctctaaatccccttaaggcggctgcttcctcattcaccttggggttgtacttcatggtgcaggaacccaaaggatagaaaccgtcgttgacaccgtgggaacgctttgccagttccgtataatggcggctgatttcattttccgacatatgcggaaggcggggctgtttctcacggatatgtgctttctcaaaagatacctggggcacgtcacagggactgattaaatccagttttctcccggctgaccctttttcaaatacaagtttcatgaaccgcacacctccttttgtccgcattccctgtgaagcgcctcccgtacagcggaggctagttcatccatctcttccctggtgttcatctcagtagcgcaccagaggatttccctgtcggaaagcggcagtccacccaggattcccctgctttccagagcccttaagatgtgggcgctgtccgtacacttgccctccgggcttacggtaacgaactcgtggaaaaattcacagtcatgctttggctcaagccctgcttccttcaatgcatccctgagataatgggccttggacatgcactggcccgctgccttagccataccgtctgctcccatggctgtcatatatacagaggcagtcagggcgcaccatgcctggttggaacacacgttggagctggccttctcacggcgtatatgctgttcacgggcctgaagggtaagaacaaacgccctgcggccctggttatcggctgtctcgcctacaatccggcccggaagcttcctggtcatggctgccgtggcagtcataaagcccagataaggtcctccaaacgccagaggcatgccaaggggctggccgtctcccacagcgatatccgctccgtactccgccggggttttcatgacagctaaagccatgggattgcagcccatgatatacttggcgccggcctcatggacaatacggcccagggcgtctccgtcctctacattgccgtaatagttgggctgctgtacatagaagcaggcggactgcgggtctgccttcagcatctcttccagtgctgccgcatccgttaccccgtctttttccggaaccatgacaacctttgtattgctgccaaagcagtatgttttcataaccttgatgacgcccgggtttgcagccgcagagatataagctgtggttttctttctctccttacacatggcaatggcttccgccgcagccgtggcaccgtcgtatatggatgcgttggagacgtccattcctgtgagttcacagagcatggtctgatactcaaatatggactggaggatgccctggctgatttccgcctgatagggcgtataggcagtaacaaactcctcttttgatgccacgcttgaaacaatggaaggtatgtagtggttataagcccctgcccccctgaaaatatggcggaacacaacattcttaccggctatgtcctccattcttcctttaactgcctgctcgctgagtcctgaagggatattgacctcttccttcagcattacctcatccggtatatgggagaacatctcctcaaagccggcatatccaatctcacgaagcatctcctgctgctcctgcttcgtacctggtacataacttcccatataatctcacctcacctctcatgggatggaataccttcccggacctgaatcccttaatccagggtcttcacatattcctcatactctgccgcgctcattaactgagcagtgccggttacattctccaccttcataaaccatgcctcataaggcgcttcgttgatggattccggcgcgtccagcagggcctcgttaatctctgccaccgtgccgcttaccggtgaatacacatcggatacagcctttacggattccacatcagcaaacggctctccctctgtcacctcgtcccctgcttccggcaggtttacaaataccaaatccccaagagcatcctgtgcataatcagatactcccactaaaaccgtgccgtcctccagggtctttacccactcatgtgactttacatactttaaatcttctggaaaattcattctaaatacctccttgaacatgctgttctctattatatttttaaatcttgatttttatatccgctgaattactgccgtttataaaatggcagcttcactacctccgcggccacacggcgtcccctgacatccacttccagcgctgttcccggatccttaaaccctatgtcaatcagggccatcgctgccggatatcccaggaacgggcaatgtgtgccggaggtggtcatacccacctgctgttctcctatgtagacccgctggtgctccctgatgatgccgcggccggttacctttaatcccacacgctttctggttaaaggtcccttatcctggatagcctgttttccgatgaaatcatccttatccatcttcacaaagattcccaatcctgcttccttgggagaaatggtatcgtccatctcatggccgtatagtggcatgcctgcttccagcctcaaggtatccctggcgcccaaaccacatggaatcaggccctcgtcctttccggcctccatgagcagttcccacatcttaggcgcatcctccggagccagataaatctccactccgtcctccccggtataaccggtctttgaaatgatgcatttcatgccgcccaccatgcggtcaaaaaggcaggtataatacttttcaggaatatcttcctccctcgccaccttcttaagcacatcaattgcctttggtccctggagggcaagctgggccacctgggaggaaatatcctcaaaaacaacgtcccctgactgatggtccttcatccatgcatagtccttatccttgttggcagcgttcaccacgataaaatagcagtcatccctaaccttatacacaatcaggtcatccaccacgccgccctgttcattgcacatgggactgtatctggcctggccctccgccatgaccgtatagtcattggtgaggagcatgttcagattcttaagggcatccggtcctttgcaaatcacttcccccatgtgtgacacgtcaaaaagaccgcatttggtacgcaccgccatgtgctcgtcgatgacgcctgtctcgtactgtaccggcaggaggtaccctgcaaaaggtacaatcttgcccttatactttacatgcgtgtcgtagagaggtgtttttaacaaaacctcctctgctgcttctgttcccataatcattacctccttcatgaaattgtctggtccttaacaataacagaatcggataggggagattttaacctccccttccacaccacgtagcgtaccgttcggtactacgcggttcaatagtttactcggactttcagatagtgggcagtcatatcgggataaccaagtctgtccactatgattcttttggtgagtgccgagttgagcattcccgccgctctccacactccctttcggcagttcgccatctcatgcaccttccactctggtaaatgtaacgcccgcaacattttatatcttgtgcgtaccttcttccattgtttccagtacaccgctcggattctgtggcgcagccactcatccgtctgttccatcaggcttttcatgtctgcatatcgataatagttaatccatccccttgcatagcttcggcgtttttcttccctctcctgattgctccatttgttccctctggttgtcagctcccgtatccggttcttcatttttgccaccgacttcgggtgtatcctcatgcggcatttccctttatgccggtaaaagccgtagcccaggtattttatcttgctgacgtggctcactgtcgttttctgaagattgactttcagaaacacttttcctgtgatgaatggcacaatgttttccatcgtcctctctgcgcttttcctgcttttgcacagaatcaggcagtcatccgcatacctcacatacttgtgtcccctgcgctccagttccttgtccaactcattcagcatgacatttccacataagggacttagcgggcctccctgcggcacgccctcggtcgttgcgtgaaatcctccgtcctccattactccggctttcaggtacttgtgtatcagcgagattaccctcccgtccttcaccgtcctcgacagcacctctatcagcttgctgtggttcaccgtgtcaaagtaggattgtaaatccatgctgaccacgtagacatatccttcgttgatatatttcctacatctttccagtgcgtcatgcgcccctctgccgggacggaatccgatgctgttgtcagagaactgttcttcatataagggcgtcagttcctgtgcgattgcctgttggattaccctgtctaccactgtgggtatccccagtttccttgtttttcctttctcctctttgggtatttctacccttcggactgggtttggcttgtatttgccttccctcacctgctcgaccaattcggactggtgttctctcaggtagggtagaagttcatccacctgcattccgtcaatcccaccaacgcctttgttcgttttgaccttcttataggcggcatttagattgtcgcttctaagaatcgtatctagcaggttgtccgtccgaaagtccgtgttggtgtcggggttcccggtaatcctttcatgggcgtactctcctgtttcccttccctgttccgcaggtatctctcgcaggtagtcctcaatatgaagttgtctgtacttaattccatgtccggtttccatttggtaacgacacctcctactgttcagtccttcccggtgcgtttgcgaccgcccggtactatgacctctgctgacttctcacggcaggctttactccgtgacagcgaatgttttatcgccactttcacgtccgtgagacctccccgggtactcacacgttctttcccacttatacctgccccgtttactgctggcgttccgtgcagttattggactttagtttgttaggcaacctcatccacgcttcacagcctatccggacaacttttacaggccagtggtttgcctccggcttccttcagaccccacctcacgatgacgcccttgccattggctgcacccttcccactgccgggcgggtcagggactttcacccgttagaacgtgcgcccgccgggcgcacctatgaaagcgcacgaacaaaagatgttcatgcgctctgtccttggacctgaaagatttggcttcttcggtgctatgctctccagagtatcgtccggtatccggtccttttgcctgagagttttccgcttccccttcggcgctgccttctgtatgctgattatacactgatacgctgtatcccgtgtattctttatcttccatacattatgggcagtctctcccgaatccatcttccgatgatataaaattgtccgcaaacgcacatcccaccggcttgccttgtgctaatcccatactaacacaggcaggattttcagtcaatagctaaaaagcgttttaattttaacacattaatcgcatttttcgccctattttccaaacttattttcacgaatattttacggtttatttagaaaaaatactggtaatctcctatgaagtagtatataatgagcaaaggtgatgaggcgaaggggttcctttggcctcattcttgtatgagtacggtttttgatgtgcaaaatcttgagtgaaagaaggtgacaagatgcataagtttatgcggacagtaggattcagtatgtaccagaaaaaacaggatatggcgaagcttttaaagcgcctggtaaaagaagcggagatgaccggccacctggcggaacaggaaggcagcaggctctgtgaactgcgcacggaagtggctcccggcataggagtcgccatgataggcgagatgagccccaaaggaacattcagccgtgaatattattttccctatgtcaagaacccggatgtaagttcagaggcggaatgttccatccagcgccacacggagcgcgaaacttatgcaggccttcttgatgaatacagggtgggtatatccctgattttctacatggagaattccatggagtacaggatgcgcagcagcgcccgccagcctgtccagccaaagggagcagcccttacaggcctggcagtccagggaaaggtactgctgccggtcaataagacggaaaaacaggccgaggactcccggcaggcagccaaaaagcgcagcagtctcctggaagccgccaaacacggcgatgaggacgccatagagacactgaccatagaggacatagacctctattccatggtatccaggcggattgcccatgaggatgtctactccatcatagaaacctgtttcatgccgtgcggcatagaatgtgaccagtactccgtcataggagaaatcacggaaatcagtacaaacaccaaccggattaccaaggaggagatatatgacctgaagctggactgcaacgacatggtattccatgtagccatcaacaagcaggacctgctgggcgaaccccggatagggcggcgctttaaggggcaggtgtggatgcagggtacggtggtgttttaggggctgtgccgaatggttgcagcagtggtggttatttggaaccgccgggcgtggttatttgaaaataggacttgattttttttaccacatgggttattatataaggcggaccgcatgagtatcatacggcccgccttatatttgtgtttctgtagctcagcaggatagagcgtccgcctcctaagagaaactacaacggaaactttttggaggacatgaagtagcaagtcacacacaatttaatacacgtttccgtagctcagttggatagagcgaccgcctcctaagggcttgttggagcaatcgcccaacactgaaaattttatacaagtccatgtacctcagtaggatagagggtccgcctcctaagcggaacgccgcaggttcgactcctgtcatggacgccagtaaacaacgctgtaagcctttatttttaagggtttacagctttttgaatatcacgaacacgaaagcaaatgtacggctgcctatgtccgtgggagtttccaaaagtcatttattttacaagaaagcttgctaacactcatttaaggtagatgatggtttcatagatttttgctgtatttgctaacacttttcgattagcagtttttttctgtttggaacaaagccctttgctaacagtaagaaagtgattcttttaagagcttgtctttcgtttccggtgtcatggattttagcaattcaagcagaagtttatcgctatcactgatggatttctgtgcttccgaaagtggcttgtgttccggttcctctgtatcaagggtgtcataaaattcttcatccagcttctttgcattaagccgtctgtcttcatccacgatttcagagtaaacatctgttaccatctccgcttcggcgtgacctgtatctccctgaacagatttaatatcaccatgcgtcattttgagcttatactttgtgcttaaatggcgtaggctgtgaaaaacaacagtttcaaaattgtgttcctcacatagcattgtaaatctgttccgaacaatgcggctttctacgggattcccattttcaagagcaataacgaggttataatcgttataggcacttcctaaaaactcttttaattcctgctggtctttcttgtattgaaccagtaattgagcaagcgttgtcggcagccatacggtacgattacttgtttctgttttgggtgtttttaacaccagccttgtagtacagtggggcttctgggttgggaaaattttaataatatctttttctttcagcttttgcatagctgattgagaaattcttgccagctccttattgacgataactcttgcattattatttgcaatagcttcttcatcaataatcacatcatcccaagtaagccccgtaatttcgcctactcttaatgagcaggcaaacgccaagtgcatacaaagcaggagtaaatcatcatccacaagtttgattgcttccttgaatgtctgtacattccaaaccttacgttttacctttggtactttaggcaaggtggctagggaagccggattccgcattttgctgtccagatattcccaacggatagcctgatttaaggcacagcggataatatcatggattttcttaatgttggcaggctgcacacagcgaccagtcgcttttcggttagcacgaggaacttctggaacactcaacaggccattgtaatattgagaaagttttttcgtggtgatttcatttaacttccaatctccaataagcggattgatatagttgttaatcgaactcaatttactgctgtaagtattggcagaccacttcgatacaccatatagattgacaaaagtaacaagaaattcctttaaagtgatttcatcatctggggtatctattgcttgctctgcttcctcacgctgatgggcgaattgttcttctaaagggacgagaacatatccataggtttgttgataaaattcaataaacgcttttcgtgcctttgcttcttttttggtttctagggtgtcccatttctgctttctttcgcctgtatcatccatataccagtaaataactgaaaattttgattttctttgtttgattgaagccatattgttgttgctaagctaatttgtcatccatactgctctgcttgaatgtcagagacttgctctgtataatgtcaatgaacattctacagaaagagaaagtcccagaagaccctcccgctaagttgtgtcctctgagactcatgataaaaccatgattattgtatcagagtacacggaatctgacaagggggatggcgtaattactatccattgtaacgaaaattgtatatgccccatatgccggtcccctgtcagccaccgtgactggaaaccacgaatcatgaagctggatggcggacaggtggtgtggctgatgattgagcggagacggtgtgacaatgagggctgccggaggcttcacagtcttctccctgataagctcgtcccttataagcattatggctccgaccttatcgctgccgtgctggatggtgatatcatgccggaggataccatgaacgaggattatccttgtgatgaaaccatacggcggtggcaccactggcttatggcaaacttctcccggacagaaggttactgtcggcaggctatgagcctcttaaggaatcccggactggccggcgcggccattttggaaacaattaggaaatcctgtgacaggtggcttcccgctgtcctgcgcatggtctataactcaggcggtttcctggtatccgtctgaggacatcttatatgcacccactttgttttggctgtcagcgctttctgcggtatgctgtccaaaaaggaggtgcataccatgcagacaatcaaaaaagatttaaactggagggataacgaggcgctctcacgctacaccttgatcgcgccactgcttgatgagagcctggatcccgccaaacgcagccagctgcgggaagaagcagcctcaaagtcaggcttatccgagcgtaccatcttccggtaccttgccgcctatgaagaaaaaggcttcgagggtctcaaacccgtcgtgccggctcaggcggttgtctccgggaggctgccggataattaccggaagattgtggagcaggcaatccaactgaggaaggaagtacccaggcggagcgtggagcagatcatcttcatcctggagcaggagggctgggcggagccgggcgtactcaagcgccctaccctgcagcgtcacctttataaagccggtttcggcacgagacagatgcagacatacgcaagcgcacgcgaaagctcgtccaaacgtttctgcaagcccaacaggatgatgatgctgcaggctgatatcaagtatgggtgtaagctccccatagggaaaaacggggcgatggtgcagacatatctgtcctccgccatcgatgaccactccagatacctggtccattcccggttttatgacaaccaggaggaaagcatcgtggaggataccttccggaacgtcctcttgaaggccggggcttgtgatgccgtatactttgacaacggttcgcagtatgtggcaaaacagctgaaattctcccttgccagacttgggattacggttcggcacgcaaaagtccgcagcggaaaatcaaaggggaaaatagaaaaattccatcaggtggtcgatgcttttctcagggaggcccggatccataaggtcaaaacactggaagagcttaaccggcactggaaaaactacctggaggaatactaccataagcagccgcacgagggcatccgggagtattatgagagccttggcatgcccgtcccaccagaagggatcacccctctccaggagtggaaccgggactgccggcctttaaagttcctggatacatccgtagtggcggaagcgttcctccatcatgaagaacgccttgttgacaagggcggctgtatcagctttcagggccgcaaatatgagacaaaaccgtcccttatcggtttccgggtggagatttcctatgaccctgcttcgccggaaaccatcacgatccgccataaagggattgaaccgtttaccgcaaagccgctcgaaatgaggccgttttgtgataaaaaagaccccctgccgatttccatgcaggaaacggagccggataattcccgtatgctggaggcgctggaaaagaagagcgcagcatccaaaaagcacatggcagatgccatctctttcggacagtacaggaaggatggtggcagcaatgtataaagctttttacgaaatgcagcgtctccctttcgtgcgcgatatcccgtcggggatgctgtatgagtcaccggcgatggcggacacccttgggcgcctgtcttatgtggcagaccgccagctgttcgccgtggtgacggcggatgccgggtgcggcaagtcaacgctggtgcgccgttttgtggagacgctccccaaagaggaatatatcttcctctacctgtcggactccaaactgaccccaagatggttctacaaaggcatgctcgaccagctgggcgtggaatcaaagttctaccgcggcgatgccaagaggcagcttcagaaggaggtggagatcatccgcggcgtgcagggcaggaaagtcgtctgcatcctggatgaagcacaccttctggaaaaagagaccattgaggaattccgcttcctgctgaattataaattcgattctatgagccctatggcactcgtgctcgtcgggcagacggagctgtgggataaactccggctccagcggtatgcggccgtcaggcagcggattgatttaagctgcatcctgccccatcttgaccgtgcgcagacggaaagatatatccgttcccaccttgcgtatgccggaggcaggcaggatatctttaccgataaggccatggacgagatcttccgcgagtccacggggatcccaaggcgcatcaaccggatctgtaacggctgcctgatgtacgccagccagcagggaaagcgtctcacggacgaacatcaggtaaggtttgtcctcgaacatgagatgctgggaggtgaggcctgatggttcagaacaaagaacatcgcccggcagagacctttgctgaccgcatgcgccagtccggcgtattggatctgctggaggaatacatggacatccgggacgaactggaggaagccctcaattccatagaactgctccatggggatatcaggatcgccatggatgacatcagcggacagcttgaagatcttcaggagcatatggataacgtcagcagtaaactgcgcaggttcaaatcgccgcatgcaaagcagtatgaagttgtcaaagatcaaggcgtgcttccatttgactgaaaagcctatgcaggagcactctctatcaaaacgatggttttaagggtggagaaatccacccagaagccaccgcaatgactgacatgagttagagcagcctgctgaaaaatgaacaaatctggtcagcgtcatatcaggaggtcagtaacaccatattatctctccttaaatgattattcgtgtaaccatttatcgaaagatattttagatactctaatcatcctgccagctctgatatagtgaaattgaccgcttttgactaaagcatatgccgacttcatgctgatgtttaaaagagctgctatttcctctaccgtatatgtctttttttcagacgttgtaataccgtgtgtattctctttaccatctaacataagattaaggctcctttctatgatggtaacagtaaaatacacctctctaacatcttgagtataacacaggaaattaaagttttgtagaggttcagtgcattttactgtgagcaagtcagccgaacagctttcgctaaagctcatgggaatctcacccctgcatggttctcatccagccgtaccctttgccagcggtgctacatcatcacacggactaaggctgtacggaagtatcattatcacgatagaaaggtcatggcagcagctctgcagtaagctgcttatggaacactggcaggaatcgctatccggtttcatccctcctttggtgggttacggcgtgccagcccaacggctctctttctatcgaaacgtattcggctgctttatgctgcgttgattagacgctttctttttcaaggaactatccggcttgtcagcctgttaaaatgcactgacagcaatacattttaatagactggcaagctctgtctgggaagcatgggcttgtccatgcttccacaggagagcgttatttttagtttgattccctgatttcaaaagataaaatttttgcaatcagacgtgtttccatccggcggcgtagggtttcatctacaaccatgtgggtatttccgtattcgtctttcataggacgcatggaacggcttgcaataaaaccgctataatggcgtacaatctggttgactgcttcaatatcgccgtccgcagcccttacaatcacaggaaacggaatcatagggtgctttgctgtcatgcttcttcctccataaattttttgataaattccagtccggcgtgtcttcttctctggatggtagaacggttgacttccagaatttttgaaatttccgtatcgtcaaatccaagaaaataatatctcaggataacatcacgtttcttttcgtccagatgttccaatgcttctgctaacaggctgttttcaatgcggacagtaaatccatccatttcaaaagtatggaaatgggatgggtatgtgtcttcggaagaaaacagattgacggtgtaatcatccatatcacagaacagggtttcccgtttacactgtctggataacactttgagatagtctttgcgttcatcctccatagcgaccttgcagatgtaatcaaactggttctctatggttgcctgaaattcagatggcttcatcattactcaccccctttcttgccttaaaagagggtagaagatttcttgacttccccctttcgtgcttagtcccgacacgaaagggctgtttgttgcattatctgttaaattttctaatttctaatgacacaacaaaaataataggtgcaaagccatctagcatatggcattttaaaacaattcaaaatggtatttgcatttataggcaaataaaaagagagcgcaaaaatgcactccctctttaaatataaataccgttcattctttaagccaatttaatatatgatatttctccgctagtgtaattataaataatcctactaaaattccagctatttgtaacataaaatcatcaatatcaatcacataattgggaaagccagtaatcaaattaataagcaactgaataggttcaataaatatacctgctaaaatactaataatgctgattttctttacagatgctctcaaaataatataaatcaatattggtataggcattgttaatactatatgtccggctatacttataaatcccaaatttttcaatgttttaaatgggatagtttgtaaagacagccatgggctaatactatcaatgctttttcttataactgttggagaaaaatatataccaattaaaaaaacacagtagaaagcagtcagaatataacctatcatataaaaagtggattcgttttttttaacgaaagagtatattccaagtatgcctagaacaataaataacattataaatatctttaagtcaggaatctgtcttatatatgtccacataattaccttcctcgtctttataaaaagggatacaggtatcttccacctgcatccctaaaaatatcacctttctgttattcaggctttgcaatgtatattacaacttcttagaagttatagctaatatttaacgttcctgtcacacggtagccagtagcttctattaatcttaaataaattcgatatgttccacttccatctccagtaagtgttacagaccctccatcttttgcggatacgtaagcataatcagtagcagaccatttatttgtcactgctgatttttttccagtcctatatataaatctgaatcatcgccccctggatatccatagctctctatccatacattaatatcaaaagtaggtgtatctgaaactacccagttttgcttcgtataaatcccaccggtcatatcaaagtcacctcgatatgtaccgcttcctcttacatcggcgttaataattatcgcctcataatttggattgctgtcatcaacaaaatcaagatgtctcccatcggtggggaccatctgaactgaaaaagtatctgcatatgcacttataggtaaacaaaccattaaaaatattgaaataaaaatcgaaaatatcttttttatgaacataacttatcctccttccacatttttaatagacactgctctatttgtaattccccattggaatccacctcttttctctagccgctacctcaggaaacatactttcaatggcattatattgagactgtttattttaatatagttatgcttccggtaatatgtatactctttgacgtagtaccctccaagaatattttatagcttccagattgctcaattgaaaatgtatggtcaatccatccattagaagtctgaacatatattctcttgcctttggaatcctcaagtcccgccttaaaactgtcagaactactatctgattgtagtataaaagccactttattacctgaggtcaaagaaagactatctccatacttcacattttttccatcaattgttatatcaattgtcgttactccccttggatttatttgtatcgggtattctattacatcttccgaatagtgaaattccgtcttctcagataattctgtagattcctgctggacttcaacttccgtaatccaaagtttctttaccactaaatcctgtaaatttgacataccccaagaagcagcaaacactgtaaggggacacatcaaaaccattgacattaccaacacagcaaatgatattctctttgttttttcagtctttttcatgatatttctgattctcctttccaaaccgtttaccgtatggccggtaagcgacaccgtagttaaaccaagctctttttcctgtatttgtaaaattagttccgcatacatagtatgtcttttgatgggctggcgattaagtactttctcatcacaggccatttcatttacttcaacaaaataatctgatagtctgtaaataagcggattaaaccaatgcagagcgcataaaataaatacaagtctgcgaaaaaaataatcctgatttttgcagtgaaccaactcatgctttaacagcaacccccattcttcctgcgtgtagttattctccggcaagaaaattttctgttcaaatattcctgtcataaaaggagactgaattatttcattcgataataacaacaccggacccttcagacctaattcattcattgcctctctttttgtctctaatagaagtttatcctgagtatacttactgcatttttctagttttttgagaatccttctgtcatttgcatatttgaagataccataatagataaatcctaaaaaccaggcgagaaaaagcaacagagatatccagtgatttccccaaggtgttccgtagctaattgaacttttgtgaatggtatccatataaagcaaatcatcactgaccaaataaattctttccccaaaaacgaatttatacaaaattacaccagccaataccggcataccaaaggcactgaatactagaaccattttaaaaaacaaacttaaatgctccatgtccattcttctttccagatgttttccggaaagggatataaccgatattaaaatattcaatgagacaaatagcgttactaacagtgccaaaatgtcacttatcttccagctcatcttccagctcctttaaaagatttctggttttttctatctgtgcttttgacaatgtcttcccacagaaggcagcaactaggcgttcaaaagaagtattacccaataccccctcaatctgttggcgaagtaatgcctgctcatattcttcctgtgtgactaaaaccgtatagaaatgatggagtccactttgctttttatcaacgtagcccttttcagaaagatgatacaaaatcgtactttttgtacctcttgcttgtggaaatgcctgatagatttcctcactactgacaccttctggatgtttccaaataaatttcataaattcaaactctgtagcagaaagttttttctttccacccagataatttaaaggtgcttcagcaggtcttgccataaatacccctcctttctgtatatttgttaatataattatatttatataataccatatatttgtgtttttgttaatacataatctgttcataatattaaaaatctttggactgcatattaatccattaatcttatctcttttgtgattccatacttttatagtaatatgaagacgaaaaaggggagaagcctttagataaggaatctcgatgtttcagcggcaaaagctaatgtactaatcatatatcaaacgtctgcaaaactgtttttatacttttacaaatgtcttattcctcaaaaaaattattccgtaaaagtatacttttacggaataattttttggtggatagtgcttcttctataacctatttaatcatccacactgccagacccatgcagaaattcattcctagggaaattttcagtagccaatttaatatacattgaattaccaggaatagtaaagtttgccccacccttcacatcatctgcatatccccggaaactccctacagcatttccgtcagacattacagtcagaatataactataattatcattggtgcctgtagactggctcttagaataataaacgtcagactgggaatctacccatacagtactatgaacattccagtaagcgcttggggtagtgccacttgtctggatattgtagtagaaactgcctgtagagctaatcccctctattatacctgtattgggatatattcttgctaaatcgggttcggattcagaactatttgctattgtcctggccattattctatcctgttttaccccttctaccgcttctgcttcactatggtaaatagaaccatttatcagttcaccattttcatagttaccatccaaaagataatcatcctcggataacgtctctgcatttccccgtgtttcaacctcgtactgaacggctggaaggctatccaacagtgatacttcctctgccattgagctaaaagataatgctgaggttgtcgataataccaaaattaatgctagaattttttttgatttcataatattcccctttcttaatatggttcaaaatgacttaacgttaagattaactctattattctaccaaaaaggatataatcaatatatacttttatatttccaatcaattctatatttattttctacagattatccaatacttattttcccgccaattttatttgaccattggcagcacctcctttactttaacgctaaagtgtgtttcattgaccctgtccaaaaatgtgatgacacatattatactttatgtagaaatcatataaaaaaattctttcttttcacttgaatgtgtaatatcgcaggcggaagaaacaacattttatattttcaactactcttctgatttaaccgtggtatattcgtggtaaaatgagtgtttttctatacctcagaatatttgaaagtatagtatttattcggataatcggaaatcagacataaaatttaattggaaaaaatacacattctatgcaacggtatactgttattataaatatttctttcccttttcatccaatggttataaaccataaaaatgaccaaacagattgattcaactccaccactcctcattaggaactgtatcattccaaaaaccttctacataccaactatttgtcaagtctttttttaagtatatatatttttcatttataccttgaagcaaaccgctatttggtgatgaatcagaggatatgatatatactttaaaacaggctttatcattcgtagtctttatttcttcactacttgcagttaattgcagagcattccactctttttgtaattcttccgaatattctataccttcagataatgcacaaataccggcatattcaccataatttatcatagtacaataagagaatattaacgatgaggccgactctgccccctcattaacgaattgttcataaaaaaaatcgtcttgtcttgaaagttccggcatagtacaattcttgtcgctgaatagtacccactccttgtcgtctctaatatatgatattcctgtaattttttcatttctaacattcaatatgccataactcccgtcagcaaataaaactgattttttactacaacgatacggctttacagatagttgctcaggtgggatgtcttttgttaaaacaaagtcttcaaatatgtctttttcagaaatatcgtttgttaagtttaagtttctggatatacggtcatattcatatagaagctcagaggatgcagaccatatccatatagtgtcagcatttggactgactgatatcttacaggaagaatcattactaaaatcatatcctaatgcctgtaagtcaatactatcctctatttcaccagtggtcagattataaataaataacccaaaataatcatgcattataataatgttgtcatccgcaaagtctaaaaccggcatatcggttgcaatctttgtatttacagaccacttggcaggagtggcctgcatattaaaacttggcggtgattctgatgtatgtacctcagtttttcccgtactatttattgctgccgctatttgctcctgtttaagttttccagagtttgaacatccaacaacaatcgtactgaaagccaatggtataattgtaaaagttacaaatcttggcatttttgtaataaacaatcaaatctcctccttgtattaaactccatcaataatgatagaaatataatatatttaaataatataattatatttgtataataccacatattttgctattgtcaatatttaatcatttatcagccttgacttatttaacaatcttccaattctccccattcttctctagaacaaggtcaaactgtgatatctgtgttgtcatagtctgattatccagatatttcaccgcaagggaagctgtcacctgattcccttttcggttgtaaaccggattcaccagttccgagaagatatattctttccccacaggtttcagcacgccctcattcacataataggtcagctcctttgcggttgccgtagggtacagcttgaaaaaggtagtgagaaattcgttgatttcctccgtagtgatggaatccaccgtaccgtcactttgtactgcttttggagtgtagccggattttacgggaacgctggtgatggtaggattctgaacaatcgtcaggtttccagagccatccacatagactgtcacctgataagcggaacggacggttttactggattccccctctgtgatacgctgttctaccgtataggtcacttgataatgctgctccttttcttctatgatttcccatatctgaaagtcagtcagggcagacgatacggggatgtcctttcggacggtatctacattcagggcttgcagttctccggtgagatacccttttaaagcatttgtccggttatcaatggaagcggcggactgttcccatgaatagtagacttctgcgaaattctccacaaagttttctatcttgtgggtgtcaatgattttttcctcaatcactttggtttcatggacagtgtggatgtctatcgccgtgaaattcttatagacggcaaacaggaaactcaccgccagaagcacccacagggcaatcacggtttttttgtgggtattgactttgtaaactttcagcttcttttctttctgctttttctggttttcctcttttctaatctgaatcatatcggttcatcctttctattgtttgattcgtccggctccggcaaggtgctgttgccagtaggagcctgtcaggtctgcataaccaatgggatttccggcatggtacatccggttatttcccacatatagccccacatgggtgatataggttccggcgttataggtggagtggaaaaagaccaaatcccctgcttttgcttcggacagagggatgtgctgtgttacattgtactgttcctgtgctgtccgtggcagggcgattcctgccttgccatagcaccactgcaccagtcccgaacagtcaaaggaagtggagggggaatcgcccccgtacacatacgtccagccctcatattttaaggcttcctccatgatagcctgcaccgtttcatcatcaaactgtgccacggtcaggtattgcgatactaaaaggacgtaaaacatatttccgtaggaataccgccagcccccgtttttttctacggcaacagggttggtgtaggtgactttctttccgccggatttgtcccttgcgaagctctctgccagttcaaaggtgtacttttttccgtgtcctgccacatagtctaggaaaccgccaccgtaattgtaggactgaatcacactgtttaagtcgcagccctttgtttctgccgctgcgagcagttccgagaaatatttgcagccctgtttgatggattcctctgtgctaagggagttcgggggaagccccagagattccgaggactgcataacgtcttccagtgtgccgccggattccacctgaatgatggcgagcagcacatttaagtattcctctatgccatattcccttgcatacttttccagcataggtttatgagcgaggacttcctgtgacacgctcatacccccatagataaggtttccgccgcttccgccgtcttcctcatccgagaagacaatcaccaccaaaaggagcagggaaaacatcatcacgaacacgccggaacaggcgaagaaaaggtgtcttaacttcatggtttctcccctttcttctgtttggcagccgcttttactgtttttgtccactcctttctggctgtggtacgccggatggtaaagttcgattccttaaccgcaggagcagcccgttttccttccggtatcacaggagccgtatcgttctggataggtcttaccggacggggagcagcaggtgtggtggttggagctgtcttttgtctttcatctggctggacaggggaagccggtgggactatctggcgttctgcccttacaggcggtgtatgttcatagtggatggaagcagcttttaccaccggaaccgaagcccgttctgccacagtcccctcataagaaacctgtccccgttccctgatggatgggggagctggctgtatagctggctttcctgcatgagcggtatctgcatgatttcggaaattttccggctgctttgtagtaacagggcgttcatggacaggagccgcccctttgggtgcttcggaagcagtcttttgcggctgttttgcctgttccagttccgccctgcgttctgcaatggtctgtctgcggctttctgcctgtgcgttccgctgttcggctctggcagttcgggtctgggtcacgctggaagtaaaatcctgtactccctctgatacctgtgttttcccgtggtaaagggcgtactttgcattgacaggcaaatcttttgcctgctcccgaagctgtccggcagtatcggctatcttatctttggtatctgccactgcacccaccgcagagccagcccgtttccatgcagattccttttccggtgctgtctgtccgtctggtctgctgtggtctgcctgtgtccgtttggaggaaccggagttggaagcatttttctggtctgagccagcctgtttccctgcgtggtatgcagctgttccagccccaagagctgtcacagaacgtcctaacttatgctgtaaacggtgcatatgggcgtgcatgagcatacggggtcttcgcatgatacggcttcccatgctttgggaatcaccgctctgtaaggagaacatccccatcaaatcccccagcttgaaataaattccggcaaaggtcactatctgcaagaacgccgtcaggaagaacggatattccccagacaggttgtagagcatggtggaaatactgaacgctaccgtgataatcagggtgattccggctctggtaaggatggtattgaacagtttcgtgatggcacgttttgacatcccctcaaaagagggaaccatgctaaggagaaagctcacaggcaggaacatggcgtagatgataaaaagcacctgtgagaaaatcattatccccgtgagcaggaatacaaaaacggagataccgatattgaacatgaacaggaagaagacagttcccaatcggttgatggtctttgtgatggtaaggttcgtgttttccctgtcttcgatttcctccaccacgatttcttccctgtcctgcccgttgttttcgtctggactggttgaaagcaggctttccacacggtctgttccaatgctttccacatccgagttgccatattgcagcaggagccacggctgcttgacctgaatggaaaacaggctgtcccgtatcaaatccacactatcttttccctgactttccgagttgggcagcacaatctttgtgccaagggtcaggctggcattgctgatgtctgcggaaaattcattgattttcccgatataatcaggagcgtaggcgataaaggcagcggacagcacgaacactaccacaaaattgacaacggcatggatggcttttgtagtttcccgtttgataagccctgtgtaggcaacgtaaatccccaccaccagaatgagaatcagcaggaacccgatataaaatccctccgaggacaagccgcctgtggtaacgcctgcaagggtctgcatatttttcccgatggaatccgccgtggaggaaatgaagtccagcgagtaggcttcctgaatcagataccctgtggcgttggaaaggtacaggctgatggtccagataaaatttgtgatggcatacagcccgtacattacctgttttccgataccgtccagccagttccacgggagccagtcccatccgctgtccacataaaaatcaagctggtagttgtccagaggatatttgctgtattcgttggcagcgtccaccgtatcatccaccagtccggcagcgtgggcggcagtaccgaagactgccagcagcaggaggatgagcaggagtgccagcagcacttttcctgctatactcccgattttttttaaagagttttgtccctttatccggcaagggacaagggctgtcccctgctggatgggctttcttatcttcattcctccacctcttttcttacgggcggtctggtgtcaaaggcatggaacaggtcttcaaagatagggtggaactgtatcactcctacacgcccgtacaaatcactgataaggcactgtccgttttctaagtcacggagccgtttctggttgttttcatcttcggaatccaccccgaaaaaggtgagggtctttttgatttcgttgatgtccgtggaacggaacgcatacttcaagcccagattgtttttcagtttttcatccagcaaatcgtccgtgttctgggtcacaaagtaaacgcctgcgttcatggcacgtccggcacggaccagcttcatagagagggtcttgccctgtgccacctgtaagaagctccatgcttcatccaaatccacaatcttaaacacgctgcggtcggtatggatgaagtcgagggcaaaggtactgataacaatgagcattgccacggaaagcagctccattgtggtgtattcttcaaaggtcgtttccttatccggcagcaccaaatccgccacctgaatgatgttgagctgcttttcaaggctgatggactgtgtgacatcctcatccgaaaagagcagatgtgcaaagtcatagtccgtaaaggattcaatatggtctgctatgctggtgctgatggtggttccctccgcccgtagttcctcaatcacctttaaaagcccccgctcctcactgtttgttaccgcacggatggctttccgaaggacggggaacttctccccgtcacggctggaaatgcctgttaaaaaggtcaggatgtcgattgccagtgattcggaatcctttgggttctccataatcacataagggtcaagcaggcccctgttctgttcctccgaggtcaggtttacgatattgatttcatgggcgatttccggcagggtttccttccagcgtccccgttccgctttcgggtcaacaatgagtgcctgtgccccaaacaatacacagtagtagacaatcatgttgttactgaatgattttccaccgccgagggagccgacaaaagcggcagcaagggcattggtgacagagcctttcacaccctgactggcaagggcaggctttaagtacacgtttcttcccgtatcaaggctatacccgatataaatgccctccggttcccccaacatctgggttgcaccaaagcctagacccgcgaggaagtcactggtgacatactggatgtaatcgttcatataccgtttgctggcagggagaaattccccatgcagccccagcatatccccaaaggggcggaccagcttcacgttcaaatcgtcataaaaatcttttacctcattgcaacggcgtttcagttcttccaagtcgggagccgtcacacgcaccacataggacagcttgtacatggattccttgctctggtctaaggtggattccagctcatttacgctgtctaaagcgtccaccacatttgtgctggtttcactgtcattctgccatgcgtggttgtccaaatctttcaactcttttttcttgttccgtaccgtggagagggctttccggtttgtcacaatctctacattcatagaggtatcaatgggaaaagtaaattgctgctgttgatagtaaaagatttccgaggatggaaagtccaattcccccacaatgctgttgatggtgaagtaggcggcatataccgttccgtcttcctgttcgattttcagataccgctggttttcctctatcagacaacgggtgggtttgataaggtcatagtattttaccagcgtttcctcctgaaaccgcttcttcggcaggtaatactcataatcttcataggcggttccggtctgtccgtataaatgctcaatcagatagccaaaatcgtccttatcaagccgccggactttaaagcggcgtgaaattttactttccaacagtttttccatcttctgaaaccgccagatttcctcattgctcatggaaacaaaatcctccatgagtttgtggttgacttcatggaggaagtcggaaacagcggtctttgcttccctgcggaactgttttatggtgacttcctgctcattgacaagcagcttaaaaccgataaaaaagcggtagtccacctgattttcccctatcatggaaatcagggcttcggtctgtgcgtcaatctttgcacaggcaacgtcctttaacttgcccgtcacttcctgtttggagcgttcctgtgccgcccgtatgctggattcagtgctgatttgcagggcgtgaatctttccatccctgttctgggcgataagctgacggaacgaatcatgtacctgatatttctgctcagggcttaaaaaggaatagttgtagggaagcagctcatagtaagcgaaacactccccgtcatggttgaacacaaggttattttcgatatacttaatcggatatgccataaatatcactccttactgccgtgatgggctgtgccggatattccttttccagcttcacgggctttcctgcatacgtcagtttcgggcgtaccagatatgccagtacggatttcaggaagccgtaaggctttttcccgtcaaaggtcttctggcacatgaaccaagtgagggcaaagggtacgccgaagtatttcaaaaatgccccgtcaatgaacgaaagaggagggaagttcccaaagagcataaccgcaaacattgacaccacgaaccacgccatctgtgtgaacgtgataggaaatggcagcttaaaatcattgatggaatagagtaccttttccaccgaccagatactggtatagcttcgtatttttttcatgttgtctgtcctttctaaaagatggggcagcaaaagagccgcccctgaatcaaaaaagccgcctgtatttcctgaaagagatacagacgggtctaacgtaagatttcatatacgccgtggttcgtgacgataaaagttccatccaattccatgtcacgcccataggcttcatagtcgatatagttttgtaagtgtgccggaagttctccaagctgtccgctttcttccagatagtagcgtgctacgtccgccatatcgtcacagccggaatggcagataatatcgtcttcatgctcacagagttcttcgatactgccaaaataggattgcagctctgatagttcctcctgaatgtattccggtaagtcctccaccatttcacacaggcggttgatttcctcaatgggggtatattcgtcaatctcaaatggcagctcataatcatggatggcgtattcctcatattcatcattcaaaccgatacgctctttgacttcctcaaagtccacaggtggcgtgaaccatgcccccactaattcgccctcattgtattttcctaagttggcaatgtaaatccgcatttcttccacagtgtcacctccattctctgccatgcttcttttggggagttacactccccaagcccctagtggacttccgccatgaagcaatcagagcttgctccataacggaagtgtgatatgtttttttctatgcaccgataatcttattgaacagttccagtaagatgtcctttacaccatccgcattgaagacaagaccaaccgctataagggacaccaccagaaaaccgataagtttggaaaattccctcttaaatccgaggtacagtccaatcaccacgattgccagcagcacaagggactgggcgttggataaaaaccagttgtaaagattctgtccgaaattcataaaagctcctttctttcctgtaagagttcttaggttccaagattgccgccgttaaagcaccacctcctttgcagcggcggcttgctgcttcaggattttttcgtgcttctctgtcagctttgcatgggtgatgatgtcatggacaatttgggtgtggttcatcttatccagacggagagccagctttaatgtaggagctacctgatgggagagccagtgcagggtgcgttcaaaggaatagggttccggtttggttgtcagtttcaggcttcccctgtgttcccctataaaccacgcccattcctcactgatacgccagtcagaacggggcttcgtatcgtccctgtccacgaaccggacatagcggttgatgatttgaaaggctgtccgttctggattgtcatgttctaacaggtcacggatggcgtaaaaggcacgctcatttttcagccggatttcaaagcggttctttacctctgcgtacgcaatgggaatatcatgctttttgtattgctcatagtccttttcgtaaatgcagaagtacacctcactttggagggagccgatatacagggtgttccccatacattctttttcctcacgccgtaccagttcgccgctgcggtagcttttgaagctgcggaagaccgagatacattcctcattccggcacttctctgtcagatggggaatgtttaggattcccgttttatcattgatagcaaggtcaagtcgcttcattacgccgtcctccatgagaacatccataaaaaattcataccagctccgttcctgtgccagcagatagctttcaaactggcggcagccacgccctttcagttccagcagcacccctttttccagttccggcgataccagaacgaaaatatcacccagatagtaatgctccgtgtaagagtagaatccgtagtcttcatggataaagtaaggcagctttagccgcagtacgtcttccacgatatgcttcacatccgtagtggggaagcgaatccgcacatagtcaaagagcatttcaaggggagcgtctggattgaagcgttccagagcttccgtgatggcttcctgtaatgctttggatgggtgagccttgcccgtttcaatatcgctcaggtacggacgggtgattccggcagctaacgcaagtttctgttgtgagataccgtaagctgcccgtttctccctgatgtcccgtacccatgtttcttcattcagtgaaaatccctcctgtctaaaaaagcgtatgccaactttcagagccttgttgacatacgccggatatggggaaaatcccttgtgtaccgtgggattctgccctgttgtttggttgttgcctgtcgatttgtacccctctgttagatacgaggggttcctgctggcgtgccttgcggcacaccagccacagcaggtcagtccgtttctgcggctttcgcttcgcacgccgcctgcactccctgcctgctgtctatgagcttttttatttctttgaggaaatcgtgtccttttggcacaaggggcgtgtaaaactctgagataacgctggttcccacatccacatagccacgcccttttatctgctttaggaagaaatcctttgtggtttccccgaacatcatcccatagcccatttccgacatccgccccagagccacacggaaattgaactggtcacggattccgtcccccagatactttgcgtccggacgctggcaggcgagaatcaggaaaaatccagcctgccgcccaagcataacgatttgttttaacttatttaggacagcagcgttttcctttgtgccgagcatttccataaatgccacatattcatcaaagataaggaaatttgccggaagcccaaggtaagcgtagttttcccctgtccggtaattgtccatgagcttcatgtcttcgctgcgtttcatcatttcttcgtagaaacggtcaatgcaggcgagcatatcttcctttttgtagtacacatccggcataactgcctgtaagtccgcaaggtcggcgttttttgggtctaacacggacaggacggcgttggtgcggagcagggcttcaataagggtcaggatgaagtaggtctttccgccgccggttcctccggcaatgagcatatgggggagcttgtcatagtcccaccagacattttccatgagccggagcctgccgtcctttgcctgtacgtcctcaatggagatacggctggcaatggtatcatagagcagggtgtactccacataggaatcctttaattccttatccgtcagctcacagtacaagccgctttccagctttttctccaagtttaagagctgttcctgatatttccccaaggtgatttccacacggatatggagcaagccctgtttcatccggtagtagattttgggaaagtaagtgatggtttctttggaacggctggaagacaagtccttgaaaaaagcgtcatcctttctctgttcggattcataccacttgttttctaacaccatccttgccagcttttggcggtggatgagctgctttacttcgtccctgcggtatcgccagaacagaagaattactgcaagacacaccagccctgccacgtccatgctgaataacaggtaagggatatttacatcctgtgctatctgtgagagggacacttcctgccagttggttccggctatttgccggatatgaaacagcaggacaaccagcaggaagacagggaacagggcggcaagggcagtatggaacacaaggtctttatccgtgggacggatacgttttccacggaggaaaagctgcttcatgggacaatcctcctttcgctttcttttatgttcctgttattttacagggggagcgtctttcttcggcagctgcggattcatggcagccccttttttcaggacaatatcatctgccttgatgtaccagtccacttctgccccttgaaaggtagccgttgccacggtgtctgccacaggatggatgatttccacctctgcgttgtaatcaaattcctttaacggcacgctggcagggatggaaacctgaatcatacgcccctgtcctctggattttaagtcataggtacgttccttgatttcttctgataccgaaccatcttcattctggaggtgaacctcacggcggagggcagaaaatttcaatgccccgaatgttgcttccttgtcaatcacgattccgtttgctaatctcatagtctgatgtcctccttttccttacgcttttaccatatcgtcagcgtgcaaaatgtagttggtaaagccccgtgtgccgattttatagccctctgcggtgatacggggattgacgagcttcacacgttcctcaaagtcaaaatgtttctctccggcttcggcagggaggataaccacaatatcatccgccctctgtacgtctgaatacaggttgaagctacgggagagtaccgccatgcgtccgttgattctacgctgttctgttttgtcttctccggcaaactccaagttgccgaatgtcttttccatgttggggataacgaattttaattccatatagatggtaagtaagtaataatccgtatcttgacaaaataagaaatcccccagcacttaccgggggaagatctgtcttttactttttaagtttgctgcggcaatcatcaggcagattggaggaccatgggagaagctccagcatttcttcctttgccggaaacgcaccgagttctttcatcttttccatcacatatgtgagatagttgtatggcttcagtccattcagaagcgcagtttctgtgatgctgtacacagtcgcactggcctgtgccccgcggatgcttttggcaaacagccagttgcgtctccctatggcaaaatttttcagtgcccgctctgcagctagattgtcaatactcagatggccatcttccagataccttttcagataggtttcctggttcagcgtatacaggaccgcctctccgatcttagaagatctgtccacagcatcctccagggtatgaagccactcgaaaaaagcctctaaaagcggctttgcctgcttttgacgctcttcatacctttcttccggtgacttgtcacggatcatctcttcgatcttatagaacatcccgatccgtgccattgcctgatatgcggttgtttccttcagctgctctttggtaaagtcctttttcaaaacggtcagggattcatcaaatctgcgcctcgcatgggccatgcatcctgtcacggtgatcctttccggaaggctgtggtatgcctggtatccatcgcaggtgaaatatccctggtactgatccccaaggaattccaccggatgatatcccgcccgggttctttcgtattggaagaggaccatccggggtgcgccgctgtattcatcagtgagatagacccacatccagttctgggtggaacctttctgttccggctcatcgattacctgaacacgggtttcatccccatgagcgtaccggctccggaggaattcttccttcatcagttcataaagcggctgcagataccggtccgcacactggatgatccaattcgccatggtctttgtggaaaggttcaggtcgtaacgggcgaattcccgttcctgacgcgcaaggggcatgccgcccacatactttgcgttcatgatgcctgccaccagggatggtgttgccacactgcctttgagaagggaaggcgccttttccggacgtttcatcgccccgcatttcgggcagctgtaaacataggtgacctcctccaccacttcaaaccgtgcaggcacaaacttcaggcgcttcaccgtctcttttgtcacgactttatatttggtattgcagtccggacagtttcggtccgcgccggtcagcttatactcaattacttccgttgtctcaaaggcggaaagatcttcctcctttttgccggaacgtttctttcttttataggaagacggatggatctcctccatttccggctccggcgcatcaggctctgcttcctgctctgcctcgttaaaaaggttcagctgcgtatagccatccgcatatttttcgctggatgggccaaactgtttccgctgcgcaagagtcagacggtcagaaagcatcgcgttcaggaattccagttcctttgttttttcttcgaggatctggatctttgtttcctgtttctgataatgctcccgcatggttttcatcagggagatgatatcctccctgctcatcttgttcagttgttcctctgtaaaaagcggatccataacacagcctcaactttctgaaatctctaccagaaagtataccagaaaaagcattccgttcctataggaaactgcattccgggacggaggaaaatccgcccaaaacaaagtgattttcggctttttgcgaattgacaggatccgggctcatatgacgatcttcgggtgacgttcttcaaatgcgccgctggggttcagggataaaccatcgcacagccaatggatctctttcagcgtaactttctgcagttcatccggtgtgtcaggccaatggaaggaatcgcggtccagccgtttcatcaggatccaaaaccctgacccgtcccactgaaggatcttgagcaatgtgcgcctgcgattgcagaacgcgaacatacagcgggagtacggatcgagatggaatttcagtttgatgatggccgctaaaccagtgtagctcttccggaggtccgtgcagccacatgccagatagactgtagtacttccgtaaaaatcaagcatagttctttaaggcctgaagcagggcagtcaacagtctggctggacagtccgcagcaacttcaatccggatattttccgggagacagagcatcacaggaggttttcctgtatctgctgtactgaaatggagttcatgttccgaagggagctttgcaaacaccggatcagaagcactttctgtctcagctgcttctgactggagctttcggatccagtaacccagtgtagactgtgggattccattctgctgacaccattctttgcgggataaaccgctttcctgaaaagcatggaaccggtctgcccaaaggtcagcctttgaggttacattgtcattcgtatttattggtatcacctccatcatttgaacttatcttatcaaatgtggatggaaatttgcagatactgattattacctacttactatagatgtacctgtcctttctgaatgttgtgtttgatggttagttttgggttctggtttgaaagccggaggggaacgctccggcggtggtggtttcttcgtagtatcacgtcctttctggttttggggtaaaaaaatagacgctcagttttgaacgtctataagggaaatacttattaactttttagtcttctgctggatgttttgaaagataacgggaataatctgtgtcaaattgtaaagatttcaactgttcatctataatttgtaataggtttttatcgttaaggattgcttcaaattcttttatagagaaatcaataatgcaatatttatcttccaatttctccttatggagataaaatttttttattagtccagcaccattactccatccggttccgctagtaccataatacgaaaataaaatgcctatttttatgttggttgtcaaaagcaaactacaaaattttcctatgtatgtaacactaacggctttgtcgtaatttttacattctcctaaaaaggtatcgagttttgggtcaatcagatgatatgtcaacaaaactttcccttgaggagttaaagtaacgatttggtctatttcattcgttgaagttcgtaagtttctatctacattaaaaatatttccagagatagttaagagataagaaactaaattttctaaagcttctccctttaagttatgtaaatttttaggtgcattgtctgtaggggaactgtcatgaagctgtttgaatttttcaagtaattctttataaatgtttttttgagcttcactaatttcacaaattttttcgtatcttaatttatcagatatactattaaggacatttaatgccttagaaatttctttatcatctggcataatatcaatcatcacgtaccaccatatatattaaaaatgaattttctattgaggaaagttcgctatggcagagttcacattcaaaagtttcaggtaactcattaaacaaacgtactgtccccatagatttttggcaattactacaatataattcataataactttgcaaaattccttgcttttccaattcagataaaaaatcatagatttcaggaatagataaggaaaattttcttttcaaaacgccaggataaatccacatattttttctataattcttgaaaaaattagttaaggcaatgctatctatatttttattcattttgtgttgtatcgtcatttctatgattgacaatgtattcgataacataattcattcgctccattccaattagcacattactatagtaatattgtattaaacaataagatttattcatgtaattaaagacaaacttaacacggttacttcgtgtttttatttcattttcccataacaattcaatccaaggataatcggacatttcttccatttcaaacataaattgttctaaggcttctctgaaatcaggtactttttctaattctgcctgattgtcatttaatagtgagcgtagttctccgataaatggtaatatatattcttgattgttgccgacatccagttgtgcgtttccaccattaggtaatttcatggattgagcaataagttttacattttcatcacgtttgcatacattaaccataaagtctaaatttagcggaatcaaatcgcactcaaaatgttctttaaaataatcagacatttccgcaattaagttggaatatatagtcggttcttttttgtcggataaaaagaccctttttaaaacatcaaaacgaaattctatcaattctcctttttcatgaaatacaactaaaaagggatatttagttaaaaattcttcctgtgtgagaggatgaatagctgcatatgccaaattaaatttcaaaaaatagtatccatccatagagtatgcaacaggttttacgaaagatgtatataagtaatcattttcataagtgttttcaagaggaatgatttcctttgctttttttaacgttgatgaaaaatcgtcgcaggtaaaaataacggaatacttataatcttttaaaaactcccatttttctaaagcatatccagctcttttgctttggtgaatgcaggttacaagctgttcggataatgttttttctgaaatatctacagtttctagcccctctatgtataactgtcccgaagtatctgtttgtttagtcgcaattccgtgctgaatgaattgttttactaaatggcgttttactttatctgaataagccattactgttttttcaagatattctaaatagttgtttaactgcatacaatccctcttttctgtgcatatatctttcgttatcctgattatacttgatataagtgcaaaaagccatgcacaaatcaaaatttttataggattttcgatatatacataataataaaagttttggtgctattgcatatataaatcgagtaggaggaaggcgattatttcgccttccgacctctcacaccaccgtacgtaccgttcggtatacggcggttcaatcaacttaacatgtaacagccttttcggcgtagtagtcttccatggatacaagaccaaacttagctagtctctctttactgatacaaatgtggagattccagcttctgcacactctggcatatcctttggcatatgaaatgccatgtgccgcatttggcggcagaccaagtttgataagattcttttccctgttctttggcgttttccagtgtttccatatgcacatgcgcagtcgataccgaatctgtccgtccatttttgcgcacagccttttcatgcttccgattttgaaataatttatccaccctcggataagccggttgagtttcccaattttataaccattgcccactccccagctcctgcttgtatatttcttcatctgcgccttgaactttgctgccgctttcgggtgtggtctggctttgtaccctttggcaaatgagtcatagtaaaatccaaaccccagatacttaatgccctttggtttatcaaccctgctcttttccgcgttcactttcagtccaagcttttcctctataaaccgagccacgctcttcattacccgctctgccgcctgtctgctcccgaccattataataaggtcatctgcataccggacgaaatccagcctccttgcttccagttctttgtccagctcatttaacatgatatttgctaacagcggcgagatatttccaccctgcggtgtgccgactaccgtatcttcatactcatcatcaatcattacgccgctgaccagaatctttcttaccaccgatatgacatctccgtcctttattgtccgtccgaaaatcgtcatcagcttgtcatggtctactgtgtcaaagaatttcgctaggtcgatatccactatccagttgtgtccgtcattcatcatttccaatgctttaaggactgcctgctgtgcacaccgcttgggtctgaatccatagctgtggtcgtgaaactgctcctcaaatatcggggtaagcacctgtgccaccgcctgctgtacaaagcggtctactgctgttggcactccaagatttcttgtaccaccatcgggtttgggtatctccaccctgcggactggcttcggcttatacttcctcgtccgcaactgttccttaatgttttcgccgttttccgaaagatatgcgccaagttcttcaacggtcatcccgtccacgcctgccgctcctttattccttacgacttgcagatacgccgcatttagattatccctgcttaatatctgctccatgagactgcttgtgtccatgcgttgtttcctttctgccccttttgcctttgccgcctttgaagtcatcgacaggcgtatgctccggctacgaagtggaacgtacttcaactgattgattgttcagcccttcgctccgtccccattacaggaacttcctcactactatggcttctgctgacttctcacaattcgttgttactacggctaatgagaccgcctgtgagacctccccagttaaggtgcgtgttcttttcctccatgtacctgccgcatttactcgtacttccggcaaccttttggacttcagtgccttttgccaccttatccgtatttccgagccttatatgcggttcctgtccgtcaggtcagaggtttgcttacagcttctttcagattccgtctcacggcggacacccttgctgttcggctatgtgcttcgttgttgcctacgcgcacttgggactttcacccattagaaaacgcccatgctgggcaaacaaaatagacgtttcatgttttcacacaaaacgtctattccttgcattatggaaaagagtatcgtataatcttgataaatggtttcctagctggaactgagccagctaacacgttgctaacacttttgttaccagtacaggacatttcgtgaatctatcttccgcacagacctcacgcttttcctgtattataaggtgttagagggtattacaggaggttagaaactacttgctgcaaaaggacctttagaactcctaagaatatgttaatcacgggccaaatgtttttttgaaatctgaagtccggttcgaatggagttgtgaattcggcggatttctaacgccggggaagaggaacatttttaagaaaaatgctttcatgaggtaaaaatccattagcaaaatgaccgtttttctaatggattttccttctgaaatatagatcgtcaccttggacgaaacgcggaaaaccgcgtaaaatcaaggaaatttcatagatgtctctgtagctcagcaggatagagcgtccgcctcctaagcggaaggccgctggttcgaatccagtcagggacgccagcgcactatcgcggaagatttttcacgaaatcttccgcgtttcttctaataaaaaagaggcttcgttgataaagtgctaaaaaaacagggcttttatctaatgaggaaaaacgccctgaactggtgattccgctaaaaatggcgcatgtttccgtgttcaccggtgtatctgggtgctcttctgtgaaaaaacgacagatatcgatgagaaatgtggaaagctacagttgaaacggatatggttgagatgaatatcaaccagtaaatatctaaagacgttagaaatacgaaaggcaggattttagatttctaaaaacaagcgccgatattgaggaagcatttaaatcttgcataaaggagtgaagtgatgagaaaaaagattaaaattataagtgttgatggaattaaagtttttcctgtaaatacaaacccacaagcatacaccactccgttctctatacgaagtcagaaatggtatgatgaattaagtgattctgatccgtataatccatcatgcccacatcttcatagcgtagagggtccttacaaaatggatgtgtatacaggtcaaatatacaatacacagactaagaagattattgagggataccatatcagagaaaaggatttgaagaaattgtggaacgataagaaattcgttgcatttgctttagcaatgagaaaactctattctgataagtttcctaacggagctttacctgagataccagagtactgtgtaatacaagataaaattgaaacaaagctaaaaagaaatatccacaaacgtagtaatatttatgtaaagataaagataccagtgacacgtctgtaataaatcttagaagttcaattcaatcgctcattacaaattaatagatatcttacatagccccgtggtgattaaaatcactgcggggttttgtcgtctccggacttccccggcggcggatcaaaactatggaggatatcgtgatgagaaaaaaagtgagacgcaaaaccattctgattgatgggattagatactatgatgacaagccggatacctgccgcaagtgcttcttctggaagaatcgtaaggtcggttgtgtccttggaatgcagaactgttactacctggctgaggcagtaaagaccgagcaggaaaagaaatgtgagggttgctgttacgccaaaggccatccctgtgtcagtgctgtctgctacaaggaactggacgcatggctcagagcaatccgggctaaccgcgcaaaggaagaaggtgcggcaaatgagtaagaaggatgaggtcttccgcagatatgagaagctggcgagggctgcaaagagagaaaagctcgagagcgcatcggaccacaagcccggaagctgcgctcactgcctctactatcgcccggatttcaagtatcgccggtgccagttcaccaggtgtccctacggtaaggataaggatgtgtttcgcaaaaagcctctgaagcgcgataaattctcctgaaagcaggtggtgactatgagtgtttgattatttctatggacctcaggcagaacagtttgccttctaccgggttcccaaggtgctttttacgaatgaccggttcaaatatctgtctgctgaagccaagactctatacgggatcttactggaccgcgttcccctctctgcgaaaaacggatggatcgatgaacagggccgcgtgtatattatctgcacgattgaagaaatcatggaggacatgaactgcggaaataaaaaagcgatccagctgttatcggatctggaggacaaggtcggtctcattgagagaaagcgccagggtctgggaaaaccaaacctgatctatgtaaagaacttcatatcggtggacagctctgtgggaagacatttcttgaaatgtcaaaatgacacttctggaagtgtcgaaatcacatctcttgaagtgtcaaaaggacacggaaataagactgatagtattaatactgagtatagtgataccgattccttctattccgacagaagtgtcgggaaaggaagcgaagcgatggggatccgagctcaatatgaggattatttcagagaatctctcgagctggattatctttcccgggataggacacttgatcaggataccattcaggctatggtcgatctcatggtcgatgtatgctgctccacaagaaaaagcattcgtatcaatcgggaagatatgccaatcgaagtcgtaaaaagtcgatttatgaagctggatgcagagcatatcaaatatgccctgatgacactggcaaacaacacaacccgcgttaaggacatgaagcagtacatgctggcagtcctctacaacgcgccaactaccatcagttcttactatcagaactgggtacagcacgacatggccaatggcttgatctaggaggtgatcattatgtcgagagccacaatcatggctgtagtaaatcagaaaggcggaaccggtaaaactaccacctgcgaaaatctgggcattggccttgccaatgagggaaaaagagtgctgctcgtggacacggatccgcaggcgtccctaaccattgcccttggacatcccagaccggatgatcttccggtcacgctgaccgacctgatggcgaaggtcatgcaggatcagcccatcgcacctaaggaggggatcctgtcacatgaagaaggcgtggatcttgttcctgcaaatatcacgctgtcaggtatggaggtgtcgctggtcaacgccatgagccgcgaaactgttttaaggcaggttttagatgctttgaaatttcagtacgactatattctactggactgtatgccctccctgggcatgctgaccgtcaatgcacttgcagcatcggatcaggttctcattcctgtccaggcgaactatctgtcggcaaagggtctggagcagctgcttcagacggtgaacaaggtcaagcgtcagatcaatcccaagcttcgaatcgaaggaattctgctgaccatggtggaccttcgtactaacttcgcaaaggaaatcagtacgctgatccgcgatacctacggcagcaagctgaaggtatatgacgcagacatccctcgctccgttcgtgctgcggaaatcagtgcggagggcgtgagtattttcaaacacgatccgggcggcaaggtcgctgaggcctaccggagtctgacaaaggaggtgcttcagaatgccgaaaagaggcggaaacatcagcttgaccagctacgatgatatctttgaaacggatgaaagccgtgcagatagtcagctggaacgagtgcagaatatcagcatcagcgagctggtgccctttaaggatcatcccttcaaggtggtcgatgatgaagccatgcttcgaacgacggagagcattgcacagtacggtgtgctaacgcctctgattgccaggccgctggaaggcggcggttatgagatcatctcaggacatcgccgtgcccatgctgctgagatggcagggcttacggaggttccggttctggtaaggcagatggatgatgatgccgccactgtgctcatggtcgattccaatcttcagagagaaaacatactgcccagtgagagggcttatgcatacaagatgaagttggaggcgataaagcatcagggtgaacgtctcgatttaacttctggccaacttggccagaagtctgtcggagcggtatccagagatgtattagccgagcagtctggagaaagttcaagacaagtccagcgctacatccgtcttaccaacctcattcccgaacttctggaaatggtcgatcagaagcagatttccttcaatccggcggttgagctttcctatcttgctccggaggaacaggaggttttcatgcaggccatggatgaagtgcaggcctccccttctctttcccaggctcagcgcctgaagaagctggctcaggaaggcaatttcaccatggacgctgccagggagatcatgaatgaagtgaagaaaggtgatcttgaacgggtcaccttccgaaatgaacagctgaggaagtatttccccagatcctacaccacacagcagatgcaggacaccattatcaagcttttggatcagtggcagaaaaagaaagcccgcgatcaggagcgataaattaatacccataccccgagcactgtcagaagtaagccctttgatagtgctttctttttacccaaaacacgaaaaggagtatcaaacaatgactgaaaaagaaatgatgaagcagatgcagaatctgcttggtatccggaaaaagccttccgaaaaagagactgcagcaattgcgcttgcagattctgtagacgagctggcagaaatgttctgtgacagtgccattgttctttcccgaattgccagcctgcttcagggaaagaagaatccttgggacactaagaatttcgaagacgtggatgactgggacgaggatgatatggcctgtatggacgctactgtcctttttgcggttcccggcaagccggtacagctgatgacggaagaagacgccctgtcaaagtttccgggttttgatgatgagcagacgttttattgtgttgagatcggcaatcatctgtttctccactatatggagcaaacctgggaaagtgaagatgatatcaccattacggctccggtttatattgccagagtcaatgacgatgaaaccgaatgcgaggagcttaccgctatggactttcttgctgcaatgatctttttgaatgaccatttcgtgaccattaccggtgaagatggaaagaccatctgtggttattggctgccgaaagagaaaaaggaggactaacacatggattttgatcagtttaagattcaggttgtcgatgagatgcgcgagcgctttcccgatctggatatcggcattcaggctgtttcgaagctgcagggtgaatcctataccggtttggctgtcagccctgcaggcagtaatgttgccgccacgatgaacctggactatgtttacaagcgtgttgaggacggtatgcctatggagacagcccttcacaatattgaaaagcaggtggcagagattgccggaagtatgccgcagttcgatacccgggcactgatggattacgatcagatgaaggaaaagcttacccttcagatgattcccattgccggaaacgaggaaaagctttccgagattcctcacagagctgtggaggacatggctcttgtttaccgcttcgagatagaaagtaatgagcagggctccgccagcattcttgtaaccaacaacatgcttcagacctatggaattactgtggatcagcttcattcggatgccatggaagctgccgtgcagaaccatccggcgacccttcgcaacatgaatgaggtcttgcgcgacatgatgggcgatgctgccggtatgtttcttccggatgagccttctcccatctgggttgctacggtagagggcggtcagaacggtgcctgcatcattcagtatccggattttctggatcaggcggctgaaacgatgggcggcgatttctacgttctcccttcttcgatccatgaagttctgttcattgccgatgatggaagtatggaactcagtcatctggaagaaatggtgcgaagcatcaatgaggcggaggtcgcgcctgcggatcgtctctccgacaatgtattccactatgacagtgaggaacacatctttgaaaacgcccgtacctttgaggcccgcgaggctgccagagtagaagccatgcttgctgatgagcctgccggatttatggaggcagatacgatcaccatgctgctggttgaacccaatgagcacccgaaggtcattgaagcaaagaccggccttgaggatcttcagcagctggtaggcggctttatcgaggtggtttatcccttcgaggatcctgttggcctgatcgtcaatgaggaaggcaaaatcaacggacttcctctcaaccgtgctcttcgtgatgagaacaatgaggtctatgatgtgattgccggttccttcctggtgaccggtcttacggaggacagcttcggttccctcactccggaacaggtcggcaagtttgaggagttattccaccagccggaggccttcgtgaaaatgggacgcagcatcatggcgatcccgattcccgatgaggccctccagtcacgcgaagcggtgaaagccgccgaagagatcggcggtaagccgaagcacaaaaggcctgagcatgacggtcactaatgatgttgaaataaggaggtacacatggttagaccactggcatatatcactgcaaactggagtgacaatgaatttgaagcgaaaagcacggccctgcgttattgccgaaaggtgtatgaagcagggttttctcctatctgtccgaggctcatgtatgaggggctcttacgggacgagatcccccaggagcacaaggacaggattgaaatggcatcggagcttctcagaagatcccgcattctcgtggtttgcggcgactcgatggatggacaggtcaaagacgatatcggtctggcaaagaggctccgtattgccgctacgactcttgacggcattatgaaggtggagggctccgccggaaaaaagtcatgatgccggaaaaatgaaccgaaggaggtggtgagcattgcaggaggaagtagaaaacagaactgtaaatttggccatcagcacgaccaagcttacggctcacagtattgtccgacttggtctgaaggggatcgcttatattaagcgaaaagctcaggaagcggcaatgaaaaacgagaagcccaccggcaagcagactattcaggaactgattggccagaatcagggcgtaaccaatatcgacatctccaaaacagacctgaagggctttgaaaagtatgcccgaaaatacggtgtcgattatgcaatcaccaaggataaatccgtacttccaccgaagtacctggtgttctttaaggccagagatgcggatgccatgacagcggcattcaacgcctactctgcagagatactggcaaagaacaaacgaccgagcgttctgaaaacgctgcataagctgatcgatgcggtgagagatatcccagcgaaggtggtaagcagggataaacagagggagcagtcgcgatgagcccggataccgttaagctgaaaaagcttctgatccgggccctcccttatatcctgatcggtctggtctgtaccaatctgggagaagcctggcgaatagcggagggcgcgaatgcttctgaaaagttgctgtcattctttacaacgatgggcattgctttcggaaatccccttccgagctttcaacccattgacttgatagtgggcctgatctgcggggcaggtctgagggctgccgtctacatccggggaaagaatgccaaaaattttaagcataaccttgagtatggttctgcccgatggggtggcccgaaggacatcgagcctttcatcgatccggtctttgagaacaatgtgatcctcacaaagacagaacgactgatgatgagcaaccgcccaaagaatcctgccaatgccagaaacaagaatgtgctgatcgtcggcggctccggttccggtaaaacccggttctggattaagccgaacctgttgcagtttcattcttcctatgttctgacggatccgaagggcacgactctgctcgaggttggaaatgcatttgtccatgcgaattaccggatcaaaatcttcaacacaatcaattttcacaagtccatgcactataatcctttcgcctatatccacagcgaaaaggatatcctgaagctgacgaccacactcatggcgaataccaagggtgacggcaagggcggcgatccgttctgggacaaggccgagactcttctctactgtgccctcatcggctatatccattatgaggcaccgaaggaggaacagaactttgccacgctcatcgaatttatcaatgccatggaggtccgtgaggatgatgaggatttccagaatccggtggatctgatgtttgaaggcctgaaaaagaagaagccggatcatttcgcagtccggcaatatgccaagttcaaattggcggcgggcaagactttaaaaagtatacttgtgtctgccggtgcccgtctcgctcccttcgatattcaggaggtccgagaaattaccatgtacgacgagctagaactggatactctgggagatgaaaaaactgccctgtttctgatgatgtcagatacagacggcagcttcaatttcctgatcagcatgatctacacgcagctgttcaacctgctgtgtgaaaaagcggatgatgtctatggcggcaggcttccggtgcatgtacgatgcctgatcgatgaggcggcgaacattggccagattccgaatttggaaaagctggttgcaaccatccgttcccgagagatcagtgcctgtctggtgctgcaggcccggtctcagctgaaggcgatttacaaggacaatgccgataccatcatcggcaacatggactgccaggtattcctgggcggctctgaacctaccactctgaaagaactctccgaagcactcggcaaagaaaccatcgataccttcaatacctcggatacacgaggcaatagtccaagctacggaaccaactaccagaagctgggcaaggagctcatgagtcgtgatgaactggctgttatggacggcagcaaatgtgtccttcagttgagaggcgttcgtcctttcctgtcggataagtatgatctgacccagcacccgaactataaatacaccgccgattatgataagaaactcacctttgacattgagaagtacctgagtaccagggcaaagcttcatccgaaggatgagttttttgttatggaagaagaaaattaaggaggtaagccgcaatggcagatgaaagaaatccgttgccgatggatgttcctgacttcgtaagagaagcggaggaagctatggcgcgtggcgaaacctttggccagccgctggccgaggtaacgatcaaattcggtaaggggctcgtgggtgagccctttacttcgaaaagcggtaaggagctggtggaagtgagtatcccgaatccggataagactgatacccgtccctgggaatcctttgtgatttccccgaagatgattcacgacaatcagttcggaaaaggtgtctggatgaagcttccggaggatggaacgacccgcctttcccgttcggtgaagaccggcatggatgaaaccggaagatctacctgggatcgtgagaccagagaagtgaccaacacggaactgaaggccctgatggagtcctataaagatagatccagaggctctatcctctcggacttgtctggccggaaggaagaaacagcggcagtcaggccttccggtaaggcggccaggaagcaggaagctgccaggtaaggaggcaaaatggcgacattcatatacaccggcgaggagtatatcaatgcagatcacatcatcagcattgatgccagccctggtacagcaactatctggatccgattggataccggagacaaatatgcccgaagcgcaaagcatctgaaagatatcctggaagccctcggctgcaggaaagcagaacaaaacgagtaaatactcaggcgacaggcggcagcatgctgcctgtttacatatccgggactgactgatcatcggccccggatatttttatgcccttcttttcctgcaggtgcacatgccgggagtcacgggggcaatttttatttcattatcccgaccatataggcgggcaaatcaaggaggaaaactttatggcatttttcaacagcgcagtcggtgttctgcagactctggtagtagctctcggtgcaggtcttggtatctggggtgcaatcaaccttctggagggctacggcaacgataaccgtgcgacacgttcgtaagtgaaaagcttacgcacaaagtcgaagggcaattgtagcccgaaactttggagaactgatattccgatgggtgaaatgagggggtaacgtcccgaagcgccaccctaatactccgaatggcggtgagcatgcaacggctctctccaaaagtttatagagctcggtgaagtcggcagagagcaaccgtaagactggttttcagaccagacacgaaagctgtccagaggtggatggtgttgcctatatgccgggggtcggatatccatggtgagaatgtatgaaaatactgacgaaattctgaatgtacgagtctaaacgttgatgctgtcgaaaggcagtacacctttcatggtggtatctgtgggcgagtaaaattggttgttatgaaagtccatgcatcgttacaggcggtgcggttatgcatgaccagatacaggcttagaggaagaacctaaagatatccaatgataggaatatcggaacgtggaaagctgggaacacggaggcggttgcaagccagtgatgtggtggatgggaataccttcgcgagagggcaataaccattctttattccagtgagagtagtggcacagtacctgtgaagccgtgaataagtaagcggtggagggatagccacaagtcgaattcagcaatgaaaatgaaaacacaacaaacacagcttcgagtatgacaaagaaaatccaaaccgaagggagaggatgcctgtgttgacttcggggcagcaagaaaggaaaagtaaacagagaaaaatccgcaactcagagtattacgacatggaaggtacttttgacaggctgtatgcagaaagtacgaaagataaaaccttcaaccatctgatggaaatcatcgagagtgaagaaaatatcaagcttgcatacagaacgataaagaagaatacaggaagtgatacttcgggagtggataaaaggacgatagccgaccttgcaaagttaagtgaggaagaatacgtccgtctcatacggaaacaattcagtaattatcatccacgacccgtaaggcgagtggagataccaaagcccaatggaaagaccagacctctgggaattccaactatcgtagatcggatcgtacagcaatgtattttgcaggtcatggagccgatatgtgaagcaaaattcagtgagaactccaacgggttccgcccgaaccgttccgctgagactgctattgcgcaatgtatgaggctgatacaggtacagcatctgtaccatgtggttgacctcgatattaaaggcttctttgataatatcagccatacaaagctgattcgtcagatatgggcattgggaatccgggacaaaaagctgttatgcattataaaagagatgctgaaagcacctgttgttctgccaaatggggagaaaacatatcccacacggggtaccccgcaaggcggtattttgtcgccattgcttgcaaacatcgtattgaatgaactggattggtggattgcttcccagtgggagcagatgccaacaaagacaaaattcaaaacaaggagcaatgcgcagggaacagagattaagagccacgcctacagggctctgcgccggagcagactaaaagagatgcatgcagttcggtacgcagatgattttaaaattttctgcgcaacacatgaggatgctgtcagagcatacaaggcaacagagttatggctaaaggacaggctggggctggaaatcagccctgacaaatccaaagtagtaaatctcaaaagacagtattctgattttctcgggttcaagctgaaagtccgtaaaaagggtaagaaatatgtagttcggtctcatatgagcgataaagcatacaaaaaggctcatgaaaaagtctcggaagaagtaaagaaactggctcattcgtcagatgataatgctcagttcatgcagcttcagaaatacaactctgtagttgccggacttcatgaatactattgtatttctacagaagtatctcatgacttcagcagacttgccttcagtatcaacaaacagctcagaaacagactgaaaggcgacttatccaaaaagggacagctcagaaatgggttcattaaagaaaagtatggagcaagcagacagatgaggttccttcatggacgtccggtggttccactgggatatgtccagtcaaagaatgcccagcataaaaggaaatccatcaataaatatacggtcaaaggtcgggaacagattcataagaatcttgcaatcgacacagcgacaatgttatggctgatgagaaatcctgtaaagggtagaaccattgaatatgcggataaccgtatttctttgtatgcggcacagtatggtaaatgtgcagtgacaggaattccgatgaattcccacgatattcattgccaccataaagtgccgattagcaatggcggttcggatgaatacgcaaatcttattcttgtcagcaaagcggttcatatccttatccatgcttcttcagaacctacgatggagaagtacctgaaatccttaaatcttgacaataaacaaatagaaaagcttaacaaacttcgttctatggcagaaatgccacctattattctttgaatttaatgctgtaacgaagtgtgtaagttgtgtttaaaagccctggacggctgaattcgatggagcgccgtgtgcggtgaaagtcgcatgcacggtgtggagcgggggaaaatccggagataacttcaaaggattacctatcgctatccggtgctaagtctcagggtatgaagcagctgatggccggtggcggtgtggccctcatcggtatcactctggttcccctgctttccgggctcttcggttaatccgaatccagactgcttgccggggcagaaaatccggccaggcggcgcaagctgcctgatttatatagtgattgttgaattgaggaggttaattaacataaaagtatatctttgtcaagaaaaatttatggatatttgatcgtgaatgtgatatgattataagactaagggataaagaaaggaggcgtggataaatgtataatgttttagatgtatgccgccatgtcattaattatagtaatgatatggactatggaatttcaaatctaaagttgcagaaagtgctttattttattcaggcattctttctaatatcaacgcctgaaccatgttttagagaaaaaattgaagcatgggattttgggccagttgtgccagaagcttatcgagaatacaaacaatttgggagtagcaacattccgagagtgtcatatattatagactttgattccgaagatatatggaattcaaaagtgaaaaggtatgttggagatagcattagagaagctgatcaaaaaaggatagaggccgttgtggatagatttgcagagtattctgcaacggatcttgtttcaattacacataatcagtctccgtggaaagatgcttatgttcctcatatgaataatgagattactactgatgcaataaaggagtactttaatggctgatgtaatggagaatctcttaaagagtgaaaatagtgccaaagaggttccggccaagccttcaaaaaaactgaatgaaacaaaaaagagacttaatggtatatgcaaatcaataatgattgattcgagtatttattcacccaagaaaactgtcgatagcatcgatgcgtatattaaagagtcatctaaagtggatcgaattttatattccgaaatcagttcgttcattgttgctttggatgaaagtggaagaggaaccttttctacaaatattgaaaaacttctcatgtatgttttggatgaagcaaatagcgttcaagaggacagtagaaagatttgtataaagatttatgatcattttcaattgaatcttacacagatcgaaagctcagctactattacgcaaatgcaaattgctaaaaccataggtgaagaaaaggccagtttgcatagagaagttaaagaagttgaaaaagagtacattactattttaggtatatttgctgcaatcatgcttgcatttgttgggtcatttacgttttcaacgtcggttttaaataatgtaaccaatacaaacgcgtataagttagcaattatatcattggtaataggattggtattcattattctaattaccatcttgatagaattcttaaaagaaataaatgataaagttcatatcggtgaagatggaaagaggaaaatgaattctgtcagcaaaatggcgattattctgatatttatattgattgttgttacaattcttggaaattctatttctcaaatcaaatttccggagaaggtgtatttaaattcgcaaaaagaaacaatcgataatacaaaagttgagaatgacatctcatcagaatactgatattcacttttttatagagcttagggcaaggtggaaaagaaacaccttgccttttttctgatataaagatcattcctgttctcaacaattacatagcccagttactggatttacccagaaactgggctatttttctgcccttctccggctgcaggtgcacatgcagctatgaggagggccttgttatatccacattttttttactgatggcccggttatccaccaactatacttcggatccgggcaaaggaggacaaacttatggcatttttcaacagtgcagtcggtgtactgcagactctggtagtagcactcggtgcaggtctcggtatctggggcgcgatcaaccttctggaaggctacggcaatgataaccgtgcgacacgttcgtaagtgaaaagcttacgcacaaagtcgaagggcaattgtagcccgaaactttggagaactgatattccgatgggtgaaatgagggggtaacgtcccgaagcgccaccctaatactccgaatggcggtgagcatgcaacggctctctccaaaagtttatagagctcggtgaagtcggcagagagcaaccgtaagactggttttcagaccagacacgaaagctgtccagaggtggatggtgttgcctatatgccgggggtcggatatccatggtgagaatgtatgaaaatactgacgaaattctgaatgtacgagtctaaacgttgatgctgtcgaaaggcagtacacctttcatggtggtatctgtgggcgagtaaaattggttgttatgaaagtccatgcatcgttacaggcggtgcggttatgcatgaccagatacaggcttagaggaagaacctaaagatatccaatgataggaatatcggaacgtggaaagctgggaacacggaggcggttgcaagccagtgatgtggtggatgggaataccttcgcgagagggcaataaccattctttattccagtgagagtagtggcacagtacctgtgaagccgtgaataagtaagcggtggagggatagccacaagtcgaattcagcaatgaaaatgaaaacacaacaaacacagcttcgagtatgacaaagaaaatccaaaccgaagggagaggatgcctgtgttgacttcggggcagcaagaaaggaaaagtaaacagagaaaaatccgcaactcagagtattacgacatggaaggtacttttgacaggctgtatgcagaaagtacgaaagataaaaccttcaaccatctgatggaaatcatcgagagtgaagaaaatatcaagcttgcatacagaacgataaagaagaatacaggaagtgatacttcgggagtggataaaaggacgatagccgaccttgcaaagttaagtgaggaagaatacgtccgtctcatacggaaacaattcagtaattatcatccacgacccgtaaggcgagtggagataccaaagcccaatggaaagaccagacctctgggaattccaactatcgtagatcggatcgtacagcaatgtattttgcaggtcatggagccgatatgtgaagcaaaattcagtgagaactccaacgggttccgcccgaaccgttccgctgagactgctattgcgcaatgtatgaggctgatacaggtacagcatctgtaccatgtggttgacctcgatattaaaggcttctttgataatatcagccatacaaagctgattcgtcagatatgggcattgggaatccgggacaaaaagctgttatgcattataaaagagatgctgaaagcacctgttgttctgccaaatggggagaaaacatatcccacacggggtaccccgcaaggcggtattttgtcgccattgcttgcaaacatcgtattgaatgaactggattggtggattgcttcccagtgggagcagatgccaacaaagacaaaattcaaaacaaggagcaatgcgcagggaacagagattaagagccacgcctacagggctctgcgccggagcagactaaaagagatgcatgcagttcggtacgcagatgattttaaaattttctgcgcaacacatgaggatgctgtcagagcatacaaggcaacagagttatggctaaaggacaggctggggctggaaatcagccctgacaaatccaaagtagtaaatctcaaaagacagtattctgattttctcgggttcaagctgaaagtccgtaaaaagggtaagaaatatgtagttcggtctcatatgagcgataaagcatacaaaaaggctcatgaaaaagtctcggaagaagtaaagaaactggctcattcgtcagatgataatgctcagttcatgcagcttcagaaatacaactctgtagttgccggacttcatgaatactattgtatttctacagaagtatctcatgacttcagcagacttgccttcagtatcaacaaacagctcagaaacagactgaaaggcgacttatccaaaaagggacagctcagaaatgggttcattaaagaaaagtatggagcaagcagacagatgaggttccttcatggacgtccggtggttccactgggatatgtccagtcaaagaatgcccagcataaaaggaaatccatcaataaatatacggtcaaaggtcgggaacagattcataagaatcttgcaatcgacacagcgacaatgttatggctgatgagaaatcctgtaaagggtagaaccattgaatatgcggataaccgtatttctttgtatgcggcacagtatggtaaatgtgcagtgacaggaattccgatgaattcccacgatattcattgccaccataaagtgccgattagcaatggcggttcggatgaatacgcaaatcttattcttgtcagcaaagcggttcatatccttatccatgcttcttcagaacctacgatggagaagtacctgaaatccttaaatcttgacaataaacaaatagaaaagcttaacaaacttcgttctatggcagaaatgccacctattattctttgaatttaatgctgtaacgaagtgtgtaagttgtgtttaaaagccctggacggctgaattcgatggagcgccgtgtgcggtgaaagtcgcatgcacggtgtggagcgggggaaaatccggagataacttcaaaggattacctatcgctatccggcgcaaagtctcagggtatgaagcagctgatggccggtggcggcgtggccctcatcggtatcactctggttcccctgctttccggactcttcggctaagaaaggagtgttaatcgttggacagcgtactcgatcagattggtgaatggctgaaggaactgcttgtttccggcatcatgaaccagctgacgggactgtttgattcggtaaacactcaggttggcgatattgcgacgcaggtggggacgactccggcgaatttctcgccgggcgtcttcgccatgatccggaatgtttccgaatcagtgattatcccggttgcaggcttgatcttgaccttcattgcctgctacgagctgattcagatgatcattgaccacaataaccttgccaattttgaaacctggatcttcttcaaatgggtctttaagacctttgcagccgtgacactcatcaccaacaccttcaatattgtgatggcagtctttgatgtgacgcagcatgtgatcaataacgcaggcgggctcattgccgggaacacggcggtggatgctgcagccttagagaccatgcaggatacgctggaggccatggaaatcgggccgctgtttgcactgttcctgcagtgcatggtcgttcagtttactatcaaggcgctcagcgttgtgattttcgtcattgtctatggacgaatgatcgaaatctacctgatgaccagtatggcaccgattccgttctcgaccttcggaaaccgggaacagagcatggtgggacagaactatctcaggtctctgtttgctctcggcttccagggctttctgatcatgatctgtgtcggcatctatgctgtgctgatccagagcgtctctatttcggatgatattatcggatccatctggggcatcctcggatacacggttctgctgtgcttcacattattcaagaccggtgcattggctaagagcgtattcagtgcacactaaggaggacggcatgaaaaagtacaatgtaatttatgcggatcctccttggcggtacgaacagaaaagcttgcagggagctgctgaaaaccattatcctacgatgaacatcaacgatatgtgtgctttacctgtaggcgacctggcagataaggattgtgttttgttcttatgggcaacctttccgatgctgccagaggcattgaagcttattgacgcatggggatttcagtataaaacagtagcctttgtctggctgaaacagaacagaaaaagtaagtcatggttttacggcttgggtttttggacaagaggtaatgcagaaatatgcctgctggcgaaacgaggaaaaccgaaacgacaatgtgcttcggtacatcagttcattatctcacctatcgaagaacacagcaaaaagcctgatgaaacaagagaccgtatagtagcccttatgggagatgttccccgaatagagctatttgccaggcagaaaacggatggttgggatgtctggggaaacgaagctcccgatagcctgaatctgccggaaatggaggtgaaataattggcagcttatattcctgtccctcgcgatcttacgagggtcaaatcaaaaatcctattcaacctgacaaaacgtcagcttctctgctttggggcgggtgcacttatcggtgtcccgtctttctttgtgctcaaggcaggcggcaataccagtatggcatccatctgcatgattatcatcatgctgccgttcttcttcctcggaatgtatgaacgggacggtcagccgctggaaaagatcgcaaagcagttcattcaggccaagtttgtaaggccgaaagtccgtccctatcagacgaacaactactatgccgtcctgatccgtcaggcacaggcagaaatggaggtaaatcacattgtttacggtgaaaaatctgttccgaaaaacagaaaaaagaaacctgaacatgccgaagaatctgactaaggctcaggcaaggcaggttcaggagatcatcgaccgtgcaaggcgtgatgacggcattccccgcaccgcgcagcagtcgatcccgttccagcgtatgttcccggatggcatctgccgtgtcagcgacaagtattacaccaagaccatccagtatcaggacatcaactatcagctggcccagcaggaggacaagaccgcgatcttcgaagagtggtgctccttcctgaattttttcgacagctccattcatttcgagctgtctttcatgaatatggcgacggatgccgaagtctttgagaagaacatccgcattccgtgccgcaacgacaacttcaacaatgtccgcagcgagtacagtcagatgctgaagatgcagctcgctcagggcaataacggtctgacaaagaccaagtatatcaccttcggcattgaagccgagtccatgcgcgaggcaaagccccgcctggagcatgtgcagaccaacctgatgaataacttcaagcgcctcggcgtgtcggcgagggtgctgaatgggaaggaacgtctgcagctcatgcatgccatgtttcacatgggcaacaatgaccgtttttacttcgactggagctggctggcaggctccggactttccgtgaaggacttcattgctcccacatccttctctttcccgggcggcaaaacctttaccatgggcagcctgtacggagccatgagttatctgcagatcacagcatcggatctttccgaccagcttctgaaggattttctggatatggagtccagcgagatcgtcaccatgcacatccagtcggtagaccagaccgctgccatcaagcagatcaagcacaccattaccgagcttgaccgcagcaagattgaggagcagaaaaaggcagtccgttccggttatgacatggacattatcccttccgatctggctacctacggcaaggatgcaaaggcccttctgaaggagctgcagtctcagaatgagcgtatgttcctgattaccttcctgatcatgaataccggcaagacccagcaggagcttgagaacaacgtgtttcaggcgtcctccattgcccagaagcataactgcaatctgcgaagactggattttcagcaggagcagggtctcatgagcagtctccctcttgccaacaacctgatcgaaatccagcgtgctctgaccaccagctccacggcaattttcattcccttcaccacacaggagctgtttcagaacggcgatgaggccttgtattacggcctgaatgccctttccaacaacctgatcatggtggatcgaaagaagctgaagaatccgaacggtctgatcctcggtacgcccggttccggcaaatccttttcggcaaagcgtgagatcaccaatgccttcctggttaccgacgatgatatcatcatctgcgatccggaggctgagtacacggcactggtcaactgtctggagggtcaggttatcaaaatcagcccgaccagcacccactatatcaaccccatggatatcaacgagtcttactccgaggatgataatccgctggctctgaaggcggacttcattctttctctctgcgagctgatcgttggcggtaaggaaggactgcaacccattgaaaagacggtgattgaccgttgtgtgcaccagatctatcagcactacttcgaggatccgaagccggagaacatgccgcttctggaggatctctacaatgcgctcttacagcaggaggaaaaggaagcccatcgtgtggcaaccgcgctcgaaatctatgtcaaaggctccctgaaccttttcaaccacagaaccaacgtcgatatccagaaccgtttcgtctgctatgacattaaggagctgggtaagcagctgaaaaagctcggcatgctgatcgttcaggatcaggtctggggccgcgtcacggccaaccgttctgccggtaagacgacccgctactatatggacgagttccaccttcttctgaaggaggagcagaccgcttcctactccgttgaaatctggaagcgctttcgtaaatggggcggcattcccaccggtatcacgcagaacgtaaaggacctgctttccagccgtgaggtggagaacatcttcgaaaactcagactttgtgtatatgctgaaccaggctgccggtgaccgccagattctggcgcagcagctgaacatttctccccatcagctttcctatgtgacccactccggagaaggcgaaggtctcctgttctacggcaatgtcatcctgcccttcgtggatcatttcccgacggatctggagctctaccgtatcatgaccacaaagttgtccgaggtggcagaagcaaaggcggtgtgatatggcaaagaaagcgaccaggctccatttcacagaggacgagcttgcaaatcccagggtcaaaaaggctgcgtccaaagcggaccgggcggcggataaagcggaccgggcggcagctaaaacgccgaagaagagaaagctgaagctggatgaagataagacagccggacgaaaggcgcacctcacttttgaaaagcaggagatccctgtcggtgaactgaccggcaggggcaaccgcttcaccagatcggcggttcattccacgactgtagccgtgtccggaacaattcacggacagatttctgccaataaccaggacgataatacggcagtccaggctgtcgatacctctgccgaagcagctgaggtcagtgcacatgccattgatcatgctgtctacagtaagaagctgaagtcctatgaaaaggcggaatatctgcagaccaaatccgatgccgccaatgtggaagccatctatcagcagcgtatggcggagcatccggaggaattctccaacccggtatcccgctggcagcagaaaaaggcgatccgaaaagaatatgcggcagccagacgagctgaagaagcagcggcaaatgcgggtgccacagcaaaagaaggtgctgccggggtaaaaacccttgggcagaggcttgttgacttgaaggacagggcctttgagtatgtggccgagcatccgcagctgtttctggctattggagcattggcgattctgattatgatcgtttcgtcatcgctgtcttcctgctccgctttccttccgggcggttccggagccattgtggcgacaacatttacagctgatgatgaagatatcatcggtgcaaacaacgactacaaggcgctggaagcagagctgcagcgaaaggtcaacaacatcgaatccacctatcccggctatgacgaatacaactactatctggacgagatcggccatgacccctatcagctggcagcctatctgacggttcaattcgaagattatacgagaagcgaggtccagtccactttgcgttccctctttgatcgtcagtatgagctgaagcttgaggaaaaggtcgagatccgataccggacagagaccagaacaggcaccaccacttccacggacccggagaccggcgaagtaacggaggaggaatacgaatatgaggttgaggttccttatgagtactacatcctcaatgtcacactgaccaataagaacctgggacatgtgatcacagagtccggcggtatgaatgaggatcaggcggagcgctatgctatcctgcttcagaccaagggcaataaggaatatctttttgcggatgatccttatgtcacgaccagcagtgagtatctgaaatatgacattccgggtgaagctctgacggatgagcgatttgccaacatgatccgcgaagcggagaaatacctaggctatccctatgtctggggaggttcttccccttccaccagctttgactgctccggttttgtttcatgggtaatcaatcactgcggaaatggttggaacgtgggccgactaacggcaagcggtttgatgaatcactgctccattatccgacccagtgaggcaaagcccggtgacctgattttctttcagggaacctacaacacatcgggagccagccatgtcggtatctatgtcggcaacggcatgatgatccactgcggaaacccgatttcctatgcatctatcaacacgtcctactggcagcaacacttctactgcttcggtaggataccagattaagcaccacgcatgattacgcactacgtgcttttatcatgctaagaacattcgcaatccggtctgtcgacctacttgctcatgttcttgcgggtcgctaatggacagaaaagcaattgtgcaagcacatgctttccgcccattgctcccctggtgcttcagaataaggaggtaacgcaagtgactaagcttgagaaaatcggcgctgatctgaagcgtgcccgcataaagcaggctgaatggaatcagcgtgtgaagaatctggagaaccgctatcgtgaggaggaaaacagtgtgatccattccatggttcacgctgccaatctgactcctgagcagcttgcccagatcatcgaactggcagccaaaggaactgtcggtgtttatccggaacaggccgatgtgcctgaaatcaataacgaggaggacagagaaaatgacgattaagagaatgatggcagggctcatggcaggtatcctgatgatgggaaccttttctacgacctgctttgcagctgcggcagacagtggcagcacagaaaagaagcccgaggtaatctcagaaaatgcgactaccacccctgatgtggctggcacggaggaaacggaggaggaaaagctcccttacgatgtgagcgttgatgaggacggcaattacaccttctccttcggtgactgggaatggtccaccgaagacatggaaacggatggaaccgatgcgacggtcaacaacaaggtcagaagttatctgaaccttcgctccggttccggcatggaatatgagatcatcggccatttgcttcccggtgaaaaggtccaggtgatcagcgaggatggcgactggtatcaggttgtgattcccgagagaaccggctacgtgtataaggactatgtggacatgctgaaaaaggaagaagaaagcggaaccattgatgaagaattcctggcaatgctgctttacctcatgatgagcagcataaatcagacggacacttctcttcctcttactcctgacggcaacctgacactggttgatgatatcggtccctccaccggggccggtcagcagttcattaccatggtgaccaagtccggcaactacttctatctgatcatcgaccgcaatgacaagggtgaagagaacgtacatctcctgaacctggtggacgaagcagatctctttgcgctcatggatgaggagcaggtaaaggcgttccagacggcacaggatgccgccaacgccgaggaagaggaacctgctgttactccgtctgcacctgataaagatgcagagccagaaaagcaggagcctcaggtgacggaaaagaagcctgtgaacatgctgcctatcgtcggtgtggtcgccgtactgattgcctgcggaggcggctactttatgatgcagacgaaaaagaaaagggccactgagcagagaccggatccggatgcagattataccgaggatgacgacgatgagtacgagattccgatggatgaaaacgatgaagatgaaatcgagtatctggacgaagacaattctgaagaggttgaggactctcaggaataatgaataggggtgtggcccggggcggcgaaagctgccctgttacatagtgagatgcgtaatatattgggcacctaatagccattttaaacgccatgcatattgactttgacatcctgttttggtatactaaaggtggtcattgattggcatatgaggttttctgcgaggcctagaaaatatgtcaatgctccccgatttcgaatacttatctaacgctgtaaatccactggggagaatgagactaattatttcaagcagaaaaaaccgctatgttgagaaaggggcgaagtgggatggagtacaagaagccagttgtaatcaatactgagaaggtaaatgctgcaaagtgtggcgatggtccttgcggaagaccttgtgataagagagcataatagaaaagacattgaaaccaaggacgcagagtagtttcttctgcgtcctttttgtatataaaggaaatcaccatgtactataagttgagacaagatatattgtttagacaatatgaggaatatggatacattaccgataattcggaatatggataccgaatgttggatgatacaaggcctaaaaggaatgaaaagtttgtatcccaaagcggcgcagtaatgttgtcaacattagaaagaattcccaagcatattgatataatagttgaagaattgtcccgcatttatactggggtagattttgaaactctaaagagtgatacgattgaattttttcagtattttgttgaagaaggttatttgtcagtcggagaatcagttgcgtgctgtcaggatattgatattagtaacaactcagatgttacagaaataacgcagactgccagtacaactaattcagatgagtgtggccatagcatgtttaaaacaaacgaatttcttcgaagcttacatatcgagattgcaaatgcctgcaatgaacgttgtgtgcactgctatatcccccacaagtataagaccgatgttatggatccagaactcttctatcgaattattgaagatggaagaaaaatgaatatcatgcatgttacgctgtcaggtggtgagccactgctgaataaagctatcattgaatttttgcaaaaatgcagagaatcagatttgtcagtcaatcttttatccaatctaattgctttgtctgacgaagtaattgaagaaatgaaaaggaacccctttctttcggttcaaacatcaatttatgccatggacccggaaattcatgattcaatcacaaaagtttcaggaagtttggaaaagacgttggccggaatagaacagattttagcagctggaatacctgtacaaatttcatgtccagttatgaaacagaacaaggatgcgttcgaggcggttattagatggggattcgaacacaagattgctgttgctgtcgaacctgttatttttgcttcttacgatcatactggggacaatctccctaatagattgtctgttgaggagataggtaaagcagttgaggtagaacttgcagaaggatacggagattcaatttactccgctgcaaaagaaaaggaagcttttaaagcgaatgatccgatctgttctatttgtagatatagcttttgtattgcagtaaacggagacgtatatccgtgcgtcggctggcaaacgaatgttttgggcaatgtacacaatcaaagtattatagagatatggaatacatctgaaaaaatcaagcaattgcgtcaggtcaaacgcaaagattttcccaagtgcgttgattgtaaggacagaggattttgtacggtgtgtatgatgagcaattctaatgaaaacaatgatggaaatgcttttagaatcaatgatttccaatgttcggttgctgcattgacgcatcagaaagtcgatgactatatgaacagaaagtctgacagataaaggcggctattgagtaaaagaaaggaggaacgctgattattatggaaagaataataattaaagatgcgcatgagaacaatctcaagcatttgaatattgatatacctttagatgcttttacttgtgtgactggttgttccggctgcggtaaatcatcattggtattcgatacaatttatgcagaaagtcagcgtggatttctcgaaggaatgagcggtagtatttatagtcaaaagctcatgaacaagcccaaagtaggtgatattgagaatcttcgtccggcacttaatatttcacagaattactataatgtaaatccacgctcaacagtaggaaccattacagagatttcgtattatttgcgaacactgttttctttgatgaatagtaattctcaaaatgatatttccgagaacacgttctcctttaataatccaaagactttttgtcctaattgcaatggtcttggtgttgaaatgatagtgtctccaaatcttatggttcccgatccagataaaactttgcgtgaaggagcaatcttgttttataaaggaccggcagacagtaaggaacaaaagagtcttgaggctttatgcgaatatcatggaatagatattgacaagaagtactcacagttgagcaagagcgagattgagaagctgttatattccgaggaagtatatcgtgtaaaaatcgcctataaagaaggaaaacgcaaaaagcagcattttgtttctttgcaaggtgttatccctatgttaaaggatcaaattgcaagtgtggattctatgacacaggcatcagcatatgctaaatatgcggaaaccgttccatgccatgtttgtaatggagcaaagttgggtaaaaaagctttggaatataccgttggtggccttaattattatgaagtagaggcgatggagctttcttcgctttactcatggattgtaaatcttaaggacagtagaattaccgctgagaagaaaatcctagtagaacaattacagcatagtattctcgataaaatagatgctcttcttgcattgaatgttggatatttgtgcctaaacagatcggtgccatcgctctcaggcggagaacgtcagcgtgtgagaatagcaactcaacttacatgctctttgaaaggcttgatttatattcttgatgaaccatgtaaaggcttgcattatcgagatatcacaagaattattaatgcaacgaaagatctgattaaaaggggaaatactgtaattgcgatagagcataataaacagtatatttctgctgcggattatagaattgagttgggaccagagggaggtccaaaaggtggatatttaataagccagggaaaagttgtgaaggagccccaaaaaggtctttgctttaagcctgtaaatgtgtataagaattatcttgaacttaataacattagtttgcgtaatatttcaaaacagaatgcgagatttccgattggtggaataacctgtattacgggagtttccggttctggtaaatccacattagcactggctgtttctgaaagtctaagcaagagtacagctaaaacatacggagttcttcgcggtcaacaatatataaagagaattattcgggttaatcaggctccgattggtaaaaccccaagatcaacagttgtatcctatttagaaatctttgatgaaatcaggtccttgttttctaagaccgaaacggcaaagaaattaaaactctcggcatctatgtttagcatgaatgttaagggtggaagatgtgagttttgtcaaggaacaggtatgcagaagattgacctaaactatcttcctagtgcatttattacctgtccagaatgtcaaggacgacgtttcaacgataatattctgtctgttatttataaagaaaaaactattcttgatgtattggatagtcccgttgcagatatcattgagacattcaaggataacaaaaaagtgttctcagtattaagtagcatgattgaattgggattgggctatttgactttggggcagatgtctatgaacttatctggtggagaagctcagcgaattaaattggcaaaagctttaggtgttttatccagtgggcaaaacctatatattcttgatgagccaacatctggcctgaatgaaactgatattgagaaattcagaagggtactgttctcgttgcaagaaaaaggtgaaacgattttgctcatcgagcataatatagagtttattgcgagtgttgctgactatattatcgatttcggtgttcacggtggaaacgctggtggaaaaattgttgcacaaggaaatccaatagatgttttttcacaggaaatgtcttcactgtatcgtttgggataaagaggaataatgatgaaagaaaaagaagtaataaaacaatgctcagttgttttaacaagaaattgcaacttgcgatgcaatttttgctatgttcaagatgcaggttattgtcctgacaatatgttgagttatgaaaatctcaaaaagatagtggacttctgctgtgatgcaaaggtaaagttccttttttttacaggtggggagcctttactatatcctcatctgctgaatgctttgcaatatataaaacagaaagaacatagaattattccggcaatcgcaacgaacggaatatgtcttaaggattttcagttttgtgagaagctaattgattgtggtgtggaatatattgatatatctatgaaaggaatgaatcctcaagaatggatcactactactggatatgatggttatttagcacagcagcaagcaataaggaatttatctgaattatctatggattttacctgttcaatggtaatcacctctgagaatgtgttctctctctgtgattcggtgaaaacagctttgaagtgtggagcaaaacagttctcctttacctttgttatcgataataataacaatggagagaagaatattgcttatctggaaaaacataatccgatgatattggttgatagttttatttctcagatggagtgcttgaatagcattacagatgagtggtggatcgagtatagttttccgttatgtgtatattcagagcatcaactcgatctattaaaaggaagattagcctctccttgccaaattcacaagcataacgcggtaacattcgataccaaactgaacctattgccttgtgacatgtattttgtcaataaaatcggtaaacttggtactgactttaatacggctgaagaatttgtcgcgtggagagaaaagcaaccatataaaaaagtgattgaggaaattgatcagttgccgtcagataaatgcaagcaatgcaagtattatgagcgttgctatggaggttgtcctgttctttggaagaattactctttcgaggatttggagaacttaaaaaagaaatatcaataagtcatttacatacccctcccttccacctcggatcggaggggtaattctatgtaaggaggaaacccacaatgaaactcgtacttgccgagaaaccctcggttgcccagtccctggccaaggtcctgggtgcaaacaaacgatgcgacggttatctggaaggtaatggctatatcgtcagctggtgcgttgggcacctggtagagctctctccgccggaggcctacgatgagacctatgccaaatggcggctttcagaccttcctattttgccagccacctggaagtatcaggtctcagcttccaccaggaagcagttcggtatcctgaaaaaactgatgaagcgtgatgatgtcgaaagccttgtctgcgcaacggatgccggacgtgaaggcgaacttattttccgtctggtctatcatcaggcaggctgcaggaagccctttgaaaggctctggatctccagcatggaggatcaggtcatcaaggatggatttgcccatctggaaccgtcaaccaaatatgatgctttgtatgaagcagccctctgccgggagcgtgccgactggatcgtcggaatgaacgccacccggcttttttcatgcctgtatcaccagacgctgaacattggccgcgtaatgacaccgactctggcaatggtcgttatgcgagatgccgagatcgctgccttcaagccgaagcccttctacaccgtgcagcttgggctgaacggtatcaccgcagccagcaggcgtattaatgaaaaagctgatgcacagcagctgcttgccaaatgtaaggagactatgaaagccgtgatcaaatccatggaccgaaaggagaaaacggagcgagccccgcttctctatgatctgaccagcctgcagcgcgatgccaaccgtatcctcggctttacagcacagcagacgctggactacacccaggcgctttatgaaaagaagttggtgacctatccccgtaccgacagcagatatctgacggatgacatgaagccgatgctgcccacccacatttctcaggtggcggagaaaatcggtgttgatgcatccgcattgaaatctgacgacaacacagaaattaccgtagatgtgatgtgtgatagccggaaggtcagcgatcaccatgccatcattccgacaaaaaccatgtgttcagccaatcttaccgagcttccctccggtgagaaggctatccttcagctgattgcggttaggctgctttgtgccgcagctcccgactatcgctatgcagagaataccattgtcctgacctgcggcggcgaagagttttcgaaaaagatcaagacggtcctctttggaggctggaaagacatctggcagcgtttctatccggtgaaggataaggaaaaggaagcctataccggcccgaccctttcgccggataccattgtttctttatcccaggcagaaatcaaagaaggaaaaacaactgcgccaaagcgtttcactgaggatactctcctctctgctatggagaccgccggtgccgaggatattccggaagacgctgaacgaaaaggccttggtacccctgccactcgggcaggcacgattgaaaagctggttcagaaaggcttcatggagcgaaaaggtgataagaaaacacgttatcttgcttccaccgataagggcaattctctgatcacggtcatgccggagcagattcagtctgcttctatgacggcagactgggagcaaaagcttctccggatggagcatggcgattatgaggcccaggacttcatgcgagagatcaccgacatgatttccgggctggttcaaaactacgaggctgtgaaaggagcagaaacgcttatgtcagatcacaaacgagtcggaacttgcccttgctgtcaggcagatgtgctggaaaaacagaagggttggttctgcagtaacaaggaatgtcgctttgttctctggaaggacaatgcctttttcaagagtatcgggaagcatctttcctccggcatggttgagaagctgctttcggatggccggattcgcctgaaggactgcaagagtcagaaatccggaaagaactacaatgccactttgcttctctccacggaagagaacgggcgggccaactttcatctggaatttgagaacagccgcagcggcaccaagggaggtggagaaaaatgatttccgataaaagggaagcgctatatctggtagacaacgagtcctatctgcatttgaaggaaatggaggcgggatttgcctatgaagcctttgataaggctaccggcgctgctcaatacaccggcctgatcacctatgaggatatgctggagaatccgattcgaaatccccttgcctgtgtaagagtgatggccattcaggagatcggattcaagggtgaagtggtttccggagttgctcttcgcaccctggatcagattaaggacgccaggcgagcctatcgaaaggcgcaccgggaggatcctcatgaccacagcatccgctttatcaccagcaactacgatgaattgttccgcatccctgacggcggaaaggtaaagatcgattatccggaccgaagcttcatcgcgccctgtgagtacatcgacgattaccacacccggatcggcggtgaggtttaccacatctgtcagtttgctgagattctggaacgaggcgacggaaaagccagccctgaaccggaaatgctgagggatcaggccgcatggcaggttggccacagggagtatctctccatccacaccactgatgacggctgggactactcaatctatgacaaaagctttgctgaagtagatggcggtcagatcgatctggaaagcatcacgattcaggaatgcagagatatgatcctgcaggaactcggctggcaaaatcgaaactttgccgaaatggattatgccatggttgaggatcgagctgctgatgtcgcggaggaaaaactgaactctgtactggagcagctccatgaaaaacgcatggcgaatggggacagggcgtctgatgcggatggacaccccaagcccattgctgaaaagaagaagtcggaggaatgcttatgagaacagaacagaagacctacccttcgcaattcgagaaggtaaaggcaatcacggatcagctggaggccggaatacaggcgctttttgaaagtgacaaattcaagcagtatctgaaaacgctttccaagttccatgattactccctgaataacacgatcctgattgccatgcagaaaccggatgccacactggtagccggatacaccgcctggcagaagcagtttgggcgtcaagtgcagaaaggcgaaaacggcattcgcattcttgcccctactccctacaaaaagagaatggaggttgagaaaaccgatcctgtcaccggtgaaatccttacaaatccggatgggaccagtgtaaaggaaacgaaggaagtcctgatgcctgcgttcaaggtggtcaatgttttcgatgtcagccagactgacggaaagcctttacccactctcggtgtaaatgagctgaccggcgatgtggcgcagtatgaaatgttcttcgaagcattgaagaaggcctgtccggtaccgataggctttgaacagatcgcaggcggagcaaagggatatttccacaccgtcgagaaccgcatcgccattcaggaaggcatgagtcaggtgcagactgtgaaaacagcaatccacgaaatgacccaccagaagcttcactccattgaccccacaatcaaggcggatcctctggagccgaagcttaccagaaatcataaggaggtggaggccgaatcggtggccttcaccgtatgtcagcattacggaattgataccggagactacagctttgcctatgtggcaggctggtcccatgggaaagaaacaccggagctgaaggtctctctggataagatccgcaagactgcttcagagatgatcacggaaatcgatgagcatctggcgatactgcagaaggaatatgcctgggctcacctgacagcggatgatgtgaagaacatcgaatgtatcggatcagagtatatgccgcattcccgtatggcagagcacaccttttcctgtgaaatcgttggcgagcctatgacgctgaagcttacggtgtcccagcacgatgacggtgaaggctttaccattcattctgagggaaaagatgtctgggacaccatgccggagagtgaacttcggaagttggaaccggttctgacatcgacggctgagcttcactactggacatctcaaattgaaaaagcagagactgcggaagctgtgaaagaagtttctttcggatttatggagacggaaaaccttggtctttcacaagagcagtgccagaaattctgggaggttgtggaacagaaggaagcttcactatcccctccctctactcttgccgatctgcaggcaaagaaagaaaaatctgaaaaggagatgtcttcaaagccgaaaacaaaggcttctcaaaagaaatcgaagaaacagaaaaaggaggaatcgcgatgatgtttactgtagaagaaatgaatctgatccgggcaatggatcacacttgtcgaagaatggcgattttcgacataaaaaccagcatcccgaatatcgaggaccatgaattgaaagaactctgtgagaaggcgctgaagaaaatatcggccatgaccgacgcagacttcgctgctattgactttgctgtgtatgaggaggtcgaggaaaatgagtgattggcatgatgaattcgctgagcccatgcatgatactccggcagataaggatccgctgattgcagcgatggaagcagccggatatacctatgacggccttgaaagtacaaacgataatctccgcttctttggcgaaggcggtcaagttattatcatgggcggctggcatgaatgcgaggaatggctgaatggtgttgtcttcgatgatccccaggtgatgaaccgcgtagagatcattcttcatccggaacggtttccggaaaaagatcccggaagagctgcccttcgcgctgtggaagacgcggtggaacagaatgacaacagctttgacggcatcatcaataaccttccggaaccggatccaacgctccaggcatgcaaatgtgccgatgaggaggcaaagcagtctgtgcttgcaaagctgaaggagcagcagctgcatgaaacgcctcacagaccggagcgtccttttattttctgtggttcggaagaaagagctcgtgagtaaaaataaacatcaggaggtgccccatgcaggcaagagataaatgggtccacttcgtaatgtctcaggaagaactggagcgcatgcagcaaaagatggatgaactgggtatccgcaacaagagctcttatcttcgaaagatggcgctggacggctactgtgtcaatctggaactggatgatgtaaaggaaatggtctcccttcttcgatactgcagcaacaatctgaatcagtatgcaaaacgagccaatgagactggttctatctatgcggaggacattcaggatctgcagaacaggcagaatgaaatctgggaaattgcgaaagagattctggcaagactggcgacgatccagtaaagagacggtgtggcagattgctgtcacaccggatacatacgaagcaccggagcgctgcgttgacatccttgacttcggaaaaatcactttatagactatactcaaaaaaacaaaggaggacgcatttatgtggctggtcaaacttccatttcgaatactcgcgctgccgatcatggcaattgttgccgtactctctatcttctactcccttgccttgaacctttcggcgatggtcgccggactggtgtatctggtattaggcgtctgcattgtgatgcttctttttcagcatgcctggatctatgcggcactcctatttggatttgccgttctggttttcctggcaatcatgtttgctgaggcagtctctctcgggctggaagcattgaccgggaaattgtcgaaatttatcttttcatgacgaatcataacttaacggacctgaggaattgatacgcctcaggtctttttttcacaaatttgagaaaggagcggatgcccatggcagcaacaagactgatacccatgcatgtgaataagggaaaaaccctcgcccagagtctgggcgacagaacggattatgcgaagaatccggagaagacggacaagggtgaactggtcaccgggtatcagtgcgatcccgtgaccgtggatgaagaattcatgctgtcgaaacgccaatatgagcagatcaccggccgccgccagaggcatgaagtgattgcttatcagatccgtcagtccttcaagcccggtgaagtcacaccggaggaagcgaaccgattgggacaggagctggcttatcgttttaccaaaggcaagtatgccttcattgtggcaactcatatcgatcgggctcatgttcataaccacatcgtcttcaattccacttccattgacggaaccagaaagttcaaaaacttctggttatccagcattgccctgcagcgagtcagtgatctggtctgcctggaaaacggcctatccgttattactccgaagccatacagggagcgtgcaaaacgaacagactacccccgcagagtgaaaaacagagatgtactctgtgaggatatcgatactgttctgcagaagaagccggagtcctttgaagcatttctgcaggagctgcgggcactggattatgagataaaatacggaaagcacatctctgtcaaagggaaaaatcaggcccgcttcatccgcctgtcctctctggaggaaggctataccgaggcggatctgcgagctcatttcctcggacagcaggaacacaaaccgagagaaaaacgcaactaccacacagatgtccgccccttcaatcttgtcattgatatccagagcaaattgaaatcgaagggggccggatatcagcgctgggcatcagtttataacctgaagcagatgtcgaagacgctgctgtttctgcgggatcataagattgaaagcatggagcagctggatcagcttgtgcagcagcagactgccaaaagagatgccctgctctcctctattcagcaatcggaaaagcgattggcggagatcggcactctgaaaaagcatatcatcaactattccaaaacgcgggccacttatgaggaataccgcaaagccggttacagcaaaaagtttctggaggcacatcgggaagagattacgattcataaagctgcaaaggcggccttcgatgaattgggcgtaaagaagcttccaagggtaaaggatctcagtattgaatatgctgaggtgctggcagcaaaaaagcagacctatgccgaatacagactggcgaaaagtgatgcccaggagcttctgattgcccagcagaatattgcttctctctacgatgcagagcgcaaggaagaagatcagaaacgccggaaggatgaacaaagtcattaaggctggcaaatcaaaaggtctgggtaacagccatggtactgctgctcagaccttgcttttttagtgtttcgaagaaacgcgcagccatcacgaagtgatgatcgataagggtttgggaatatcccaacaagcaagttgtcccgtttcgggataacgctgttttcgcaggacttggccaaggaaacattgcttgcaaattagtgaggtgcttaaaattttgagcaatagtagttggcaaatggattgattttccgcgaggtttagagtacaattattttgttgaattatatcatcttcgcgtataagaatggagaaatgcatgggctatttatcaattagacaaacatccgaaaaatggaatctttctgccagatggatcaatgatctttgctctgacggaagaattccaggtgcaatgaaaataggatcatattgggcaataccggaagatgctgaacgccctaaagatgctcgtgtaaaaagtggacgatatataaaagataagaggtaatagatatggcagcaattgatgatttgatcagacagattcaagatgttgaactcagagatcgaattcagaaagaagtaaacaagttgtccaagcagaagaaattcggcttggttttcgaagaacatttgccggaatgcacacctctctttgatatgcctatcaagaggggctgtaatgttatgctccgtgacaataaagaagataaatcaatctatgttgttatgaagattgaaggtgataacgctatctgtacaaaacgtgacaaccaagaagaaatatccacctttttaatctctgatattgttcgtgttgcagaatttggagagtctatctatccatacttgaagcctctggattctgtttgcaatgctgccgatagtgatctgtggcatatactaattgaggcagacaattaccatgcgcttcaacttcttgaatacttgtatgcaggaaaagttgattgcatctacatcgatcctccttacaatacaggggcgaaagattggaaatacaacaacgactatgttgatggtgctgatacttaccgacacagcaaatggctgagcatgatggaaagacgccttaagttggcaaaaaaaattctgaatcctcacggatcagtcttaattgtgaccattgatgagaaagagtacttgcatttgggatgccttttggaggaaatattttcggacgcaaatatgcaaatggtcagttcaaatattagtagaaaaggtgctgcaagaacaaatgaattcactcgtgttaatgaattcatttactttgttatgattggcgcttgtaatttggaaccgcttgatgatgctgagtatgctttagagggtgaatctattcattggcagtcatttagaagaagtagtgcgtcgaatattagaacctcaaggccctctcagttttatccaatctatgtagacacacgtactaatagaattgttaaagttggtgatccgatagcccctgatgtagatcgtttttctgtggagcagattccacactgtgaagctgtatttccggttcgagatgatggaacagagatgttatgggggattgttccagaagaatgcagagagcgggcaaaaaaaggatatattaaagctgcaaaatatacgccagctaagccccaattatatgtgatgcagtacttgatgggtggaaccatcgcagatattaatgctggaaaaatcaaagtaactggatatgcaaaagatggtagcgtcatagcagaaaacatcgagactagaaagattatgccaaaatctcagtggaatttcggctctcatgatgcacgtgatttcggttcaaaaattcttaaatcaattttaggggatttacgtttcgatttcccgaaatctctttatgcagtgcatgattgtttgcggtatttcgttaatagcaaaccaaatgcattaatcgttgatttttttgctggatcaggaactacattacatgcagtcaatctacttaaccaagaagatggcgggcatcgacgctgtattttgattacaaacaacgaagtgtctgatgaagaaagcaaaaaattattagaaaaaggaatcaatccaggtgacgctgagtggaacgagcttggtattgcaaggtatgtaacttggccccgtacagtatgcagtattcttggtcgcgatttgaaaggtgaagcaattaaaggaaaatatttgggatcggatgcactaatggaaaatggattcaaagcaaatgctgcctttttccatcttggttttcttgataaaaccgcggttgcattaggcatgcagtttgccgagatgcttcctgtcctttggttaaaagcaggaggtattggtaagtgcccaattattgcgcgtaatacagtaccacctatacttattcttccggagaataagtttgcagtacttacaaacgaaaatgcatttgctctttttgaagaagaacttgctcatcaccctgaaattcagaccgtgtttttggctacagattacgatgtaaactatcgtgccatggttaagaacctgaaagtagagaacacatttcaactgtacagagattatcttgaccatttcagattaaatagggggagaaattaaaaatgatatgtgaattattctctttccaaaaacaagctgtcaatgatctgcgctttcgcatagcaatggcacttaataattatcgtatgctaaagataccccaggtggtatcgctgcaagcgccgaccggatcaggcaagacaattattatgtctacgctgattgaggatattttctttggctcagaacagtttacagaacagcaggatgcaatctttgtatggctctctgattctccgcagctgaatgagcagtcaaagcaaaaaatagaattaaaggcagatcgaattcgtttggatcagtgcgtcgtgatttcagatgagtcctttgatatggaagtcttggaagatggacacatatactttttgaacactcagaaactcggcaaagctggtaatttgagccgtcattccgatacacgtcaatacacgatttgggagactatcgagaacactgctagattaaaatcggaccgcctgtacttcattattgacgaagcgcatcgtggtatgcagggacgccaggccggaactgctacaactattatgcagaggttcattaaaggaagcccggaacataacctttctccggttccggttgttatcggtatgagtgcaaccgcagagcgttttgatgctcttgtcggtaagggaacgaactccactctgcacaaggtaattatttcacctgctcaggttcggcagtccggattgctcaaggaccgtattgtgatcacttacccggaagatccgaccaagcatagtgatatggctgtactccaggcagcaactgatgaatgggtagaaaagtgtaagcactggtatcaatatacctatgagcaacactacacaaatgtaaatcctgtgttcgtaattcaagtttgtgccggttctgggaaaaaggtttctgacactgatttggatgatgttattgcaaaaatagaagaacgcatgggtgagactttcaaagaacatgaggtggtccatacttttggatcgaccggttctttgatgattcatggtctcaatgttcctcatatagaaccttctgaaattgcagatgacagacgtattcgagtggttctgttcaaagaaaatctttccactggttgggactgccctcgtgcagaaacaatgatgtcattccggcgagctgaagatgcaacatatatcgcacagctgcttgggcgaatggttcgtactcccctgcagtgtcatgttatggttgacgattttctgaacgacgttcgtctgtttctgccgtacttcaacagagatactgtgtccaaagtcattgatgaactgcaggcttctgaaggtggcgagattccaactgttgttgatggggagtctcttgaacagcagacttatgatacttggtctgttcacactcatacagcaaagaagaaacaaccgcaacagaccgagggacagatgagtcttttagattatctgaatggctttggggctgatccggcatctgaacccacaccagtcgctctcggaaatgagtttacttctacaacggaagctggtaatcctgaaggaaactcgaaatcgtcagctgttgcaagtggaccagctgcagataatatacccgtatctaacattggcgaggttcaaaccggcaaagagacagacaacacaactgcgaatcagtttgatactagcaacataacaactacactgaataatttagataatacctcagacagcaaaccggaattatcgccgatggttccgcagttgtcattccttccgactatcgatcgtgaagggatcaccaaattcatcaatgagcagggctatctgacctatatggttcgaagtgtaaaaattaatagctatctgaaatcactgatgagtttagcgggtcttctgactcagtttaacatttgcataacggcaactgacgatgtgaaaaatgacgttgctgagatgatccatgaatatgtgaaccagctgcataaggacggcaaatatgatgccctcatgaagcaggtcacggagatgaagctatccatgcagattttcgatgtcttcggcgaagtgctacagatggataatctaacggatttctttgctgcatcggaaactgatttggaccgtcagttgcgagtagctgatgccaaaatgggtggttgtggtttccatcttgcatatggacgcaaatatatcgattttgataatccgaccgaattcaagattgattgtattctatttgcttttgatagcgaatgtatcgctcagcttaattcatatgcagaaaagaaattccatgaactgaacgaccagtatcgcaagtacattgcagttaaacctgaaaaatgccgcaagcagtacagcgatattgttcgtgatggtgacgaaatcagtaagcataactttactctcccggaaactatcagtgcaaaaatcgaatctggtggtacagagttccgtgatcatctttttgcaaatgctgctggtattgcaaagatcaaactgaatggatgggagctggctgttcttgctgaggagcaaaagcgcccggactacgtttgctggctacgaaatccccctcgccagtcttggtctttgtgtataccttatgaaatggatggcaaatgtaaagaactctacccggactttatcatcgttcgccaagactctgagcttggttacattgtggatatccttgagccgcataatccagatttcaaggataaccttggtaaagctaagggacttgctgaatacgctgcaaatgagccaagaattggcagagtccagcttattcgaatcgggaaagacgcagctggtcaaaatcgtttcaaacgtcttgaattggcaaaaggcagtattcgaaacaaggtcatcgctgctatcaataccgatgaactggatcacatttttgacacggatggtgtcttcgaagattaatatgaatataggtaggtaataaacatggaacacacaggtgctacaaaggctccatacaattttatagacttatttgctggagctggtggattatccgaaggctttatccaggcgggtttttcacctatagcacatgtggaaatgaacccgtatgctgcacaaacattggaaactagaactggatactactatctgaaagaacaagggaaccttgatatctattttgactacatcaaaggaaagatttcccgcgacgaatatttaaaaagtattcccgaagaactgttaaaatcggtatgttgtgagacgatgtctgacgaaacacttcccggactgttcgatacaatcgatgacattcttacggaaaaaggcattgaaaaggtagatgttatcattggcggtcctccctgccaagcgtattctttggtgggaagggctcaaagcagtcatatggaaaatccaatggctacggatccgagaaacgatctctacaagctttatgcaaagtttctcaaaaagtatcagcccaaaatgtttgtgtttgaaaatgtcatgggcattctatctgctaacggcggtgctacttggatgaaagttcaggaagcacttcgggctgttggatatgaaattgaatgccatgaacagaattccaaaaattttggcgtgttacagagccgcagaagaatgatcattgttggatggcttaaggatagtggcctttcttatccgcagtttgagaaaaagacttcgaatgctacagtatacgatattcttatggacttaccggctttacatccaggcgaacaagctgccgagtatgcttctgtagaagccagcgaatatctcaaagaaacaggtattcgtaaagagagtgatgttttaacacaccattgtgcaagacctaataaacctcgtgatatcgagatttacaaaagaacgattgaactttggaatgatggtcataaacgcctaaattacaatgaccttccggatgagttaaaaactcataaaaaccggaaatcatttttggatcgattcaaagtcgtcgaaggcgatgaggcatgttgtcataccatgctggctcatatttctaaggatggtcattatttcatccatcctgatatcaaccagcaccgttcaatcacagtaagagaagctgctcgtattcaatcgttccctgatgattattattttgagggccctagaactgctcagtttgtgcagattggtaatgctgttcctacgttgatggcgaaaggaattgcagaaggaatagccagagagctaaacctggaggaaagtgatggaaaatctcctacttgaacaatatagcttgtacaaaaaacaacagttggcagaatctccgtttaagtgtttgctgaacgcagatatcgaaccaaatcctcaccaaattaatgccttctgtgcagcaatccaagctttgaaaactggaggaataattctggcggacgaggttggtttaggaaagactattgaggctggccttgttctgaattacgttattgattcaggggctaaaaaggtgctcatatctctccctgccaccttaagaaaacagtgggaagttgaactattagagaaattcagacgccaggcaatcattcttgatcgatatacggttgagcatgaccgcgtcaatattcagcggcgcctcgagaaccagaacgagttaagtattgttattgcatcatacgattattcctcaaaactgataaaaagattcccgcaggtaaaatgggattttctcattatcgatgaggcccataatcttagaaatgtatttcatggaacaaagagagcaaagaatctctatgatcttacaaaaggaattccaaaaattctactcacagcaacacctttacagaattcgctgacagatctacacggattggtgtcctttattgatccacgaattttcggatctgagaaggtattcaacagacgatttgttgaaggtggagactatgaggaattaaaacaggaactcctgcctgtgctgtaccgcacgcttcgtagagatgttggaaagtatatgtcttttagtaagaggacctgcgttacggtggatttccatctgagccaagacgaaaaagagctttatgatgcgacaaatgctttccttcggcgtgacacgttgtattctattcctacagccaatcgcgggctaattatattggttattcgtaagctccttgcatcttctagctttgcactggtcgagactttcgaagtgcttgagaaacgtcttgagaaactgtatgaaggaacaaaatctgcatacgctcaagaaggatttgacctgttctggggatttgtcgaggatgaaatcgatgaggatggattcaatgaatatgatgacgaagaaaccgcagagaaaaagcaggccattcaggcggagctcaaaatagtaaggagcattcttgatctggctcgaagcataaagacaaacgctaagattaatgcattaaaggatgcattgacatcggcattttctcatcaaatatctgaaggccttgctgagaaagctgttgtgttcactgaatccaagcgtacacagaaatacatcgccgctgaactcaggaaatccgggtacagtgaggaggatattcttctctttaatggcgattttgatgatgccatgacaaaagaaatctatagagcatggcaagtaaagaattttgggaaaacaaattatggcaaaagcgtagagtataaacacgcaattgtcgattatttcaaatcccatgcaaaggtattgattgtaacggacgctggttctgaaggcttaaatcttcaattctgtaataccattatcaactacgatctgccttggaacccgcaaaaaattgagcagagaatcgggcgttgccatcgatatgggcaaacacacgacgtagtagctatcaacctgttaaatactgacaacgaggcggatagacgcgtgtacgacattctctctaaaaagtttgaattattcgagggtgtatttggcgcgtcggatgttgcgcttggtgcattggaatccggcgtaagctttgaaaagcgcattctagatatttaccagaattgtaagaatataacagaagtcagaaaagcattcgctgcattgaatcgtcagttggatttgaagaagaatgcccatgcagcagaattacgctccattcttcttacagagagtaaagaagcaaaaggcgaatcgttagaaaaaacaaaagcagatattgataaatatctgcgggatgttgaatattggaatcagtttgcagaaccagagatggaacggaaaatgtattattggcagattgacaactggggagaaagagtatttggttcacatggatccctatttcttggtgctttcttggacaatacaaagctactcttccctgtactattactctgtgatgagaatggtgaatacatcaatttctcggaagatgatattgtttccgcgttagaagaagctgatgacgaggatgttaggttctttaatccctcagaaactgagaaagcaaaattcgcgaggatttatgaccgtttaattgcagaagtacgtactcaacatgataagacagttgcacctattctttcgtataaccagagaaaaattgaaaactgggtcgctgtgcaactggagcagctacaagtacaactcggtgatgctaagaaagaagttgaagaactcatttttgctgaaatgatggccaccgatactttagaaaaaaaggatattcgaaagaagattgccgaggctaagaaacggatggacaaatttcagagagagctccccaaacgtcagaaagaaattcatgatgaagcccaagtggagattgacaatttcaatcggtcacagtccattaaccccatacttttaatcaacattgtactgaaattttaataggaggcaccagatggcagatagatttaaattcgccgaggtacgccagcaagtaattgaaatgttgaaaacagacttgctagggccgagctgcgaaagtgaaatactaagtcaaaatcctaggtttgagtatatcgttggtatgcttgcacctcaaacaagtgaggatgatggttcaaatgaacaagaaatagatggcgatgcctcttttgagggcgatgcagactatactgcaggtgaagaagatgataatgaacccgtatctgcaaatcgatttaccactccgtcttcaatcggtattagcttttatttagagaacaaaacaaactcgttcaatatagatgtgtcttggggcgattactctaaggcaactgaaaaagccgtcaacaaagaaggcaaagaaatcagtgtaaatacatatacgcgtcatccccagaaggaaacggcttcaatcgacttacaggcattcgcaaagagcaccgagatttccttggtgtgcgattcgaatgtggttctgcatatttctaaaattggcctaaagcaaggatatacactgataacagcctatatcattaatagacgcaaaaatcccgagagcgatgttgccggaatgatgttccaggtaaatttacgcgcatactctcaggatgattcggatatttttgttgcggaacatatttgcagaaagctccttgcagttgatgaattctattttgcgcagcgtcctattttaggaagaggccgtggctgtgctgcaacatggagagctaacaaaaatggtcgtgctgcagaaattacatcttcttttattccagaatatgaatttcctggtgtaagtgccgctctggaaggatttgatccattctacttctctatgcggacattgtcttttacaaaaaagaaagatgaaataattgccagattaaatgtcctagcagactcctatgattcttggattcaggagaagctggtgcacgattcaaaaatggatgatgctaagttcaagaatgaaataggcaattcaattattgaaaaatgcgaagaggcacttggccgaatccgagctggaattcagctgctggttgacgacgatgtcgcctttgatgcgttctgctttatgaaccgtgccatgatcttgcagagaaacattatgaacttctcaaagaaacatggtgcgggcattgaatgcagctttactgattttgtagatcccagaaaaccagaaaataattttggttggagaccgttccagatcgcctttattctcatgaatttgatggcgattgttgatccggaacacgatgaccgtgaagtcgtggatcttctctacttcccaaccggcggtggtaaaactgaagcatacctggggcttatggcatttgttattgccaatagaagactgcgttcaaaagaagatgatgaatacaatcgtgacggcggtgtaacggcaatacttcgctatacgcttcgtcttcttaccactcagcaaagagatcgaatcactaagatgattctggctgcagagatgatccgtatgaaggaatatcctaaatacggaaaagagcccattagtattggcttctgggttgggggtggagtaactccaaacacgtttgaagaactgaaagaggatcctgaagatccggcaaaaacaagagctgcaagaagcaaaaagaactccatttacaagcaactcctaacttgcccgttctgcggaaaaccgcttacagaggaaaacttctatatcgatattccaacaaaatcggtcagtgtctattgctcggataaaatgtgcatgtattacaaatacaaaccaagcaataagatgaaaatcccggtttacttagttgatgaggaaatctatgcgaagtgcccgaccatcattctttccacagtggataagtttgctcgcttgccttgggatgtcaatacaaatgcactgttcggacgtgttgacagagtatgcagcagagatggttatgttgctattggagctgatcactcccgtcataaccggacagaggaacttccaacatctactcttacgccgataaagcctttcttgccccctgaattaatcatccaggatgagctgcaccttattactggtccactgggaacaatatatggtgcttatgaaacggtaatcgaagatttgtgttcttattctcttggaacaaagaaaatcaaaccaaagtatgtggtgtcaactgctacaatcaaaaatgcatctgagcaaaccaaatgcctgtatggacgaaatgtcacagcgcagtttcctccgaacggtttcgaaataggggatagtttttttattcgagaagttcctgtagatcaggatccgtttagaaaatatgtgggtgtttgtgcgcccggtcagtctgtgaagactgctttactgcgtacatattccataatactgcaaagcgcatatacgcttgcccaagaagaagaatgtaaagaattcatcgatccttactacacccttgttggttactacaacagtatccgtgagcttggcggcgcagtacgcctgcttcaagatgacattcctgacagaatacagcgtattaagaagaaatatggaatgggtaagcaacgtttcctcaatcataaggtagaaattacatcacgtatgtcctcttatgatattccgaagaaactgagccagctggaaacaccatatacatcaaaagattgtttggatactgccatagcaacaaacatgattgctgttggtatggatgttgatcgacttggactaatggtcgtaactggtcagcccaaacagaattctgaatatattcaggctaccagccgtattggccgttcttaccctggcttagttgtaacgctttataacccgtatcgtcctcgtgacttgtctcattatgagaactttaccggttaccattcccagctttatcgctttgttgaaggaactacggcaacaccattctcggccagagccagagaccgagtgctacatgcgttggtaatttccgcaattcgtctacgctatcctgattttgctaacaatgatggtgctacaattatctcacagttgactgaagaacagcttagtgaagtcaaggaccttattcttgatcgcttaaatatcataaagccttcggcaaaagcagatgccgagcatgaaattgatgattttgtaagcaactggaagctattagctacgcagcctaaagggctaaaatactatgtctttaagactgataagtataatcgcttaatgaacagctatggcgaagtgtgcactgattttgaaaaggcaactctccgctcaatgagagaggtcgaaagtgcagccaacatgttttactacacggaggaataaaagcctatgtttgataataataagttgggtgaaattcgacctaatcagttgattactacattcggcccaggatcaatcgtcgatgcagtaaaggattctgttactgttctcgacttgaattactggaaagagaagggaaagaaaatcatcgatggaagacttgcggcatacctgaatgttgattgtttttatatgccgaggacatcctatagtggagatattccagtagtatcattcccgtatatgcatgtttgctccagcgttaagtgcggacgaatctttgatgtcagagacggttttgatcttgataagtatttaaaatttggcgtaacctgtccctcttgtcatagacaggcatatccttctcgttttattacaatttgcgagaatggtcatatgaacgattttccttggcattggtgggtacataatggaaattcaacatgcaaaggcactatgcgtatgtactctacaggtaacacttctacactagcagatatgtgggtggaatgttcttgtggtgctcgtcgcagtatgagcggtgcaactcagcgcgagaattttgaagggatgaaatgtaccggtcatcatcctttcagaccaagtcacaaaaatgaaatgtgcgataaggaaatgattccttctcagcgcggtgcatcgaatgtctattttccggtaatgcggagtgcaatttctattcctccgtggattaatccactttacaatctgatcgatgaacaccttcgactaatcgatagttacgaagaggatttcggagagctaggactggacaaagtttatcaaaagtatttcactgccttttcgagggctgaatttgatgctgctttattacggagacggcagaatattaaagaattcacagagatcaagcagatggagtataatgcgatcactcaccattctgatcctgtgtatgcttctaacaaaaagcattttaaggccgaagaagatcctcttccgggttatcttcttccctatttcaaacgtgttattcgtataacacgactgagagaagtccgcgtattacttggtttcacccgtgttgatgcaccagatccggatgcagatcagcagacaaatatcgtttatttgaataaaggaaagagtgagaaatggctgcctgctgcagaagttcacggtgaaggcatctttatcgagttcaataaagatactattgatgcatggttaagcaatccagagcttgcagcgctttcacagaaatatgcccagtgttataaagaattctgtgaatcaaaggagtggactgttaccacattgcgggatgctcgttatgtgttgatgcatacatttgctcatttgttaattaagcaaatgtcaatgttttccggatattcttcatctgcaattcgagaacgcatttactttggtgacgatatgtctggaatcctgttgtataccgggagtgctgataaagaaggatcccttggtgggcttgtcgaactcggtaatattgaccagcttatcatcttaatgaaagatgcgtttcaggaagctttggtttgcacaaacgatccagaatgcttgaataacgttcctgcaggaaacaattcgaatggcgcagcttgtcactcctgctgcatggtttctgaaactgcatgtgaaaacggaaaccgtatgctggatcgtggtcttattgtacctattgatggaagagaaaatcagtcttattttaaggcgttggtggaagaactatgtcaactggaagtataagcctagatattttattaaatcagattcttacagatgctctttctggcggcagtgcatccattagagccattcagaaaaaatatccgtctctttctgaaaaagatgctcgcgaaatctttgctatgatttctgctgcagctgaaggcagcgatgacagtgccgagcttgttgtcactgccccgccatcctttgccttgaagacgaagccaacaaaggtaacggtaacctctatgctcacgagtgcaaagagtagcattctgattaccggctattcgctttctgattattttagcgatctggttgattgtgttattcgcaaaagccaagaaggtgttctggtgaaattctttgtgaatgatattggaagccagaaaacttttgaccgcttatgcagctacagaggaaagtttctgaagatttacaactatccgaagcaggaagataaaatgtctgctctacatgcgaaggttatttctgttgatcaaaaagagacactgattacttccgcgaatctctcttaccatggacaggaaggaaatatagaactaggcgctcagattcattcaagagaattagcgaagcagattgatgatgtgtttacaaagcttttgtttgcaaaaatttttgaagagatatgattaaagcataattaagaagcggcaaatacaagagctactcgtttgttggagtattattatggaaaacggaacaaaactcagaattttatacctatatcagcacttggttcagcatactgatgccgagcacactctatcaaccgccgaactgatgaagatcctcaaagaagattattcggtgaaggtatctcgaaataccatcagcgatgatcttgccatgcttcacgactgtggtctacatattgagcactatgagtctacccagaacaagtactattatgacggccacatttacgagctcccggaactcaagatcctcgttgatgctatctcttcttccaagttcatcacgcagagaaagagcgatgaattgatagcgaagcttcttaccttgaccaattcgcagaatgcggcaaagcttcgccgtcatatttacgttgccggtcgtgcaaaatcggacaatgaaaacggatattacatcgtcgatgccatcaatgatgcgatcgataccaagaggaaaatctccttccgttacacagattttgacgtgtcaaagcaacgttatattgcaaatgatggcaaaccctacacggtaagcccatatacattgatctgggacggcgattactattacatgcgaggcttttgcgacgagcgtcaggaaatgcggaatttccgcctagatcgcatcgcggaacagccgaagatccttaatcagattgctgtgatgcctccggaaggctatactccggcagactacagcaagcatgtattccgtatgtatgataccgatgagccagtttccgtgcagctgtattgccacgtgtcggtgatgaagtatcttatcgataaatttggcagcgactttgaaaccgtagtcgtggatgacgaacatttcaaagcgacggtccgcgtatgtaccagcactactttctatagctgggtgttcggattcaacggaaaaattaaagttgaaggacctgagtcagtaaaaactgtatacaaggatatgctgcaaaaggctttagattatgcataagagaggtgtttcaatgaagtttacagaagaaagacttaaactgtatgcagctcccttgagtgaaactgagaatgaaaaatgtaagcgagcaattaaggcaataagagatgcgctcaaagatcttggatactctgcatcagacgacgctattttaccaattgaagagggcacatattcgtactcgacaacactaaaaagagggtattcaagtgaggaaattcaggtttttattcagggctcatatgctaataatacctgcgttcgtggagagagtgatgttgacatagcaattctaagaaaagatattcacgagagtgcctttgggaatagatttgcgccatatactccatcatttggaaaacaagtggacgctctgattctaaaagatagtgtagagaaagtacttcgctctcatttccctgggtgtgtttcgcgcagaaacaagtcaattaaagttgatggtaatacatatcggaaacaagcggatacagtaccatgtgttcacatgtattattataataagtcagatgatggcgattatttgaatcatatagatggaataacaatctttgctgatgatggaacaataataaacaactttccaaagcagcacatagcgaatggtagattaaagaacacgattacaaatcattactataaaaagatggtacgaattattaaatccatccgttatcttatggaggatttaggatatccagaagcagagaaggtctcatcttttggtctggaatctttgctttggaacataccatccgatgtttttaagaaatattcaacatataaatacgcatttgatgaagttgtccagtatttatatcaaaatcagagcctgttgccatattataaagaggcgaatggtataaaaccactttgcccagatgcaactgctgtaactgactataccagctttatcaatcgtcttcatgtgttttatgaatatgacatatgaggtaccactatgaataatcagatgtctctgtttataaaaagatctgtatggatagttgtgattctatttgtggtgagatgcgctatatcgtttgaaaacatatcaacagggcgctcgctctatgacctgtggagttatacaggggaagcaattgcagcagcgacaatcattatgattttttatgagaagaaactttggaaatatgatccgtttgtaaaaatcccaagactccataaagaatatgaaggcgtgttcatttcaagttatgacagcaaagagcgaaaagcaacaatgacaatcaaacaatctcttctttccgttgaagtaattttaaagacagatgaaagcaaaagtaaatctctttcggcatcgatagataatatacttggggagagccaattgacatactcatatcttaacacgccaaatgcttctgtaagagagcggagtgctattcactatggcaccgcaatgctttgtgttgataatcctgatatgattgaaggaacttatttttctgatagaaagacaaccggagatatgatttttaaagttacccactaaaattaagaatatcggaatgcgctgcccaaaattctgcgcacctgcgttccactaaacaattcaccccttgcttctcggagcaaggggtattataatacagtcaatggaacaattcgttccgttatcgagagaaaggaattaaaatcatgagagctatgagcacagaaacgatgcaaaacatcatttcctatgttgatcaatacttctgcgacaaacataccactccctctgtaaatgagatcgctttgggtgtaggtattcctaaaacgacagcttttcgctacctggtcgaaatggacaaccgtggaatgctcgaatacgatggtaagtctcgtaccattcgtactccgatgatcaagaaatttgctcccgattctgccccctgtcccctcgttggatccattccatgtggttccgcgcagacagaggaagaaaacatccgtgaatatgtcagccttcctgtttcccttttcgggaatggccggtactatattctggaggcttctggtgattccatggttgatgcgggtatcgatagcggagatctggtcgttatcaggacagattgcaatgctgagattggtgatatcgttgttgcccttaccggctacagcgaaagcacgctgaaggtttatgccggaatcgatgaagatacccaggaagccattcttgagtatcggaatcaggccaaatatccggacgaagagatccgcgtgaagcagctgatcgtccagggcgtagccaagcatgtaatcaaagcattataaaaggatattgttatcaccggaggtgaagtacgagattatgaatacatatgatgtgaaatgcccggtatgcggcgtagtcaatcacagcctgtttcttgaagagacggatggctggatggaatgcgagcactgtggccatacggcaaaatactgctgggaaccgcagacaaaaaagcagattccggtatttgtaatccgaaatctgcaggcgcaggtcgtacctgctgattgcgtacacacatgtagataagaagggagttaaataagtgccacatgaaaactttgtatggcgctcaagaaagatatactgtcccaactgccgccagttagtgattggctatgaaggcaaagatggcatcacccgaatgacctgcgacagatgcgggaccgtgatggtcagcaaatcgatgggacgcaggcatgaccgcattgacatatacgccccacggggtcaggagcgcatttaacaattgaattaacttggcataacgacggaatggttgagatgaaacaggctgtgtaaatccatctccaggtcacatgctgtaatgatcggtcagttaaaccagacatacatgagaggctgccgacaagacgggattcctatatccataggatccctgccttgccggtggtctttttcttttttcggcaaggctttcgaaaccaaaacatcacatcgaaagcctgacatgcattaagggctgaggatacatatattgctcgatctctgattttcagaaaagcagtatcggtaccctttctttagtgcacccctttttcgggagcaaggtcaggaacgtactgtgagcaatggtatcctttgttcttccgcagcaggcggaaaggaaaacagtatgtattttgacgcaaccgaattcgcagctcgcctgagcacccttcgcaaggcacagggaatgacccaggaggaaatggccgaagcactcaatatcagtttggagcatctcagcaagatggagcgcagtaagagaaaaccgtctatcgacctgatcattgccatggcctgctacttccatgtaagcaccgactatcttctcatggggaaagatcatgacaaggtggacagccgcacgaagcttctggatgtggtgactcagctgacggaaatcgcaaaaagcctgtaagtctaacagcaatgcacgaaaaagcaagttcagaaacaccgaatttgcacgaaaaagcaagttcaaggcatcactcgcaaaaaatctgcaaatccgtacaaccagggcgggcaacccgtacagccggtacctaaagaaatccatccgcatgggctaaacttgtacatgtaaggagccaaacgactcctctacaggaaccttgaaaattacataccattcttcaggcacagccctgtgatggggagtcacatcagcggatgaacgcaacgatcgccattagaaggcgggagcgtgaaccggcctgtaagtatcggattgcttccgatatacagcattgatccatcacagcacaatgatacttctgtacgcagctcggtgagaaccacggaggggttagattcccatggatctggtagcagccagacgcctgaatgcattcccggcaggtcagagcacctgtcagttcccaggggtgtcgaggacaaatgtggggataacatattattgagattaagcccttagcggctttcttgggtgggaagcgatatcccgcccttttacatagaacctacatgaggaggagaaaaatgcttagaaaagattggaactatagacgcggtgatatctatctggcagacctgggcgcgcatcgcggaaatattcagggcggcgttcgaccggtcatcaatattcagaacaacagcggcaatttcttcggtccgacattgattgtcgtgccgcttaccacggagctgaaaaagctggggcagcctacacactgcgttctcgaaaagcagcgcggtctgaatgaaacctccatgagtgaggcggaacagatcgtcaccatcaacaagggtcaggtaatcaaatacctgggacgaacgagccaaaagcacatggaacgcattgatgacagcatccgcgtaagccttcatctggatccggacgataccttgcccattccggagtgcgtggagtttccctgatttggtatttacggaaaagatgaaaacggaaagcgaggaatgacatatggaagcaattgagacttttgagttaccggcagaaaatgcaatacccatcacagagaagcgctgctataccgttgaggatctgcagatcatcctcggcatcagccgcggcacggtatataagctgttggaacagcaggaatttcgctggtttaagatcggatccgcctatcgaatttcaaagaagagcttcgatgagtggttggacaacaagctgtaagttgtcaaggatgtcgagccgttccgcgacatcctaacaattcgaacggataaccgctacgatgtagccaggtcttaagacctggctatcactttataaggaggacctgatatggacgaaaagaaaaggactacaatgtccgttccggagatgcggcggatgttggggcttggaaaaacggattcttattggctggtacataggcagtgctttgaaacgatcattgtcgcaggcaagatgcgaatcatgattgacagctttgagcactggtatgcaaaccagatcaagtacaagaaggtggatggatcgccacccggtacagagctcagagcatattcttactcagttcaggagctggcggagttgctcggtgtatccgatgacacagtttataccttgatcaagcgggatcacattgagacctttgaagtggatacctggatgcgtatccgaaaggatgtatttgaggcatggtacaagacgcagaccaagtatcgaacccaagcggatcgggaacgagatgcggaactggaagctgcatccatgacgatgccggaaatggccagactgcttttgattacccggaaggaagtctacaatatccttcttaccggcagagacaaagatcagtttgagtttgtctatattgcagaccgacggcgtgtaacaaaggacagctttgagcgctggtatgccggtcagagcaaatatcgcaaactttgcgacagatcaccggaggaaatcatggcgattgagagaaagcagcaggaagccgtgaaacctcgtctcaaggtggacgaaacaaaggcagcatttaccctgcaggaagcagctgtacttcttgaccttacatacaatgaggtgcgcaggctgattcagaccggagaaattgaagccaaaaaatacggactcaggtatctgatcccccgggacgatattaaatggttcctgttccagcagaagctcgaacgggagaactaagaaaggagtgaaagacaatggcatccattgtacagagaaataaccgttacaatgtcgtttacctttacgacgatgaagcaaccggcaagcgaaagcagaaatgggaaagcttcaagaccatggctgatgcaaagcgccggaaagctgagattgaatatcggcaggaaataggaactatggtgatccatcagtgcaagacggtggatgagctgctgaaagagtatgttgctctctatggcaagaccacatggtccatgtccgtctacggaagcaataccgctctgatcgaacattacatctcaccaatcatcggcagtatgaagctcagtgacgtgacagcacgggttttggagaagtattacatgcagcttctgaagaccccttccgtgcaccgaatcactcagaaagcaaattctaaaaatgtgatttatgtggctccgccgaccgtaagaaagatacataacattctgcgcagcgcctttcatcaggctgtaaaatgggaacttatggagaagaaccctgccatgtatgccacggttccaaaatccgaagcaaagaagcgcgagatctgggatgcgcctactctatttcatgccctcgaggtatgtgaggatgagcgcctgaagctggccatcaacctggcatttgcctgttctcttcgaattggcgaattgcttggcctgacctgggattgcgtagacatctctccggaaagtattgccgccggaaaggcctatgtttatgtgaataaggagctgcagcgtgtcgataagagtgttatgaaggcgttgggaaaaaaggatgtgcttcgcgtctttccggaactgcgggaaagcaataaaacagtccttgtcttgaagaaacctaaaacagcaaccagtacccgcaagatcttccttccgaagactgtcgctgagatgctggtagagtggaaacgggagcaggatttcacgaaagaagcccttggcaatgaatacgcagatttcgatctggtcatggccaatggattgggcatgccgacagagcaatcccgaatcacggccctctttgcagaactgattgagaagaataatctgccaaaggtcgtctttcacagtcttcgtcattccagcatcacttataagctgaagctgaacggcggcgatatcaaatctgttcagggtgattccggtcatgcgcaggcgcagatggttacggatcagtattcgcatattctggacgatgacagaaagaataatgcagcactgttcgagcaggccttctatagcgggaagggtgcagacagtattgaggcaccggctgaaaccggatccgaagcaaaagctgccccttcaggtgtggatcctgaccttctggcaaagatactcagtaatccggaaatggcagcgctgctgacaagcctggcgaagagcctgaactaaaataagggcccaatcaccgtcccaccacttacatagagagtattgtaaactcggatttcattcgaaccgggaatgcaatactctcttttttatcgtcttccccggcgagtgcttttcagggagacgtgatatatttcgtttaggcttgcggttcgactgcagatggatttttactcgaaaatgtgctaaaattggcggtagataaaaaatgttcttgttcccctttttagaaaaatccaaaaaactgctaaaatgaaccggtgaacatctaacgacaccggtgaacttggacgaacacggagcgactcggaatacgaaaaaagcctgacggatagcgactttcctgtacataggtgaacacagatgacaaatgttcaatggttctcctaagcggtaggtcgggtgttcgagtcacctcgggaacgctggaaacatagccgaaagccttgattttagcgggttttcggctttctttatttcagcgccaaaactcggatttgctaatatgctaatacatctgaaaatcgaacctgcatgctaatacgagttaaatggtcggatgttcaaataatccggcccatttttctgctaataaaactcccattttgaagcttctcaaacaccagattttttcttttttgctaatacggtatttttacccgttcatttgcctgctaatagatttactctttattagcattttggaaagacctggcaaattctattagcagttcaggattggatttcataagctgctgcaatacctgttctgcagaatttacttcatctttatcatttttctgtggctcactgatgcctttgccgtcaaggaaatcatccatcttgccggccagcttttcacgctcacttgcaaaagaatgtttcccataacgtctggtcagcatctccagattggaccatccgccggcctgcataaccgaattgtaatcacctccggacataagaagtttggtggtggcgctggtgtgccgcaggctgtggaatacaatttcctggggatccatatcagggtcattcatttcagtcagaatttccttaaaccgtttattcaggtgttctgtcataatgggacgaccattggcctggcagatggtaaggttataatccatgtagccatccggtcctaattcctttttcagcttgtcctgcatttccttcaatacaagcagtgcattcagaacactctggggaacatccacattccgtatcgtgtcgtcactcttgggttgtttcaaaacaatcatggtcttggttcccggataaagattcgggaacttgaaaagaatgttcatctttggcatatccatattcttcttggataccctgtcgattgccctgtcaaataaaatgatctgcttttcaaaattaatcttgtcccactgcaggccgccgatttccccaccgcgcacggtacatccaatggcaatcagaaccgcacagtggattaagtaataatcataatattcgggacggttggtaaattccagaacctttaaaatctgctccggctccaaaattaccctttccttttcgtgatgttccggaagggttgcattaaggaatggatttttgctgatatattcccaacgcaccgcaagattgaaagcacaccgcagtaccttatggatatcatggatggtagctgccgtgatgtgttcccgcatgggcctccccatattcgtagccggctctgcttcagtttccagaaaatgatagtagtcatctaccgtttttgtcttgatggaacggagctttttgtcacccaggtaggggtgcacataattttccagcagtccgttgtttccgtcataggtagatgccctccattttttcaggccatatttttcaatgaactcataaagaaattcactgactgtcatatccttgctgtctactgtagtaatggtatttgtcacctgctcatgttcaatctgggtcttcctgcttttggccgtggaataactgagtccggattcccagacctgctgacgcttttttccggttccctgataataaacaacagaatatgattttcctctttttacaatagatgccatactgattctccttttttatttgctgtccagccattcatcgaaggaaggttttgacaccctgacatacttccctaccctgactgtcttaaagagagactgggagcagagattgtaagccatactgcggctgatctgcagaatgtcggcaatctcctggacggaataagtccttttctcgttactggctggcgttttcatgatcttttcatcagctgccatatacactcctttccttgcagctaaaacagaatcagcataatccttgaaaatattctccatatataatatacgaagtgaaccgctgagatttcaactgcaattagcaaaaaatatatttccgcgggcaatgagccaggtgccgtgttcacacgggcatttggcgaatgccgcgagagtcacatatcctgcggttttgcagtgggtatgtgactttatccacatggcgccctgggccacttcctgcgacggagtccccgccgcgtattttcaggccgtgctgtgcagcgattaagcaggggcaggttttttacggcagacctgtcccatgcacctgtataactcccagtaccatgctgtgaaattgtcaatgtacgttctatggcatctttttaaatgacctatataataataaaataggatggaaatcatatatttctgcaagaatcagaatttttttaaatttcttttgtagtatatatagttaagaagcattgactgattccatatcttgtgttacacttcccttgtaattgatttttgtgcgcatccttttatggatatagccggaattgcctgcatgtggcaaacttccgcattgcacacgctgttaagtttgtatgaccgtgccagcagtatcactacgccctgtaagtgatataccgctggtttttattttggaaaattttattatctcttttcagagcaggaatgacacaggttcacaggaaactgcggatgccaggaataagaaagtcattcctgcttttttgctgcctgaaagccggaaggcatatagggatagaacaacattcacaaggaagaaagaaaggaaggtgaagatcgattgcagaaaataagatggctggatcaggactgtaacaaatgcggcaggcagctaaacagctgggatgcccggttatcgaaaaccctggcgtacaaatatccgtgctgcgaatcctgtattgccggggaatatgatatgtcggcagaaagactgcggggccgcatggaagactattttggtatgcgcccatgccagggactgtaaggaggaacagaatgagagaaaaagaacatgaggaatacaatgctttgacaaaacggctgctggaggaaggatatattgcagagcaccatccggactatgtaagggttgacgtacccatgtggcaggaaaagactcttgataattatgatgggggctttacctataaaagatggtggatatttgagcagacctttaagacgccctgcggcctgcagtgcaaagggctccagtgccacagcaacatgagttacatggggattgagtggacttttgaaaatgatatggctaccatccactgcccttatgaaaagaaagaatgtaagctgaaacatgaatatctccaggagcatggcgtactccgttatgactgcgaggtccatatgacggaggaagaatactgttatgaggggagtgtggaacatatcctgaaactgcatgacgatgagatacggagacaggagatcagctttgaactgcagaagaaaggacgtgtctgccgggagcatatgcggttcaaccgggatacgctggaatgggagatgaactatgacccttatgactgcggacggaacagatgtgcagggatgtgcccggtcctggggcatgagttggataagaaaagggggaatgtattttatgatgtaaagatatcctatcttagaaatgacctgaacggtacgctgtttgaagggcaggtggacacccggatcatcaaagggaaaaagatttttgaccatccggtgagcatggacatctgtaagatatgcgccaggctctgccaggacaggataaaggagaaagtgcggaaccattattttacggaactgtttttctccgaataccacggccggtatttttcctttgagatccagaacgtccgtgcagagcgcagggaaagccgggatctgatgcaggacctggaggatatccggaacggaatccagatcgtgcatgattccgatatggaaaaacgggattcagagaataaacgggagagacggcggcagtcacgggagtccgcagtcaggcgcctggaaaagaaactgttggagaacggatatgagagcctggaggaatacagcacagaccggcgccatgcagataaatggctgggaccagagaggatagcggaactggaaaatctgcgtcggctaaaagaaaaggagagaaaagagcagccagtacaattaagcctgtttgatatggaggctttatacgcaatagaaaagattgttggttgggacttgcaatcctatttttctttccagtatttttcattcgatcacttataccatttcggttgtgaaattcgtaagcgcttaatttaagggtgtaactaaaaaaatccggggcgtttagccccggagcaattccgcacatgtagctataataatggtcacctgcatatttcctgaacacggtccgaccatggcgctagtacagcattgccaaaataataatgaatagacgttgcttttttattgtagtcggtgcataataattctatcactaaagaatggatgggttattatgcgaaggaaaacaattgatactatcccggttttatctgatgccatgaaaaacatattatctgctttttcaaaaagccgctcccttccgtcaggactggtcaaaagagccagcattgtcctgcttgcgtcacagggggaactcaaccagaatattgcaccacaggtcgggcttcattataataatgttgccacctggcgcagtcggttcctcgcggcgctcccagccttgcggaggattgaaatggacgacccggaaaagcttgaagatgagatacgggcagtcctgtccgataaaaaacgccccggtgccccgtctgtttttacgccggaccagatcatgcggatcatcggccttgcctgcagcagcccaaatgattttgggtacgaagtaagccagtggagcctcccgctgttagtggcagaaattaaaaagcaggggatcgctgaacagatttctgagaaatctgtcagccgttttttaaaaatgaggtagatttacatccccacaaaatccgttactggcttcattcttcggaaaagacggaagccccggaatcttttgcgcggaaagtaaacgaaatctgcggcctgtaccagagtgcccaggaacaaagccgggaaggtgcacacattgtttccacggatgaaatgaccggggtacaagcgctggaacataaatatcctgacaagctcccattacccggccagtgcgccaaaatggagtttgagtatatccgccatggcacgaccagcctcatcgggttctttgatgttgcaacgggccgtatggaaatgccgtatttaaactccacacgcacagaagaggattttgtggaagccgtgaaagcattggcagggacagacccgcaagccccatggacatttatatgcgatggcctaaacacccataagtcggaagcccttgtccgctttgtggcagaagcctgtgcccttggcgtggaactgggcaaaaaagggaaaacagggatccttaaaagtatggaaagccgggcggatttcctgcatgacccttcccaccggatccgctttgtctatactccgaaacacagttcctggatgaaccagattgagatatggtttggcatcattaaccggaagctgctgaagcggaaaagctgcctatcaatagaagaactggaagcaagcatcctgcgctttattgaacaatacaatcttacagcacacccatttaagtggacatatgccgggataccattagtaatttaatcactgatatttaagcaatactgtactagtatcaatttgtctggccggaccgtgtcctccgaaatcccctccgctgacgtccgtaagaatcggaaaaagaaatgctgctgaagctctaccgcctaaaggcggtggtttataccttaggcttggaaaataaaccaggtattaaacggaaggataagtatttcctactttctcttttatgatattcctagtatgactctattttaataagtttacattattatcctgaaatggtataatacttatagaccatttcaggaggtaaaatgatgccaaagagtgctacgcctatttttctttccaatgatgataagtcatatttaaagtccattctacagaaggggactgttgaagccagagtccacaggagagccaaaatcctcttattaaaatcagatggcatggcagatgaagccattgctgacaaactcgatatttcgagaccgacggtaaagctctgcctgaaaaaatatatggaatcaggcgtaaaagctgccatggaagacagtaaaggccgtggccgcaggattgaaattaccgatgatgcaaaggcatgggtaatcaatattgcctgccaaaagccttccgcattcggcctcccggcagagttatggtatccattgagccttacccgctacatcaattccgttgctgaacaggaaggatatccccgtatggcgacagcatctgagttttctatccggaagatacttaggaaagcaatgcttaatccccataaggtcacctattattgtgaaaaacgggatcctgactttgaaaagaagatgcatgatgtgctggtcatttacaaacaggttgaactccgctttgatgaaaatggaagtttgattccgtttgccggtgatgaagagccggtacatacattatcctatgatgaaaagcccgggatccaagcgattgccaccacaaccggggacaggcccccggctgccagtacggaaaaaatgtccaccgtacagcgtgattatgagtataaacgtctggggacgctctccctattggcagcgattgacctgttgaccggggaagctatcccactggtaagcaatactcataaaagcagcgattttgtaacattccttaaaatattggatgagaaatacccaaaaggggacaaaatacggcttatactggataaccactccgcccatacatccagggagacacaggaatatctgaatacagttcctggaaggtttgaatttgtgttcacacccacacatggctcctggctgaatatggtggaaggctttttcagcaaaatgacccgccagatgttgtccgggattcgtgtaggctcgaaagaggaactaaaggaacggattttgaaatactttgaagaaatcaatgaggttcccgtcccctacaaatggaaataccgcttggacacgattgatctttcggaagaggatgtgggcacaatcgtctatgaagttgtaaatgcgaaagcagcaagtcctgaaaaccaagggaaacgtgcgcccaaagcacggacacgtaagccaagaaatcagattactaccaatgcttaaattgtaagcttatttaaatcgagttatactagttggactacagacaaacttctgtatagatgcaactgtgaagtctgcttttgaaagaggatataaagttattgttccacaaggggcaaattcaacgtttgataacgactatatgactggagaaataacctataagtattacaatgatatgatgtggccaaatagatttgctacatgtgtatctgttgatgaagcaattaaattgatggaaagttaagtcgggatttatcgatgatgtgccattcgtatttcgcttcgctgcatactcatgacgcgctgtcgcgctatgcgtctgttcgcataaatgtgcatttgtgagcaagctcccatgcacattatgcttcatccgcgcaaattctttaggttagaatcgatgatggggtaaacgaaaaagcagttttggcattccagtgaactgccccttcgtttacaccattttcgatttgacctaattgaacaaagtgagcgtccgggtagctgttgcttatggactttcaatcttttttcttacccatgattatacaggatttcccatgcagaagctacagaaatcaagtgtttccagataaataggtacgacaacaaaacctcaaactttgaggcttcagaaaacgtatgaaagaataagattttaacatctttgtggtattcgaagctgtggttttccaagatgaccaccgcaggatttacatacacaaatgtttatcccataaagctgtttcagtatttccggcatctccttattccggagcttcgaaagatacttttggcatccaaggagattccggcataaagtgagcttcctgtgtttgctgcgggtacaaagaagtccgtaatgccgaatcctgacaaaacgtttgggtggtacatgcatcagaaaacgccgtataaattcaacaccggaaagtgtcagttctttccattgtcctttattccggtaatccttgacagaaaaagtaacattttcatcgtccatacggatgatacggtgattgctgatggcaatcctatgggtatattttccaaggtaatcaatcacagactgtgcaccgttaaaagttttcttgcagcaaggaatccattctgtatcataacaggaatccatcagctctttgaaagcataatgattacgatatttttctgcacttccatggaactcaagctgatctgtattccagagatttttcagctcatccatatatttcccgcggaagactttagagatagcccatatgggaagaaaaaaccccgtaccattgtctttccactcgtttttcggtgtcagaccaccgccaagcagtattgtatggatatgtggatgaaagttcatttcagttccccatgtatgcaggatgcagatgtaaccaacagaagcgccaaggtgctttgagtcagcagtcagttcacggattgtagcagaagccgcatgatacagggtgtcatataacagtttctgattattgtaaatgactgggttcagaatatcaggaactgtaaacaccaggtggaaataaggtgcatcaagcacatcctccctgcgtgcatccatccacatttcctttggaacagcctgacacatgggacagcaacgattacggcaggagttgtagtggatatgaactgcaccacagtcttcacatacgctgacgtttgcaccataagctcccgttttgcagttcaggatgttccgggcaacttttgtctgttccggagaagggaaatacttttcgaggtatgccggataaaaacaccggaaaatatcctggacggtgggcttattcataatcagcaccttctttcctgtcaaaggggctttggattcccatgagagatttgttgctgacatgaagataaacttccgtggattttgggtcacggtgcccaagcagtgcctgaatattttgccgttctacgccctgctccatcagatgagttgcaaagctatggcggagacagtgcggggacgcttcctttggaagttcagcatcagctactgcccgccgcattacttgctccagagtactgactgtcaggtaattgccggtaaatttattaggaaacaggatgccacgtggacgtcctttttcaaaccagtattgtgtaaggatatccagacaacgcttagacagaatggtatagcggtccatcctgttcttcgtatcccggacatggatctgcatatttgagcgggaaatgtcatcataatgaagatgaattacttcagaaacccgcatgccggaagaatacatgactgcaagcatagccttatatttgatatcgtcaacagcgtctaacaaacggtcaatttcatcagcagtcagtacagtcggaagcctgtgttcttggatcatacgtggaactgtgatatcatcccaaaggatatgcaggacattccgatagaaaaaacggatagctgaattataaaggttcagagttgtggcttttaatccttcttctttttttgcaagcagaaaagtcctgacatcctgacaggtaagttcttcaggacacttgccctgatatttcagaaagtaagagacatagtttttataacagttgatggaacgttctttgaggttacggatttttccggcttcctcaagctgttctaaatatttttcatacataataaaatcctccatataaaatcagtagtcatcaaaaacactgctttatatggaggtgcatttgggtcataaaaccgcttgccaaccaagcggaagggtggtattcttttcataggcagtgggaaggtcgatcctgtttgattgtttggttgtggtgacttaacaatactacttttaggacttgctttccactgttttgttatagaaaacagaaaatcgctatgccacagccttggcaggccatcgcgcagcgattttgttcaattccagtttgtccataccaaaactaaataattgcaacagaccaaacagcggtaaacttatcacagatttaccgctgtttttttacccaaaagcagacagccaagccataaatgacatatcactatcccgcactgtcggcactgaacttgtacccaatgcctaacacagttttgagataagtcgggtttttactgtccggctcaatctttttccgcaaattgtatatcacattcgtaacgcttgaatgacagctattgctttccatgctccaaacagcttcaaaaatctgcgactgcgtaaataccctgttcggactggaagcaagaaaaacaagcgtaccatactcaagacgggtaaggcgcacttctctcctatcccgcaacaccctgcgctgatgttgcagtatttccaagccttgaaaggacaatacagacaaggaaacaggttgttgttccgcttcaatctgcaattcgcctgccaagagcgaaaccgccctctgaaagactgtttcctcactgtccgaaaacgtcagcactatcattttttccatgttcattacctctcttatccgttgcattgatacaacattttttctgcactgtttacctttatttgacagtaagccacaagtatatatgccggaaaccgcactgtcaatttcatgcggataagggaacgacagccactatcaacagcgggcgtatggagattactctgtatgccctcttttcatgtaaaggagatttatgtatatgtcagaaaacaaaaaacaacagcagaccaaagaacgccgaccgcaccttgtaaagaccataggcaaaacgacctaccttgtgacgtgccactttagcgaaacgagcagggaaaccttgcaggataagctaaaacgcatgattataagggatattcagagcggaaattattaaatttcatgttcacactttttttgtcttgacggcacggacgataaaggaaccctcctgccggagatcggctccttcctggagcggaagaaataccggatcaagtgcttaaacctgatcaatttcaagaagtccatgaaatataaccctctggcgtacatccgctccgagaaggatatcttaaagctggtgaacgcactgatcctgaatacgaaaggtgaaggggaaaagagttccaaagatttctgggtcaaggcggagcgcctgtattactgtgccctgatcggctacatctggtacgaagccccggaggaagaacggaatttcatcaccctcctggaccttatcaatgccagcgaagccagggaggacgacgaggaataccaaagcccggtggatatcctctttcagcagttggaggaaaaagacccggaccatttcgccgtcaagcagtaccgcaaattcaagatggcggcgggtgttatatgctctaaatgacttcttaatcacgaagttttctcgtggttagtgaagaaccatttagagcatttttcatgcaaggaggacaacgctatgctgaaaacaaaaatcaccccgctgtacgagcggctttcccgtgacgatgaattgcaaggcgaaagcaacagcatttccaaccaagagttaatatgtaaagggtggtttctgccatctaatacatatgactgcggctcatttgtggtgaattgaaaagcagttgtaagaaaggagtcaaaaaagccttataaccgctgaaaatcaacacaaaaggagctgatattctatgaaatctctatttgaagaaatgggcggtacatatcgtcaagtgggtgattacttcatcccaaaccttgtcttgccggataccggcaattatcagattggcaaatacgggcgtatgcgccgcagttatctgaaagagcatcatccaatcctgtataacaattacctgttagagggaacgctgttcaagcatcttgctgaaatcgaccaagactgcaacgagcgtatggaaatcgtcgtttctgctatggcaaagcaggagggcgtaaccgaagcactcaaagcggctgaccaaatggaatgggtgcgccgtatcaattccattcgcaaccgtgcggaagaaattatcttaaccgaacttgtatatgcttaaacgaaatcccgttatcggctgtgatatggctgataacgggagtttctgtcgttagtcgtttttttcttctgtgctggcaacaagacggtcaaaatcactttgatacagacgatcttgtattacacggtactgctcaaattcactttccgcaaaggcttttgcgattgcggctgtgactttacccttgttttgcaagacttccgcatcgttgaattgcaggaacgcatccagtttggaagcccaatctgccatcgtcatgggaatatgccgccgtgcctgtcttgtagcgtagtccagatacatcgtgacgatctcgttaagttcctgcatttcacccttagataagtaattctttgcaatcgacacatctgctttgacaattttcccatcgggtgcattacgccatgaggtcaatcccatatgttcttttgtgtggtctgctcttgctacaatgacttccgctgcggtatttccgtgaacggcatagtgcatcttattctgtactgtcgcaaagaaatcttttgtgatttggctatcaagggaataatcaacggcagtagcatagatgtctgtaatcttttgatagaaacggcgctcactggctcgaatctcctgtatctcagaaattaagtggtcaaaataatcctcgtcgaaaatttgaccgttaatcaatctgctcttatctaaaacatacccttgcttcgcaaaggtatccagcacttttgttgcccattgccggaattgtgttgccctaccagagttgacacggtagccaacggcaattatggcagatagcgaataaaacttatattgataggtttttccgttatccgcaacttgtgcaaaatttgcacaagttgaatcttcagataattcgccgctttcatagatatttttcaaatgttttgtgacaacgcttctgtctacatcgaaaagctggccaatcgctttttgtgtcagccatacatcgtgatcctgcacacggacttcaatgccgtcttcgtgggcatccttggtaaatacaagaaaatccacagtgctgtttcggatctgcaattttgtgttcttgttctcagccattatgtatcaccctccaatcattccttatcgggattgtttttctttgctctgctcttataaacattatgcttattcttgcactgagggctgcaaaatacggcgcttggtctgcttgcgacaaaggctttggtacagtgcttgcaaagcttaatcggattttcgctgtcggtcagcatgaaactgaacatcatctgtacgcccagcagcagggaatgaaagtcccagataatggtcggcttatccagtagggcgatgtggtaggtcggtgctatgccgccgaaagccgccatgctctgctgcatcatctgccgggtttcatcgttcagcgtatcataatcctcgtagtagaggaagctgttgatataggtaaacgcccagtcgatgaactgctgcttcatccagtcataccgctccgcatattctcgctgaaagctcatgttgaccgccatcggcttatccgtcatggtcaaagccagtgccatcatcacccggccattctggatattccacatggactcgataccacgcttgatcacatccagcttatcaaagggaaagaacagcgccagatagttttcggtggacatggtttcttctttgataaagtggtttttcggcaggtacaccgcctcatattccataaagtttggcgtggtaggcaacgcagtcatcagtccaaacaagccgtattttaccgcaaattgctggatgcccttctggatttcggcatccggcttcttgctcatacccatccgcccgatattgatcgcgtccagtacaatccgctgatactctgcgagcggatcatagatactcggctgcgcagtttctgtcggcgtgaggtacagagttccgtcctctgccgccctccattcgtattcgctgtatcgcacccaattagagctggtgcgttcaaaaaggttcttcatatacaaaaccctccgctatatattgtaacccgaataactccgatttatattatccattatacgatttcttttccccggaatcaatctccattccagattcttctaaaaaatctttctccaatatggtcattggctgctgcttttctgccttatccaaaagtgcggggagcagcttttttcgtatctttcccagcatcgtgccacgcatcttgcggatgttccggtcgctttgcttccgtattttggcgatccgggtggagctgaacagccggacggcgcagagaaacagcagctccttgtgttcctcattcaattcccagaggattctggaaaggtattcttccgtcacaagctcgtgtatatcgtaagggcagtagaaaatggcgtcgataaaatcccctttgcggagctgcttttccagtacatcgttcagcgtatccgggaaaaagagttcattgacagacgcaccgtaatcgagaggaacatcatcgccgcttctgctgagttcgtgatagcgttcccggcgctcccggttagcgtccagcctgtcccaccaggcaatcacattttcaaaatcccgctgtgttctggcggaatcctccaatcgtgcaagggcttctgcccgcagttctcgtttgagcttcttgcgctccggttcttccttgtcggtatcgtcctcaaagggatgttccttggcttcggcttccagttcttcgatgagctgttcttcttttgcgatctgccgccgggcttgttcgaataattcggtttcttcggtatccgtatcattgtcagcaagaacagcttgtttctttcgcttccttcgtttcttttcgggaagatcgtcagcggattcttcttcctcatcgtcccaaagggcgttttcatcttcttcgtcatcggctatgtaatcggaatcgtccgcttcatattcatcttcatagtcgatatcttcttcataaagaccgtcattatcatatcgttcgggatcgtcgaacaccgcagacatctcccttcaaaaatattttcgaaaatttcttggattctccgtaaaaacagttccgctaagtaccccgtatttctcctattagtgaggatgtaatctattttgtctattataagattactctcgacactaaatgaaaggaggaaaacgcctatgtcaaacaacgatcgtgagctgacgggtagggagaaacagtggatcaaaaagctggtcacttccctctgcgccaactacgacaaagagtacggctgcctgccgctggactgtgactgtccaatgtttggtatctgctttaccaacagcgcactatgtagatatttccgcaaatctgtcctgccggaagatgcagagttggaagccgtattcacgcaaacaccgaccactcattgcaaacaatgcggcaagccgttcccaactgacgggaaacgggtgtactgctcacagcactgtgccgaagaagcttgccgcaggcagaccgcagcacgggtgcgtaagtatcgggagaaacaacaacagatgtaacgcttttgccctcggaaagccttgtgccgcaaggcttttttgagggtatttctgcattggcagggtgttaataccttttgctcgattttaaccatgcaaatggttacactttgccggaaccaaacctattatacgaaaaaaccatgaacttttcaacacggaggtaactgcctatggcaaaaaacgagaacagtaatttttcttatatgattcgccgcattggcggcaccacctataaagttaaagtagtattcagcgatacagagaaggaaacgatggaggataaaattttacggatgattcgcaatgaaacggttacaactggcggaacttgtggtataatggattcaccacaaatgagccggcagtctgaaaggagcgcatcatgagcgtaaaacagactgaaggaaaaatcacagctttatatgaaagactatcccgtgatgatgaccagaccggagatagcaacagcattgttaatcagaaaaaatacctcgaaagctatgcccatcagagaggttatacaaactgtcagcactatacggatgacggttggagtggagggaattttgagcgcactgcgtggaaacagctcattgcagacattgaagcgggcaaagtcgcccatgtcattgtaaaagatatgagcagggcggggcgtgactatctgcaaacaggcttttacacggaggtgttcttccgtcagcatcatgttcactttgtagcgatcgccaacagcgtggacagcgacgaccagaacagcaatgagtttgccccgttccttaatattatgaacgagtggtatcttcgtgatctgagccgcaagcagaaaacagcgatccgtgtgaaatgcgaatcgggcaagcctactacaaactgcgccatttatggctacaagaaaatgccgggtgataagtacagttggtatatcgacgaggaagcagctgcggttgtccgccgtattttccggctgaccatcgagggcaacggtccctatgacatcgcccgtatcctctatgatgataaggtggaaacccctgcggtctatgccgcaatgcaggggcgtggcgtctggaaaagcaaagaggaatttcccaacccatataactggagcggctatatcgtcgggcagattctctccaagccggagtatatggggcatacggtaaacttccgttcccacaagcagtcctacaaggacaaaaacccggttatgaatccgcaggaggactggctgatctttgaagatacccacgaagccatcgtggataaggaaacctgggagcttgcgcagaagctccgcaagacgccacggcggcacgacactctgggcgaagccaatcccttgacggggcttctgttctgtgcggactgcggagcgaagatgaccaatcaccgttccagaggcggtacggagaacaatccttatccctctgatttttacgattgctccacctacacgctggcgcatcaaaagcgcacccacgcttgcagcggtcactatatccggacaaaagcggtcagagagcttgttctggaaaccatccggacagccagcacctttgccatcgccaatcaggatgagtttatgaaaaaggtgcgttctgcctctcagatccggcaggcagaagcggcaaaggaaaccgagcggaaactgaacagggagaaaaagaggattgcagagctggataccattatcaaaaagctctatgagtccttcgctatcggacgcataaccgacgaacgctttgataccctgcttgccgaatatgaggcggaacagaaatcccttaccgcctccgtatcagacgcagaatcgcatctgtcctcttttgaggaagataccggacgtgcagcgcagttccttgcgctggcgaagaagtacaccgacttttctgaactgaccaccccgatgatcaatgaatttattgacaaaatcattgtccacgccccggaaaagattgacggggttcgggtgcaggaggttgagatttgacagaaatttatcggacggtttaaactgcccgaaccggagctaacaccggaggagatcaagcggcaggaacagcttcgcagacaccgcatcaagagccgggagcgctaccagcagatgaaagccggggaacacactgttggacagccgttcaaactgatctgtaaatgctgcggtaaggagtttgaatccaagcggtccaatactttgttctgcggccccaactgccgggcaaaattctaccggcaggaagcggcggaaaaccgaaagcgggaatgcgtctgtgagaactgcggcatgacctttaccacaacgagatcggatgtcaagttctgctgtgacgagtgccggtatgcggcgcagatcaaacggtagggcgcacgaaagaaagccttgcgggagacaaagcacgaaccggcattgccggataaagaacagaaagcagcataacgataatggaagcggattgatgtaggtcgatccgcttctttttttcaagtccccaacttgggaacttaccaataacgatcgccgcaaagcggcagaaaggaaactctatgaattttatgaacaactgcaacagcaccaatcccattatcatcggtatcgaccatggctacggcaacatcaagaccgcccactgctgcttcaagacgggcgttgccgcctacgacaaagagccaaccttcaaaagcaatctgcttgtctataaggacagatactatctcatcggtgaggaacacaaggaatttatctccgacaaaatgacagacagcgactattatattctcacccttgccgctgttgcccgtgagctgaatatccgcaagcagacctctgcccgtgtccaccttgcggcgggacttcctctgacctgggtgagcgaacagaaggacagcttcaaagaatatctcctgcaaaacgacagtgccggctttacttttcgaggcattgactatcacgttgaatttgcgggtgcggatatttttccgcagggcttttctgcggttgcagacaagctccgtgagttcaagggcatcaatatgctctgcgatattggcaacggcacgatgaatgtcatgtatatcaatgagtgccgccctcttgcgaaaaagtgctttaccgaaaagtacggcaccaaccaatgtacgcttgccgtgcgtgaaaatctgatgaagcagtttggcgtatcggtggatgaaagcgtccttgagcgtgtcatccgtcacggtacggcagacatcagccagcgttatctgaccgccatccgtgataccgcagccgagtatgcagagggcatcttccgcagactgcgtgagcatgaatacgatcctgaactgatgcgcctgtatgtggtaggcggcggaagctgtattctcaaaaacttcggcagatatgacaaagaccgtgttatcatcaacgatgatatttgcgctaccgcaaagggctatgaactgcttgccgagcagaagcagagcagaaaaggcggtatcgtatgaagcagatctacacgaccactctgcgcctaaaccttgcagacgaggatgaccgccgagcctacgagcatttgcagagaatggacaaaaagcagtatcgatcttacagcaaggcgattgtttccgccatcattgaccattttgaacggcaggcacggcttgaaagtgacccgtatctggaaacccgtgaaaaagaggatgcttttctcaaacggataacagaagccattgaacagggcttgcggtttgcgcccgtcggtatgctcccgttcacaacgcctgccgccgttgaagctccgtctgccgaggatgacgagaacatttcggcggcattggacttcgctgacagcttctgatactacgattgccctcgtttggtattactgcaataccaaacgggggcatttttgatgctacaacgatttttagaaaaagcgtgataccaaatagacagataattagtgtcacgctgctatcaaacaaccaactttttactaccacaggaggattttctatgaccacagacgagaaaaaattattgcaaaccaagcacagattggaagaagccgagatgcgtgaccgtcaaaaggagcgaaaagcgaggacacggcggctgatacaggaaggtgcaattttagaaaaggtctatccggctgcggctgggatggacttgacaaagctggaggattttctatattgggcattacgatgaagcattttgaagcgttccgggcaaccggggcgcttctctttttcccgaaagggcccgaaagggcgcattatccgagattttcaattatccgaggaaattcataaaaagtcccattcgtaaaggctttcaagaagatttcctcggataatgtaagcgctatttcaggaagtcgggcaacggattctcctttttctgattagcatgagtttccttttgatgggaaaaccatttctcgttccaatcccggatatgcctgttcactgctccctgtgaaagttcagcgtaccgttccgttgtggaaatcgaggaatgtccgaggaaatttttgattgccacaatcggaacaccggcctctaacatatgtgtggcggttgtgtgcctcatggtatgcggggtatagcttttctccaaaaacattcccggatgctctgcccttgcgatggcgatatattttttgtaaatctcctcaatgcaggaaatagtcatctgtggatgtgtctggctggaaaagatataggcttccaactgtccggcatggcctgtttcctccagataccgtttcaggagaattccactgggtttggcaagcacaatccggcgtgccttgttcccttttcctgtgaccgtcagcttataaaggtttttctccacaaaaaagtccctgactttcaggtcgcagatttcctgcgccctcgcaccgctggcatacatcaggtttaaaagaacctggtcacgcagtcccagacgtttttcgggatcagggagccggagcagggctgacacctcatcaagggaaaaggcaatccttggctgtacggattgcttttttacaggaattctcctgactgcgttggcaaacaccgtcgcagcttcaaaatttctgttctgtgcataagcggcaaaagaggaaagtgccgacagccggaggttccttgtagacacggagcagccccgttctgtctcaatccatttcaggaacccatcaactgtctcaaaatccagatcccggaaccggatctcaccagcctctttctttttcgtctggtaaacatactggaacagaagccggaaagaatgtttgtatgacctgacggtgttctgggaaagccctgatgagagcggcatgtattccgtaaaaaactgctccaggagaagcatgaattcagggagtttatttttcctcacaggccacctccgtgaatacgccgacggcatactcctcaaacagccccgaatattcagggaacatgtccccgctgaatttcaggtatttctccgtctcgtccatgtcatggtgcccaagatagacagataaaaatggcacggaatcgtctgccggacgcccattcttctcagcccgcgcaaaggaatgaatggcgaaataatggcggaagcagtggaggcactggcctctggaatggggtttcccaggtacatacaggccggtttcccgcaaaaggttcctgaaccgtaaatcaaaagtccctttgctgacggcagccccctcgtttctggatgccgggaacaggtagctttccgggtctgtcctgatgcccattgcaatgcagtacctttccagaatctgcgtcagggtctggtccatcgggacggcacgctgcttgtcattttttgcatggcggatcaggatggtcccggcatggaaattcacatcctttactttggcggcaagcggctcgcccaaccggaacccgcacccaaggagcatccgcagcagcatacagaactccatgtccgtctggcgggttttcgggtctggatgcctgtcagcccatttgtcagcaccttccagaagcgtctgtatctcatcgtctgaaaagatgtacgggacatagctgtctgatgttttggggcagtcaggcatgaaaacacagtatccctcataccggagataccgcaggaatttgcggagataactcaccttgtcgctgaccgtttttggggcgtttgcctgatggagcgccctgatccattggttgataaacgtttccgatatctctttggcattttctcctgccagcagtgaatcgaatgaaagcaatactctgtgcgtattccgcaaggtatccttgctgattgtcccttggctgatttcaatatattctgcaagctcatttttgaaaatggattgaaattctttcatgacaggccccacctcccctccaggaatgcggcaaagatgcccgtcgcctccatgaccgggagtgcatacccacggagctgttccagatcaagtctggcataggagcggatggcgttctggtctgtatgcccaagggtttttcttactgcttcataagggatgttgtcattgaccatggagcttgcaagggatgaacgaaaagcatgtgctccctgtccagtcctgccttatacagttcatcatatgccttatcctgttctttcagagtggcgcggtaatgcctgtttttttcggcggctctgtccaatactttgtatgtcctaagtcttcaatgtcatttagttaactttttgtaaaagaaagaatgtttctttaaaatagagatctgacgttccaaacggatagattgaagagaaggatatagggattatttatcagaagtagttttgtaaatattttaccgcaaggcaaacaagcagatttacatctgcttcaaaaaagggtattatagatattgatgaaactgttacttatgctgctcgatatataaaatatcgaggttttcggaagtgtgccgtttggagtcgtggatactgtcgatcattccgtatcggaatcagctcttttgtcagcagggacatcacatctatggagtctttctctgtgttcggacggagaaagactctacaaatatgagcagccatactgaaatttactttgtattcatatttcgtgtttcccttttctataattgcatgattgattagtgtttctgttatgttgtaagcgattaactttgcccaaatttcctgtttgatatattctggtttgtaggcatggaagttactcaatccgaccgtatatttcagcttacggaaagacccctcaatggcccatctggcatagtatagaagttttatttgttccgacgggaattcatctgaaggcagattagtgacgatgcattcataagaatcatccgatatcggaaaccgtacgattctaaaagataaatcgtaggtatccaaggaaccatatgcaacgtaatcaaacgatgcagccgcatccacaaagcgtttgtaataaccttctttaatcgatatcttctttttatgactgcgaaccagagttacatttacctgaatatcaaaggagtctgcatctggaaactcaaaatttccaacaagtcctttggaatggatatctttggtgcgaaataaaaaatactggcctttttccttcacatgtgccatgttgttgtaagaacaatagcccctgtcaccgataaaaacatcttttgtaccagtcagtaaatcgtggcggtcgaccatttcacagaaagcactaaattcatctttctgatggatcggctggatcagcgcatcggaataagtgtgcttctgtaagtcgtaaaaagcattcagatgcatactgtaaaagccctttattgaatgtccttcagagacatgatactcttctggggcgaaagcaggtttactgaaaaaggtaaaggtggagccatctgcagcaagaaagcggtagcgtagctttttttggtcataaaaagaagcaaaatggttaaaatgccgaaatacagcttccagggcatccgggctaagctttgcgcgttgctggttgagtgccgaagcagttggcgactgtggatccatgtcgaagaagtccagcaattcattttttgtgctggaggagccttgggaaacaaggaaagtgataagcttatcggcggggaacttcctgttccttgtcagatcggtgtccgaataggtaaattcggagattacggatgaaacaagatggacggaatgggaaaagcattgtttaattttttgatggaacattgtgtgtacctccttgaattagaatgaatttatgattctaatccaagggccgctctcgctacctattaaagtcaatcagtagcgagagcggccgcacattttgtggtgtatgtcaactgtttttatgaaaaaagggaaaaatatggttagacacccttcattaagaatctaaccataatattgcaaagcgttaactaaatgacattggatcctgatgtgtcccttctcctggttttccagggccttcccataaccggcttcggtcaggaacaggcgcattttctcccccttccagcccataggcgaatcatgggagaggacatcaaagacgatcatgtggcgggtctccgggtcgaaccgctccagggccatgatgtcatgtccggacaacttctgcgccccggactgctgcctggcctccgccagcatttccccgacggtccgggcctttcccggcagacggtaatttctctgtacctcccggatcacgtccatgcactcctggtcggacagggggcgcagcttccgcaggaggctttccgccgtgtccttcgtctcctggttccgcgcatagcgcgccattaggtaaatctcattcagggcggcgttctggctggtgctttcaacctggaaggccatcctcatttctgcttcattcagtttcatttttcgctcctttcttcctatctgtctgattgtgtcgaaaaagcaattttatcaagtatatatgataaaaacagaaaattcagcttgaaaatcagatatatccgtgttaccatataggcagtctcagaaaggaggctggtctatatgattaaacgagaaacttatatgaaccgcatccgtcctttcatcggaaacgagctgattaaggtgttgaccggcatccgacgcagtggcaagtcggttatgctggacttgatccaggatgagcttgccgaaagcggcgtggatcgcgggcagtttatttccctcaactttgaaaacatgagcaacgcccatctttgtactgcggcagccctgcatggtgaaatccttcgcagggcaaacaagatcggtgggaaggtgtatctgtttttcgacgagatacaggaggttacatcgtgggaaaaatgtatcaactccttccgagtggaactggactgcgatatttatatcaccggctctaacgccagactgctttccggcgagcttgccacatacctggccggccggtatgtggaatttgtgatctatcccttttccttcggtgagtttattgagctgtaccggaccgtttacccggatacggacattcggcagtgctttacaaaatacctgacgctgggcggtatgccgtatttgagcaatctccgttacgatgaagccgcaagccgtcagtatttgcgtgatctgttcaactccgtggagctgaaagatatcgtcaagcggaataatatccgggacgtggatatgctggagaggattatttcctacgtcaccgccaatataggaacgaccttctcctccacagcgatctccaagtatctgaaaagtgaaggacgctccgtgtcagcggaaacggtgctgaactatatcaaggcctgcaccgatgcgttcctgttctatcaggtaaagcgccaggaccttcaaggaaagaaaatcctgactgtcaacgaaaaatactatgtggccgatcatggcgtccgtgaggcggtgttcggcggaaacatgaaagatatcaaccttgtcctggaaaatatcgtttacatggagctgctgcgccgtggctatacggtcacagtcgggaaagtcacagacaaagagattgactttgcatgcgaggatcagggaaacaagctgtatgttcaggttgcctatctgctggcttcggaggatactgtcaagcgggagtttggcgctttttccggtgtccgtgataacttccccaagtacgttgtcacgctggatgaatttgatatgagccgtgacggaatcaagcaccgtaacatccgcgatttcctgctggcggaggaatggaactgaatcagggcataatcatgaccacccgtcaaacgggtggtttgctcgcccctataaggggcagttaccggccagcgcctaaagacgctggctttcacttcgttcaagccactatgcccttgactcgtcgccgccctttaaagggcgtttgtattaccggctaccccttaaaggggtcctcatgttcctttacactcaatttatccattgctatatcatatttctcctgctcctgaatgtattttcttattgttgcctcatttaggcctactgtacttacataataaccttctgcccaaaagtgacggttaccgtatttatactttagatttgcgtgctgatcgaatatcatcagcgcactctttccctttaagtaccccatgaagctggttatactatatttcggcggtatacttaccagcatatggatatgatctggcattaagtgaccctctatgatttccactcccttgtatccgcataacgtctttaaaatatctcggatactttctctgtattgattataaatcgcttttcgtctatacttaggagtgaacacaatgtggtatttgcacatccactttgtatgtgccatatcatgattcttgtgtgccattaaaatcacctttcctttcttagatagtagcttgaacaactctattctaacggaaaggtgatttttgtgctataagcacttgttacaccacccgcgaagcaggtggttttctgtttcaggcatttccatttttcggaacacgaaaaactccaatgccttcaactggctaaagccacaatcggataggggagattttaacctccccttccacaccacgtagcgtaccgttcggtactacgcggttcaatagtttactcggactttcagatagtgggcagtcatatcgggataaccaagtctgtccactatgattcttttggtgagtgccgagttgagcattcccgccgctctccacactccctttcggcagttcgccatctcatgcaccttccactctggtaaatgtaacgcccgcaacattttatatcttgtgcgtaccttcttccattgtttccagtacaccgctcggattctgtggcgcagccactcatccgtctgttccatcaggcttttcatgtctgcatatcgataatagttaatccatccccttgcatagcttcggcgtttttcttccctctcctgattgctccatttgttccctctggttgtcagctcccgtatccggttcttcatttttgccaccgacttcgggtgtatcctcatgcggcatttccctttatgccggtaaaagccgtagcccaggtattttatcttgctgacgtggctcactgtcgttttctgaagattgactttcagaaacacttttcctgtgatgaatggcacaatgttttccatcgtcctctctgcgcttttcctgcttttgcacagaatcaggcagtcatccgcatacctcacatacttgtgtcccctgcgctccagttccttgtccaactcattcagcatgacatttccacataagggacttagcgggcctccctgcggcacgccctcggtcgttgcgtgaaatcctccgtcctccattactccggctttcaggtacttgtgtatcagcgagattaccctcccgtccttcaccgtcctcgacagcacctctatcagcttgctgtggttcaccgtgtcaaagtaggattgtaaatccatgctgaccacgtagacatatccttcgttgatatatttcctacatctttccagtgcgtcatgcgcccctctgccgggacggaatccgatgctgttgtcagagaactgttcttcatataagggcgtcagttcctgtgcgattgcctgttggattaccctgtctaccactgtgggtatccccagtttccttgtttttcctttctcctctttgggtatttctacccttcggactgggtttggcttgtatttgccttccctcacctgctcgaccaattcggactggtgttctctcaggtagggtagaagttcatccacctgcattccgtcaatcccaccaacgcctttgttcgttttgaccttcttataggcggcatttagattgtcgcttctaagaatcgtatctagcaggttgtccgtccgaaagtccgtgttggtgtcggggttcccggtaatcctttcatgggcgtactctcctgtttcccttccctgttccgcaggtatctctcgcaggtagtcctcaatatgaagttgtctgtacttaattccatgtccggtttccatttggtaacgacacctcctactgttcagtccttcccggtgcgtttgcgaccgcccggtactatgacctctgctgacttctcacggcaggctttactccgtgacagcgaatgttttatcgccactttcacgtccgtgagacctccccgggtactcacacgttctttcccacttatacctgccccgtttactgctggcgttccgtgcagttattggactttagtttgttaggcaacctcatccacgcttcacagcctatccggacaacttttacaggccagtggtttgcctccggcttccttcagaccccacctcacgatgacgcccttgccattggctgcacccttcctactgccgggcgggtcagggactttcacccgttagaacgtgcgcccgccgggcgcacataaaacgccataggtttttgagcctatggcgttctggtcgatatttataattccaaactttccagccattcatcaaaggatttctttgaaacccgaatagcgttgcctatgcggacggtcttaaattgttccttcttgacgagctggtatgcggtcgtgcgtccgatgttgagcatggctgcaatctgttccacggtataggcgcgtggttccggcaacggctttttttctttgctgtccatagtaacctccatgttctatgccttgttaaattgaacaaaagggcgtagaatgacagtaataatcggccttcaacggagggcttcctgctaagaatttgctaataggaccatccgacggagccataaaagcgcgtcaggatgagcattttgcaccataatgttcgtttactacaagtcattctacgtaaggtaaggtattggaagttacacccgaaccgtgtatcatgtgatacgccatactcctaagcggaaggccagcggttcgaatccgctcaggaacactggatacagccggaaacctttagggggatccggctttttatttgctaaattccaggtgaaatacaggaagtcctctgtagtttctacttatctcataattgcatctacaatatattgtgtctcgcaatgctattcacatattagcaggctgatctgttccaccgtggataacacttcggagaaagaaaagtcggaagcgtatgtattttccctgatatagttatccctcagggagaccagagctggttcttccttcatatccgataaaatgtccacccattctttaagttcgacagtagagccacgtttttcagcagtatgctggatggcttggcgtaagatctccgggcgtacttcgtcacggcgcagacagaacagggtatgtaaatcgtaaaaatcccttgcccgcgttgtgccaatattgcggcgcaggatggtttcatacttctcagcaagaattgtctccagcgtataggccataatgggaacactctttcgttcaaacagaaacgggtaatcatagcagatagcagcaggagtgatttcatctccggtagtaatgtcaattttcatgggactatttattttaccgtacagggctcccaaatgaatgcgaaaattattgtaggcgtcatctccccgtatgggctcgatacgctgaaaacggaactggataccatcatttacatcgagcgacaggatattctgaactatgctggtaatctgttctttctccattggcagtccactgacggtcgtatccatatccgtcgtggtgcgctcactgatgccaagcatggacgagatcaacagaccgcccttgagaataaagttgctgcggtaacgggagacaggcaaccgttccaaaatgcgttcaaacaggaacatctgtaagacctcctgagagcgcagatttttggaggaggcaatgttgcggatagcaccttttagctgttccggtattctcatgttagtacctccatgtatgttcttatttgttcttcgattccaaactgctttccgtatttgagtaatttccggctattagcgccgctacgaaaataatctttgattgcctgggtataaagctgcatatcaatttcctttttatcacgaattaaatcacagatacagcgttccttgtcataaagccgcactgtgccgccctgtggcgatttagtttccgtccagccgatttcaaacagcggtggctgtgcatagtgaaagcgaatttgtggattatcccgtttgattttgcttacatttgtaccgtgcggcacggttaaatcaatcgtgtgcggcaccctgtcagacaggccccacagaaaaagcgctgttccataagaatacaggacttttccgctccgggcctgcagcagcgcatattcatccaccatccctttttccaatacatacagtcctttacagacccgtataagctgcttttcatcaacatagcgcttcagggcagtacggctgatcccggcagcttcaacctgagcagttgttatgataccgctgttttcatctgcaatagctccaatctgtttccaaacaccatccatatacatcacctccaactcgatttacaatcgcacttcgattatatcattattgaagtacgattgtaaaaaagatactaagatttagtttatgcagattgacaggatttatacatgaagctgtgatatttattccggcaggtggttcatacggcggtaatagtcatccataacataaaagtgcatttcataagtatttggctttctgtaaagtcgcgttaacccatataggtagcctgtgccatccactccaagcggtcccagccagtgatcccggaaaggtccgttgtgataccatagccggatatccagatattcgttttctgttaccagccctttttccacaagacggtaaacttcttcatcttccagaatcatatgagccagaaaatggcggtataaatcatccggtaggtttaaggccatctgatatgtcagtggattggggtggcgggtcgagtgccttaaactgtttccagaaggcccgcacctcctccaaatccggtggagcaggtatctcgatttgtctgacgccgttttccacatctttataggccgatgcgtctgcaactccagtctggccgaggtaggaagtcagggcctgcgctgcctgtggaccggacatggtgccggtatagttgatattacctttggcaaccgccccggtgacgtcattggcaaatgaacctcctttttgtactgaggattcaaacatctttcggctgatgggatttcctccttgtccggttgcgctttgaacagctccgttcgtgaactatcggcttactgcgccaaccagccccccagacataccagacataaaggaagcgctgctcatatgcttggaactggaaccgcctcgaaaggaaccgccacggaacatgccgccaccggctacattcttcgcggttgtcactccctttgctgcaatcataagttcagccatcatactgccaccggtatggccaacattgattcctaagctgctcatgaagctgtcaatcttctggctgattttcaaaaaggctactgcacacagaaaccagatcaggacatttccggctgcggtttctttcccgacagcctggacgtcggcttctgtaacggcggccatagagggtaccgcctgtaataagagtaaagtggctgccagaaatgggacagtcagtgtatttttccataatttcattgtgacctcctataatgacagtggattggcgataaaattgccaaccatgctggtgaaaagacgaaggcaccaggcattcaacaccagcaggaatacctggcctccgaacatacggcaccaggatttgaaaatgttagcggtactttgagaggcgccggtagcaaatgccatcggcgcggtatagaccagcacaccaagaagcacgtaccgttcggcagcctcaaaaaacagtttaatgtagttccagaccaaaatcaggacgagtaaggccacggagccgctggcacagactccgattattgtcagcagcacagaaaaaatcacaataattaggaggtacaaagttgaacaggattaaaaaacaggggagcttgcccggagagcgctgcggcgtatccctttccgtaagattctttgcacgatcagtttcagcacttatctttccggagaagccatccctggaagcgggcctggatgaggaaattgcctatacgaaggaattgctttccgtcctggaggaagggattgccgcctgcggggacaaaaaaatacaggacctggcggaaaggatacggggattattagatacggataagatccgggaaatcaggtcaaaagatgacgaagatgcccggtttgggcacaagacaccctcgagtacattttatgggtacaagaaccatctggcaatgattgaagaaaagaatggggaattaaaggaagcccacggattaggcagagcagattcagtgggattgtttgctatggaattgcaaatgaattttacggcattcgtagcaaatattaagagaataacgaagttgattgcactggccggatgataaaacagcccatattttttagtgaatcataatctctgacactatattatagatgaaagaaaaactcccacaaaaaaacgggagtttttcagtgccctcgatttcacctggttttcggctttttttgtttttcaccgtacaccttcggcataccagacatatattatcataaaagcacaaaccgaggaccattgtatatgaataacaataagccctactctgtaccatcactcaggatgacccaggtagaagacccggttgatccaggtttcacatatcctgatactgacgtcgtaataccatctcccgacgaggaaatcgaccctgatttttctgtcatgcccccttactacccagactaccctgtacgtccggactaccctgtgcgtccggattatcctgtacgccccaattacccgtcatattatcccatcccctgcgtgttctgcaacaataaccagtggattcgcggcggaattcgtctgttaaatgcagctaccggatataacccatttaccgtgtatatagataacagggctgtgttttccggactggatttctctgaagtgacccagtaccgccagctatcccagggctatcatacattctccatcatgggctcaaatggttacgtatatctccgcaaatccatgtatgtaggtgacggaatggccaccatcgccattgtcaactcttccacgggcctggacctggtttctatccatgatacggcatgccccacggactggacctcatcctgcttccgagtctgcaatttagcctattacagcggacctgtcaatgcctcccttggcaatatctattttaactctgtaaactttgccgatgcagccagcttcagccggctcagctccggtaactataccctgcgtgtcgcccgttccgcccgaccggataacacccttgttaccacgccaataaccttgaatccatcccggatttataccctgtatgtattaaactggaacccttccgcggataccatacagacacttttggtagaagaccggagaggttaatcagcaatcatgagggagccgcataaatgaatgcggctccctccttattttccgcttattttccccttattggctgcttatttgtgcagcttatttgcctccttaatttcgtatgaaaacctgtgtttatggctctgtttgtgataaaatagtacagaacactgagccatacagaaaggaaaatctgccaatgatacgctatggaaccataggaactaactttatcgtggaccatttccaggaagccgcaatggaaaatcccagcctttactatgcagccgtctattccagaaatcaggagacagccagcagcttcgcggcaaaatatggagttaaaacaacctacacagacctgaaagcctttgcctgtgctgatgacctggacgctgtctatattgccagcccaaacagactccactatggacaggccgcacttctcttatcccatggaaaacatgtactgcagtaccacgcctgctgcgcaggccattcccggttttccatatcggaaggcaaaggaatagatatagtagaccaacgtatttgtggaatccaccggaccgccctgtgtcatgacattgacagagtcaaatatcttaaaggaggcaatggacgccaccacagatgtgaacaggatggtaggtgaaatcataggcagagtaattttgaaaaaggtacggattttaggcgtgtcatccagctctgccgcttcatagatactggacggtactgtctgcagggcagccatgattaacagtacataatatcccacacttttccacaccatgaccagtaccagcgagaacatggatgtggacggactggacagaaatgggaactttggaaattccagcttcgtgataatcatgttcagaaatccggtatccgggtccataagccataaaaatacaatggatacagacaccatggatatgacgttccggctgacccaggtctgctctttttccttccctgttaaaaagatacatggctgaaaagggaatggacaggtccaggagacagtcattctctacctcatgctcggattttaccatcagcgtaccatatacactgctaagggagtatatagtctcggaacccagcatttcctttgtcacgacctctgcctgtatggaaacatagtcttcctccaccctctgcaaataaactttttcaggccggaatccaagctgcatgccattgggaagcacattatttataatattcatttggggggtgccgataaactgggcagcatagatgcagttagggttctgatacagttggcgtggattggactgctggacaatgtacccatccttcatcaatacaatatcgtccgccattgacatggcttccacctgatcgtgtgttacatagacaaaggtggtccccagctttttatgaaggctgattaattccactctcatctgtcccctgagctttgcatccagatttgacagcggctcatccatgagaaatactttgggctgtttaaccatggccctggcaagagccaccctctgtctctgaccaccggataaggtggacggctttctgtccagatattcggtcagtcctacaatttcacatatatcttttatacggcgctgccgttcttcctttggaacctttttattttccagaccaaattcaatattttccctgactgtcatagtgggatacaatgcatagttctggaataccatagctatgtccctctttcccggagtaaggtcattgattttatgtccgtcaatcagtatatcccctgaggtcggttcatccaggccggtaatcatgcggagggttgtggatttaccgcatcctgacggccctaccagaacagtgaacgaaccatcctcgatttccaggttaagattatcaatcacaatatcattcccaaacttcttcctaacattttttaattggattgcccccatatgtatctctccctttcgtattgtttcatacagttctgcctgtctctgacataactatagcattgatgtccgaatccgcttttgctcttttttatgcttgttttgctctttttcatactgacagcgtattttttggcagaaacagccctgttaaactcttgtgtgaaactccaattcgtcgtatactataaaataatgcgaaaattcaggaggatacagtatggacaagattaagatgaccaccccgattgttgagatggacggcgatgagatgactagaattctctggcagatgatcaaagacgacctgctgctgccatacatagatttaaagacagagtactatgaccttggactggaatacagggacgagactaacgaccaggtaaccattgattccgccaatgccaccaaaaagtacggcgtggctgttaaatgtgccaccatcacccccaacgctgcccgcgtggaggaataccacctgaaggaaatgtggaagagtcccaacggaaccatacgtgccatcctggacggaaccgtgttccgtgcacctattgtggtaaagggaatcgatccatgtgttaagaactggaaaaagcccatcaccattgccagacatgcttacggcgatgtttacaagggttctgagatgaagatacctggtccgggaaaggtggaactggtttacactgccggggatggttccgagagccgggagctggttcacgacttcacctgcccgggcatcgtacagggcatgcacaatatcaataaatccattgaaagctttgccagaagctgcttcaactatgccctggatacaaagcaggaactctggtttgccaccaaggataccatctccaagaagtatgaccataccttcaaggatatcttccaggagattttcgacagtgagtatgcagaaaaatttgaagctgccggcatcacctatttctacaccctgattgacgacgccgtggcccgcgtcatgaaatccgagggcggctatatctgggcctgcaagaactacgacggcgatgtcatgagcgacatgatatcctctgccttcggctccctggccatgatgacttctgtcctggtatccccggacggcaactatgaatacgaggctgcccacggaaccgtacagcgccattactacaagcacttaaagggagaggagacctctaccaactccgtggcaaccatctttgcctggaccggagcactgcgcaaacgcggcgagctggatggcaacaaagagctgatggaatttgcggataagctggaaaaggccaccatcgacaccattgagggcggtgagatgacaaaagatctggctctgattaccaccattccaaacccagtggtacttaacagcggagactttattaaggctattgcgaagaggctgtaaaaaatagctgcctaaagctgtttccggccataaaaagggaggcccctggggcctccccgtcatattaatccataaactgatctccataaccatagtgctccacccctgtgatgtccaccggatcatccagaaagggtataaacataccgatggagttactgcctccgcccacgcaggcgcagacctcgtccggcatcatgcctgtcatctcaagaaactgcttccttgcctcatatcccacaacagactggaaatccctgaccataagcgggaagggatgaggggccagggcagagccgatacagtaaatagaatccttatattttcatcccggtaacattggatgcctgaattcttctgtatcagaattcaaaacatgcctccggctccagttcctccttaaggcccaaaagccaggccatggctgtttgcagtcacggattggcttttcaggctgtatagactataaaaattatatatccctgagacctctcatatctataaaacagaccggaaagcttcctccagatcctccaatatgtcgtcgatatgctcggttccgatggacaggcggatggttccgggacggattccctgctccagaagctccttctcattcatctgggaatgggtggtggaggccggatggatcaccagtgactttacatccgccacattggcaagaagggagaacagttccagattgtcgatgaactccctggccttctcagccccgcctcttatttcaaatgtaaagatagatccgcctcccctggggaaatactttttgtaaagctgctgctggatcggatcctggctcacactgggatgatgaacctcttccacctggggatgggccttcaggtattccaccaccttaagcgcattttccacatggcgttccaccctcagagacagtgtctccagcccctgcagaaacagaaatccgtggaagggtgacagagtagcccctgtatcccttaggagaatggcccttatccgggtgacaaaggcagccgctcccacgtcctgggcaaaacggatgccgtgatagctggcgtttggctctgtaagtccgggaaacttgccggaggcagcccagtcaaatcttccgccgtccacaatcaccccgcccaccgtggttccatgaccgccgatgaactttgtggctgagtgtaccacgatatcggcgccgtactcaattggacggacaaggtatggcgtggcaaaggtattatctatgatcaggggaatctgatgccggtgcgcaatggatgcgattttttctatatcagcgatatcggaatttggatttcccagagtctctataaagacagcctttgtattatcccggatcgccgcctctaccgcctctaaatcggacgggtccacaaaggtagtctccaccccatattcaggaaaggtgtgggccaggtaattataggtgcctccgtaaatatgaccggaggacacaatatgatcccctgcccgtgtcaggttctggaatgtataggacagggccgctgccccggaagccgtggccagtgccgccacgccgccttccagccgagccattctctgctcaaatacatccaaagtaggatttgtaagacggctgtatatattccccggatcactgagattgaaccgcgccgccgcatggttacagttgtcaaatacatacgatgatgtctggtaaatcggtaccgcccttgccccagtcgtagaatccggatgctcctgacctccgtgaagctgggttgtctcaaatttaaaatgtctgtctgctctcttacgcttctctcccatgatattgtcctccgtctttttattcctactatttctataggtttaattgataatatcatggtacttttttcctgtcaagaatttattttagtaaattctttaacctcacatttggggccccgcgcatttttaaaccgtacttcccttatccatttcaggcattcccggcgcgttcttatcagaaggcgcgcatccaaacatttttttgtaagccctgaaaaaactggaatagtctccaaatcccgctctggacgccgcctctgccgccggcacccccattgccagctcctttctcacgattgccatgcgcttatagaggatgtagcgggccactgtggttcccgtggccctcttaaatacagctgtcagatgattcttactcatatagaaggtctgggccagcccttccagtgtcagaggggcagacaggttctggttgatgtaacggatgatttcctgtacctgtccttcctttccgcgggaagtccctgatgcctccctgaatattgcaaaaatcttagtcaaaagagacaggacccgtgcgcggattgcaatatactgtaaaccctttccataattcccgcactcctccagggaatgaaaataccactccagctggaactgttcctcataacagcaccatgcggccccaaagggctccagcaacagcgcccgttcatcttcctccagaagttcgggggcgaagtgcaggcgtatccggttatattcatccgaatccagtacccttaacccgtgaaaacagcccggcggtatgataatcaggcttcccggcctgggtgtgtaggtcctgccctccagcagatactctacattgcctgaaatcatgtaataaacctcgtatacatcatggcagtgcatcttatactccatctccgcttcatcgctgcgcgtatgggcatataccaccttctgggtcttaaagctttcttcctggtacatgggcctcctcctttcaaaaaccggctgtccgcagccgtccctgtcctctgcggacacatgccgggggtacatttaatcctattctatcacagcttgtgctaattgcaatatttctttgtcttatgacaatggtttttgcaatatacctgtattataatatgtcctgtaagcaagagaaacacagcaaataaattgttgcaaaaaccgaaagggccctccccctttcacacattttatccccctttatacacagtaaaagaccaggcatccccagtgcctggtctttctgtaactgttgctttctgatattttctatgctgctttttctatgattctttttatggccagattgcccttgccgccttggcctccactacccgcctcacggcaatcaggtaagcgccggtgcgcaatgtggcgttctgtttcaaggcaatatcccataccgcctcaaaggccggatccattatattcttcagcttctcattgacttcttcctcggtccagctcacggactggatattctgaacccattcaaaataagaaaccaccacgccgcctgcattggccagaatatcgggaacaacggtaatgcctctgtcctggagtatgccgtccgcgtctgcggcaaccgggccgtttgctgcctccacaatgacttccgcacggattttatgtgcattggaagcgttaatctgattttcaagggctgccggcaccagtaccctggcatccatctccagcagttcctcattggtaatgcggctcattccctcttcattataatcctttaacagattcttcctgttaagagagagataatccaggatagccggtacattaagtccatccggattatagattccgccggatacatcgctgacagctatgattttcattccttccctgtgaagcagctttgccgtgatgctgcccacatttcccattccctgaatggctaccgtggttccctccgccgggattcccattttattcagtatatttttcgtggtatacatgacgccccgtccggtggcctcatttctcccgagtgcgccgcccaggcagatgggcttgcctgtaaccacaccgtggatacagtggcccttcagcatgctgtaggtgtccatcatccagcccataacagccgcgttagtgcctacatcaggagccgggatatcctgttccggccctataaggggagcaatggctgccgtgtatcttctggtgattgcccggatttcattttcagacagctcattggggtcgcagacaacgccgcccttgccgccgccgtaaggaatgttcaccactgcgcacttgaatgtcatccaggctgccagggccctgacctcgtcaggattgactgccggatggaaacggactccgcccttggccggtccgcgggatgtggagtgctgtaccctgtatccctcaaataccttggttgttccatcgtccatccgtaccgggatcgcaaccttaagttccctctccgggtatttgatggcctctatgtcactgtccgtatagcccagtatatcggctgcttcctttactatctttaacacattgtcataaggattatatactttttccatacctgttctcctttttcttccatactgctgcctgttcattacttcccaatacttagttcccctgattcaccactgactcgattcccgcaatcttcacacacagaatgaatatgtccatggcagcctttaactcctccggcgtgggataggtgggagcaatgcgtatattcctgtccttcggatccttcttgtagggataggttgcccctgcgcctgtgagcgtgacacccgcctccttagccagctctacggtgcgctttgcacatccctcaagggtatccagagaaatgaaatagcctccctttggatgactccacaccgccagtccgctcccttccagttcttcctccagacgtttaagcaccatgtcgaattttggcctcagcacctctgccagagccttcatatgggcgcggatattctccggcgttttaaaatactgcacatgccttaactggttcagcttatcgtgtccgatggtctgtgaggacagatgtcccttcagctccttcatgttgtccgggcctgatgcaataagcgaaacgcctgctcccgggaaagttatcttggaggttgagaagaaatagtaagtcctgttgggatggccgccagcctcacatgcctccagaatattcttaagaggcacttcctcgtagatatggtgcacgccgtaggcattgtcccagaatattctgaaatccggggctgccgtctccatggacgccaggcggtccaccacccggtcgctgtagcacacgccctgaggattggagtgaaggggaacacaccagattcctttgatggacgcatcctcccttaccatggtttccaccatctccatatccggtccgtcctccagaaggggtacgggaatcatctggattcccagctccccgcaaatctggaaatgcctgtcgtatcccggaaccggacagagaaattttaccgggctgccctcatatccatagaagctccatggcttttctccctctgttccgaaaagacagtggaatgaaatcgtatcaaacatcaggttcaggctggaattaccgcctattataatcaggtccggatccagacccaaaagctggccaaacaaacgcctgcattcaggaatcccttccagtacgccgtagttcctcgcatccgtgccgtcctccagcataaagccctttggaaactccaacaggcccatgttcatatccaactggtctgctgagggctttcccctggccatattcagtttcaaattcaatttcttggcttcctggaactgtatggtaagctcttttaacatatcattcagttcctgtttggaatattccgttacatgtttcattcccggtctccgcatcagacattagtcagatatatttgttcttgcctttattataaaaatatcctagaataaaaacaaatatttatatttgaataaaacttataatcaaaaacttataggaggtgcagctatgttcagcgggatgaattacgtatatgaagtctataaggaacagagcttttccaaggctgctgagaacctttacatatcccagccggccctcagttccatgatcaagaagattgagacaaagataggcatgcccctctttgaccggagcaccagccccatccagctgacggaatgcggcaaaaagtacataaagaccgccgagaaaatcatggacctggaaaatgaattcgcctactatgtgggcaatctccaggagctgaaaaccggccgcctgtccgtgggcggcacctatctcttctcctccttcatattcccgcccatcatagataaattccgcagggcctacccgcacgtaaagctgaacctgtttgagggccacacacccctgctggaacagaagctctttgccggggaattggacattatcattgacaactatctgctggacgcgggtatctatgaaaaggaacgcttcatggaggaacgtctgctgctggctgtcccctcctcctttgacagcaaccggcgggcggtgaaataccagcttaaggcttccgacataaagcgctgtcttcaccagaacgacacctttccggccgtatccttaaagaaattcaaggacgagccctttgtaatgctgcggtcccacaatgataccagggaacgcgtggaggccatactgggccgggcgggaatccagctaaactataccttaaagctgaaccagctcttaaccacctatcacctgacagagtatggcatgggcgcttcatttgtcagcgacaccgtggtcaagtgccttccggaaaacccggatatcatttattataaaattgacgaccctgaggcggtaagagatgtttatctttattataagaaaaataaatacctgacccggagcatgattgaattcatcaaaatggccattcctggcattgagaaaaactcagaaaaatatgtataagcatatgcttataagtgttataagtgctatttttgcttaaataacaaacacataagggggtaggaaaaatggttggatggccagaaatccttaaaaaggaaaacctgacaagagaagaaaaaaaatgtatctgcaaccggctcatgaccacggagagccacatggagcagctcatactgaagcatttcacggaggaggatttccgcagtgtctggatgcgcaagattggcggaggcgtgattggcggcaaggcctgcggcctgttggtcgccaggaagctgattgagctcaacatgcctgagtacgcaggacatgttgagccccataactcctttttcatcggcacggatgttttctaccgttatctggtgtataaccgctgtgcggagttaagggccaggcaccgtctggaaaaggaacattttaaggagaccgaggagctgaccaaacggctgcgtggcggttcccttcccgaagatatccgtgaagagctgagcgatatgctggaccactacgggaccacccccatcattgtccgctccagcagcatcatggaggacggatacggcaatgcgttctccggcaaatacgaatccattttctgcatgaaccagggcaccaaagaagaacggatggaggaactggaggaggctatccgccgcgtatacgccagcaccatgaacgaacaggccattgaataccgaaggaaacgccatctgttagatgtggatgagcagatggccctgctgattcagcaggtggccggacagcagtacggcggcctctatatgccggtggccgctggtatgggctgttcctataacccttataaatggatggaacacttaaacccggaagcgggaatgctgcgcatggtcatggggttggggaccagggctgtagagagaacgcccggcgattatccccgcctcatcggtctcgacagggctcaggccaatttaagaaccaccctggctgaacgccataagttctcccagcgcaaggtggatgtcctggacttttgcaccaagtcgctctgcaccaaatccctggaaaaaatactggacctcttacccaaatggcagaaaaaaatggtcctcagcagggatacggatgccgaggacatgctggccgaacgccatatatacagaaccatctattttgcggactgccagggactggtggacaatctggagttcatacgaatgatgcgctcccttatgaagatgctggagaaagaatatgaacgcccggtggatgtggagtttgccgtcacaaatcctgaggaaggcgtgtggaggctgaacctgctgcaatgccgtccccttcagactgccaaatccgagcaggtacatataccggacggcgtggaccaccaatttctctttgacgtgcgcaggacatccatgcgccggtccaaggaggaaccaatcgactatattgtgtgggtggatcctcagaaatactatgaatacgaatatgccaaaaaaccggatgtggcccgtttaatcagccgcatcaaccagcatttcgaggacacggataagaagctgatgctgctggtgccgggccgcatcggaacctcatcccccgaattaggcgtacctgtggtctacgcggaaatcagccagttcagcgccatctgtgaggtggcctacggaaaggcaggctaccatccggatctatcttacggcagccacatgttccaggacatggtggaggcggatgtgtattacggcgcaatcaacgacaacagcaaaaccaggctgtaccggccagaactcctcacccggtatcctgaggtgttaaaggatattctgcccggtgaatcccaggagcttgctgacatcgtaaaggtccatgacgtaagccgatccggagccaccctgaccctggatgcccaggagggccgcgccgtgtgccggatacggggcacggcgcagactgccgagcggtaacgggctgaccgcgcgcctgacaaaaggcgggaaaccactgagccatgatactctgtatcatgccagactgtaaataaatcagtgctcaggacgcaagtccgggcactgattttccttttatccaagattaagagcagcagcaagctgctgcgttgtctccaacacatctgaaaatgtcagtttatctgcgtagctattttccacagcgtagctattccagagcaaatactccatacaggttcttattttatcttcaacaccaaaggcttttccatatttcaaaagttttcggcttttgggttgctctttgagatacgctttgatagcttgggtatagaggccctttcgcacacgctccagtttgccaacctctaagtattttctagcattggcctgctaatacccgcactttcaacttgtgaagctaaaatgtaaatagactttcttaacaataataccataataaacactccgactatttctggatatactgacagtttttaaataacctaaaaaaacgcatcaagctcatactaatcatgaagccttcaaaaggccaatcaacagaaaggagtgaatcatatgaatttatgcaattgtgacgccaaagttcctgtatcacaatgcgggtgcggcaaggagcttcccgcccccggaccaggagtacagctggccattgccactgttcccatgcagccctgggaaacaccctatgagccatccaaagccctgaaacaggggactattttcccctgcctggatctgccgttttttatagtaggaggtgaaaaaaatgcctgaccgctgccagctgcttcagcagattaatgagataagttttgttgtcaatgacctgaacctgtatctggatacccaccccacagacgacaaggcattggacgcgttcagccaggccatggcacagagaaaacagcttctggattcctttgccaaggaatatgagccccttaccctgaactgtgtctgccctgaaaccaataacaagtccgaatcccataccaagtaccccggccagaagcattttacctggtcagacggacctcttccatgggactgcccggaacattaaaataaggaggtgtctaaccatgtggacttatgaaaaacggttacaatttcccgtaaaaattacccagacctgtcccaagacagcgtccctgattatcagccagttcggcggtcctgacggcgaattagctgcttccatgcgttatctttcccagcgttacaccatgccatgcaaggaagtgggcggactgctgacagatattggcacagaagagcttgcccatctggaaatgatctgcgccattatctatcagctgaccaaaaatctgacaccggaacaggccaagacagcgggctttgacgcttattatatcgaccataccacagccctgtggccaacggctgctgcgggcgttccctttaatgcctgtgaattccagtccaagggcgatgccataacagatctccatgaggacctggcggcagaacagaaagccaggaccacctatgacaacctgatccgaattattgaaaacccggaggtaagagaaccccttaaatttctccgggccagggaagtcgttcattttcagcgtttcggggaggcgctggaaaagataaagtacaagctggatgaaaagaatttctactatttcaatccggagtttgataagcagtttgtacagaacgagaaataaaggataaattacaacgccgcttcgtgtacggaaccgtatgcaaagcggcggactacataagagatacacaagctttggaggttttaacctttctgaacctgtctgccaggccatcgttccctccaaggcagatatggtcatcttctgctgctgtccgatacgagctcccggcctcacacccagccgtctatcacatcaatggagaatttaaaatggtcctccggcatgccctgttccttaagccgccgtctgatggtcttcatataatggtttgatatggccctgcatatatcctccgtattcccggttcggcacacgtccaccagctccttgtggatggggtactggcggtcaatcatggccctgctgtcgggattgcccgcataataattgatggcgtttccatagtttaagtccgtccatccctttatcagccgcggcaatccggtggatcgtatgatagcctcatgaagcgtgttatcacaggcaatggatttgttataatccgtatcctttaaatccctcatagactccaatgccgcatccatctccgcaaaggcagcctctgaaaacactcccctgcacagcttcactgccaaaatctcataggtggccctcagcagataaatctcgtaaatgtcctccagggtgatattcctcaccgaacatcccacatttctcacatattccaccaggccttcctgttccagctgtctcagggcttcccgaatgggaccgcggctcaccccaagttcgtccgaaatatcctgttcaataattctcattcccggcaccagctcgtggtttaaaattttcatacgaatgacgtccactacattttcacgcagtgtctgatacgttaattttcccataaaagcaattccttttcataatccaacaacaattctcaagtattctgtcacaaaataatattatcataagaaaatcccagggtaaacatgttggctgaaaaaatggcaaaactccggcaccttataccacaagcgccggagtttgtcttaggcttacgcctttcttatgtttacaggccgcatataccctttaccacataggatacaaagatgcccacataatttccgcaggctccggctattactcccatgattaagccgacgttaatcagggatttccagtccgcacctgccgcggtcagggatgaggttggtccgtctacaatacatcctaccatggacaggatcacatactcatacttaatcttaaatatgcggcagataataaggtgcagtacgatacatccaatcagcatgaacagtacatacagggtcatcatgagcgcggatccgataaactgctgcaaatccaccgcaaatccaatggttgcaaggaaggtcagggaaataaacagacccaggtcaagatttccgcgcagcttctggacaggttttaactgtgccagcccgatggataccgtggtaagaatcagaagccgccccgccttccagaaggtatccggaaaaatggactgcgcaatcacagtacatacaaaggacacgccgaaaccaatggttaaaagccatgcaatatcccggatggaccatctcttatcggacatcagtggctcgtcatctccgtcgtccagctcatcttttgtaaactgatacggccacagcttattccaacgcttggaagccttcaggatgaccggagcagcaaacaaaaataccattaatggggtggacaccacataatcggctgcgttggctgccgcaagagtctcacgtgaacagtccagacccgttgcgatggctgtcaggttaggggttccgcctgtgtaagtgcctacaaacatgccggcgcacttccagccctcggtaatccttggggcaaaaatgaatcccagtatgatggcaataaaacatacggaaaaaatagcggatatcagagcaatgaccggctccctgttcagcttcttcagctcacgcatgttcatgctgagcagacagatggatatggcgggcgtcacgcagtacgtagacaacgcgctgtaaaaatcatgtgaaataggcaccacatgggtgttggaaagaatgattcccaataccacaacggtcaaaaccggccccagtgacttaaatactttgaatctctgtaaccaaagcgcaaatgctaccatgattaaaatcacgaatatcaggccttcggtacgtgtaataagtgctcccatctctttttcctcttcacctttcatatgtattgacgattgtagattgtggattgtcaacaatctgtattaacacaatattaacacagctttcaaatatattcaatatctaaaagtaaaaactctattttttatgcatatttccagtttctgttgatttttcgggatgaatcaggcctgactgtcttcccgtgccggatacgaatatttaaaaagagaaaaatcccgcggacaaacccatatggcctgtctgcgggactcactctgcatattatattcagactgtattatattgagaatgcgcgataccccggcaaactacacaatgccctgtcccagcatagcctcaaccaccttctcaaatccggcgatattggcaccagccacatagttgccggcaactccgtagcgctctgccgcctctgatacctttgcaaagatatttaccatgattgtgtgaagcttatcatccacttcctcaaaggaccatgacatccttaaggagttctggctctgctccagtccggatgttgccacgccgcccgcattggcagccttgcccggcatgaaaaggatcttcttctccacaaacaggtctgtggcctctctggtggaaggcatgttagcgccctctgccacagcaaagcatccgttggcaagaagtgtctgagcatcgtcaagattcagctcattctgggttgcgcatggaagggcgatatcacatgggatgctccagattcctctgccctctgtatacaccgcggttggaacctcatccacatactccttgatacgtcctctgcgcacttccttgatttccttgacaatatccagctgaatgccgtccttgtcatagatatagccgttggaatcacttaaagccactacctttgctcccagctgctgcgccttctcagttgcgtagatagccacattgccggaacctgatacaactactgtcttgcctgccatatccttgccgttgtgctttaacatctcgttcagaatgtataccaggccatatccggttgcctgggtcctggccagggagccgccaaaggtaagtcccttgcctgtaagaacgccctcatataatcctgtgattctcttatactgcccgaagaggtatcctacctccctgccgcctacaccgatatctccggccgggatatccgtatccttgccaatgtggcggtacagctctgtcatgaagctctggcagaaagccatgacctcacggtctgatttacccttgggatcgaagttggaaccgcccttgccgccgcccatggggaggcccgtcagggagttcttaagtgtctgctcaaaaccaaggaacttaagaatgctctggtttacagatggatggaaacgtaagccgcccttatatggtccgatggcgctgttgaactgcaccctgtatcccttgtttacctggactgccccattgtcgtctatccacggtaccctgaaggaaacaactctttccggctccgtgaagcgctcaaggataccttctctgcggaacttctcctcattggcatcgatgaccagctttaaggaatccaatacttccttcacagcctgatggaactccggctcacccgggttctgcgctacaactctctcgtaaatctcatcaacgtatgacatttcaatctacctcctggatttttgtttgtgaagtgtggggatgctgtgccggcagtggatccggcaaacactttagaaaaagtatagcaagttaatatgctaaagtcaagaagtatgtaaaccgattaaaatccaacttaccgaattttaccgcatttttaccggatatttcatcatttactcccctgaagcctgtccggaaatccccttcgtcccccttatattctccaggcagaacagctttttattctccgaaccgcactgtgtcaccttaaaattaagcagatttccttccccggtccagaattccatggcatccagaatccgcgtcaccgtggaccggttcataagctgctccttctccatggcaaagggtccaaactccctgttgacaaatattgacaatcaatagtggaaacatggtctgatgcatgtgaatcttcctcgctttccgcatcaaaaaagggcagtccgctaccatggtataaataactgccggcaccggactgcccataactatagaatctggtctttatgaaagcttcttctgccatcatgggcccacccggaaccagtctgtcaacagccctgatgcgccgggttggattcgatccaacaatgttcaccacctgggtcacagttttacagaccgcttgcttcaaccatttgcataccgacgcttatggagggaggccccggcggcctccgttctcttatgtcagtactataccaggagctcatccagcctgtaccgtcccacatattcccgaagcttcagcttgacacaggtatagagttgggaagccaccccttccacggtctgaaccagcttctccggattggtaatccggtagctgcagattacatttaaccgcacagccactttatctgcggtgagaatttcctggccggagatgtcaagctgccatcaggtccatatacatcctgggaagtgtatcctccatatgcggccgtgttatatggatgagctggaactcatttttctcaaatacattccagtacaatgtctcaggctttgtgatcacttccctgtacgccttattcacaaaccgcagggctatgcactcatccggcagcactgccttcactaccctggaggcaaacttctcatccttcataaggatctcctccggtatttggcatgtcctgacctcccctgtcatgggcactgtctgtacctcatatcccaacatgtctaagtaagaatacttgcctgctgtcaacatttccacaaaccggccatccttcatcaggcagccgcattcctgctctttgattatatatttctttatcatcatatctgattccctctttattttgaatctgtaaaacttgtttgatggaaaaggcggatgcccggctccattctcctgctgcgggctcctgcttaagcacatcctgaaagggcaggccactgcggccctggcccgaagcagagccgggcaccggggagtcccaggaagtaaactccgcctcttaaggcaaactgccaatatttatgtagggcgggcatcccgtccctctgacgggcgcctgcttgatttttcccggccccggcatactgccgcggccttctatcccttcaccacacctatggtcttaaggcgcttcacaggaaccaccagatcctgctggttatccataacctcctcgatgttcttataggcaaaccggctctcctccgccacgtcagcctttcccttcttacccagaatcacaccctgtttctgtaaatccagaatgacttcctcacaggaaaatgccgccatggcgccttttctcgaatattgacggccggctccatgggatgaagagcagaagctctccggatttccttttcccatgaccacatagctgtaagaacccatggcccccggaatcacggctaattctccgttctgagcgctgacagcgcccttcctatggacccacacatcctttccatagtggttttcaaaggaggcataattgtggtggcagtttatgtcatgggagaattccagtgaaagttcggtatacttgccaatccatttttccagaatggctttcacagctaacatcatcttttccctgttctctttggcaaaatccatggacagctgcatccagttcaggtattgtttcccctctctggtgtccaccggcaggaaggccagcctgtattcatccggcacagagctgaaccatgtctggtttagctgtcttgccttatagtggaagtaatcgcagaccgactttccgaaatggcggcttcccgagtgaatcatcacagccagataaccgtcgtcgtcctcctggagctcaataaaatgatttccgcctcccagcgtaccgatttggtaatatcctgcctccagctgtcccagaagctccgcatcctcctcataccggtccatttcctcaaaggcgcagtccatggtatagctgggcatcatggtcttatggtgtgcaaatcccacgggcacgttgcgcatgatatcgcctacgatagcctggatgagggaaccgttgcccgtgataacctccctgatgtcagccaccctgatgttggtctccgtataagccatgccgcagccgatgtccacgcccacagcattgggaatgaccacgccgtccgccgcaatgacgcctccaatgggcattccctttccggcgtgtgtatccggcatcagactcacccacttgtgaaggaagggaagctgtgaaagatgatatgcctgttccaggcaactgccttccaaatccttgcgttccttcagccatacccttaccggaaccttcatattttctttttcatacatcacaaacatatatctcacatcctttcttcctcactctgtacgccgtcaatggattttgggatgaatcccgccctgccggcgccgtggtaatctgtcttaccgttcatatatttgcgtatgtatcttaactacatgcttataatacccgatcttaacgtgggtatcatttaaaaaaagttgcgaacttccattatttactattaattttatatttagaagtattctgtaatagcaggtgtgttaacttgacaaaacagaccattacattaaaatgaaagataataatatataaaacaaacttatcagaaatccacatacaggaggggacagccatggctgaatttcaggaattaataaagaactttgaccgcatccgggactatatgcgccaattttacgtatacgggttcaaggtaaggaacgatttcagcgaaaagagctcccggacctatgacaatgaacgccgccgcattgagagctggctctcccggtacacaaagtccgattacacctccaagggaaagcatgtctacatcaatgtggacagcaagaccatcccccaaaatcccctgtacgccgcctggaagtccaaaagctttacagacaatgacctgatgctccatttcttcattctggaccttttatgggattgtccggatggcatgtcgtccggcgctgtaaccgacctcatatcccataactatggagtggtatttgacacccagaccgtgcgcctgaagctgaaagaatatgaaaccctcggaatactggtatcccgtaaggacggcaagaccctgtcctacgccctggctccccttatgcccatggaaacagacccccggcgcgtaaattccagtgtcatgaaaccggatgagacagaggacggggaacagaacctgtggcagtgcctcaccacagccgtgaaatacttccaggaggccaccccctttggctacataggcagcaccatcctggaccgtcaggatgaatccaatgatttgtttcaattcaagcaccatttcatcgtacatacgctggaggacggcattctggccgacatactgaccgctgtccgtgaacagcgcttgatccggtttgagaacaaaagcagccgcagcggacagatttccaccctgtcaggggttcccctgaagatatttgtcagcacccagaccgggcgcaggtatctgtgtctgtatctgccggagcgccgccgcttcagcaactcccggctggactccatcacccgtgtgactcttctggagccatgtacattttatgaggaagtactccgtgatttggaaaagaataaggagaaatgctggggcgtgtcttttggaggcggtgcaaaccgaatggaggaggtctgtatcaagctctatatagacgaggaaaaggaaccttacatcctaaaccgtctttaccgtgaaggccggggaggagaggtcctgaagatacgtgagaaccagtttctctacacgggtacatttttcgataccaatgaaatgctgtcctgggtcaaaacctttacgggccgtatcatggacattcagggcacgaatttattttccatagccaagataacccgcgattgggaaaagatgtatgagatgtactgcgggaatgaggagtagaataccatggaattatttcataaaatatacagctgttattacaatgtggtccgccacatactggataaagcctggcacagccccataaccaggcaggacatggaggatatatgccgttcttacggtttccaggaaagcgccctgtccattatccccaaactgacggacggcacatgggcccttctggaggaacaggacaaacatacctttacgtcccgtctggaacacgccgttcccaccgtcccgcttacgaacctccaaaaagcatggctgaaatccctgatgcaggacccccgtttccagctgtttttcacagacggacagttggaacttctggcccggtaaagggacggtctgccctccctttaccgtgaggacgatttttactgctatgaccgctacagggatggggactcctatggttcctccgactacaggaagcatttccaggccattctcaaagcgattcaggaggaacgcgttcttctggtggcctatgagggaaaacacggccgtgtccactcctttgaggccgccccttaccagcttcagtattcctccaaggacgataaattccggctctgctgtctccagttccacaggaatacgttcagccgcagcaccatactgaatttagcgcggataaaggactgccacgtcaccgccaaagcatgtcccggcgacctggaatcccgctgtttccagcctgttcaaaaggcttctgaaccagtggtcctggaaatcagcggggaacgcaactccctggagcggtgtatgctgcattttgccaactatgaaaagcacacggaatatgacgtggaaaagaaatgctggatctgttccatccactatgatctgacagatgaaacagaacttctcatagatatactctcctttggccccgtggtccgcgtacttggcccttcatcctttgtacggcagattcgcagacgggtcaaaaggcagcatgagctgttcaacagtgagaaaggataaatttaaaaaggatgccgttgtgcagaccgggtatactatgtatgcaccaggaccgccattcggcatccttttactctatggttccttattttcctctaatcttagaatcaaattcttaacaagctcttccttactcttaaattccatcctgacgtcagtaatataccggaaagcctcctcccattcgctcatggaataagatgatatgcttaccatgcgcacggcatataaaatatcctctatgtaaaacggactgtgaaggtccgaaaggtactggcagcctgagagatcctgcaatctggccaacagccccccctgggatttatctggcatcatataaaactcctcttctactttctgcatgtatatttccaatttcctctgtgcaatctatacattgcaattatatatgacatttgtcgtaaaatcaaggaaatgcaacctatttcttgcatattccggaggatgccatggatcaaaaattaaagcaggatttaaggatagggccaaacatccgaaaataccgtctgcagtcacatcttacacaggatcaggtcactgcaaagatgcagctgatggggatcaatatttcacgcagcatatattcccagatagaaagcggcacatacaatatacgaatctccgagctggctgccatgaaggaaatctttaacatcaattatgaatctttttttgatggaatcatgctgaaccacagggatagacaataacaaaacaacatgaacaggccgcctgtcaaacgacagacggcctgttccaaacacaaaggataaaggtatttacccgcaatgggtacgaattatttaccgtagtatgcttttaaatacatttctttaatctcgctcatcagcggatatcttgggttagcgccggtgcactggtcatcaaaggcctgctcaaccatttcatccagcctgtctaaaaagtctttctcatcaatgccataatccttgatgcaggacttgatgcctacgctcctcttaagctcctcaatcttcacaatcagcttcttaaccgcctctgcatcatccttagcctggattccgcagaatcttgcgcactccgcatacctttcacgggtatgtggatactgatactgggagaatgtacccatcttacgcggattctctgcagcattgaaatcaaccaccagggaaatcagcagggcattggcaacaccgtgtggcaggtgatggaatgcacccagcttatgagccatggagtggcatacgcccaggaatgcattggcaaacgccataccagccatacaggaggcatccgccatcttctgacgcgcctcaacatttgtaggctcattgtaagctgttggaaggtaatcaaatacgttcttcatggccttaagtgcaaggccgtctgtatagtcggtagccatgacggatgcatatgcctccagtgcatgggtcagtacgtcaacgccggatgcgctggtcagacctttcggctggctcatcatgttgtctgtatcaacgattgccatgttaggcagaagcgcatagtctgccagaggatacttgataccggtctcctggtctgtgataactgcgaaaggagtaacctctgaacctgtaccggaggaagtaggaacagcgatgaaatatgctttctcgcccatcttcgggaaggtgtatacacgtttcctgatatcgatgaagcgcatggccatatccatgaaatccacttccggatgctcatacagcacccacataatcttgcccgcgtccatagcggaaccgccgcccatagccaggattacatccggctcaaattctctcatgagcttggcgccagcctgtgcgttagccagtgtggggtcaggctgtacatcggagaatacggtatatgtgattcccatctcgctcagacggtctgtgatgacatgggtgtatccgttcttatacaggaaggagtctgttacgatgaacgccctcttcttgcctaaaacgtccttcagctcatttaatgctacaggcagacagcccttcttaaagtaaaccttctcaggtgcacggaaccacagcatgttctctctcctttcagcaacggtcttgatattcagtaagtgcttaaccccaacgttctcagaaacggagttgccgccccaggaaccgcagcccagtgttaaggacggagctaacttgaagttatacaggtcaccgataccgccgtgggaagaaggagtgttgattacgatacggcaggtcttcatccttgctgcgtgctttaaaattttctcttcctcatttacattcacatacagggatgaggtatggccgtagcctccgtctgccaccagacgctctgccttatccagagcctcgtcaaatgtcttggccttgtacatagccagcacaggagacagtttctcatgggcgaactcttcgctgatatccacagactcaacctcgccaatcagaatcttggtatcctccggtacttcaacgcctgccagcttggcaatggttgccgctttctgacccacaatcttggcattcagggcgccgtttacaatgatggtcttgcggaccttatcaatctcgccctgctttaagaaatagcagcctctgtattcaaattcttttcttacttcgttgtaaatggattccatgactgtaacggactgctcggaagcacaaatcataccgttgtcaaatgtcttggaatgaatgatggagttaaccgccatcttaatatctgctgtgtcgtcgataatgaccggtgtgttgccggcgccaacgcccagagcaggctttcctgaagaataggcagcctttaccatgccgggaccgcctgttgccagaatcaggtccgcatctctcattacctcattggtcagttccagtgagggaacatcaatccatccgataatgccttccggtgctccggccttcactgccgcgtccagaaccaccttagccgccgcaatggtacatttcttagcacggggatgtggggaaatgatgattgcgttgcgtgtctttaaggcaatcagcgtcttaaagatagctgtggaagtaggattggtggtaggaataacagctgcaatcaggccgattggctcggcaatcttcttaatgccgtattccttatcttcctcaatcacaccaactgtcttggtgtccttgtatgcgttgtagatatactctgccgcgtagttgtttttgatgaccttatcctcaaccacgcccatgccggtctcttctactgccatctttgcaagcggaagacgcatcttatcggctgcgcttgctgccgcaaaaaagattttatctacctgctcctgtgtaaaggtagaaaaagctttctgcgcttcgcgcattgcgttcatttttgcatttagtccgtctacgctgtcaatgatttccggaacaacctgctcgattttctttgccatttccttatcctccattttccttgtgtttgcatcagtacatttaggctgtacctgcctgtcaagtcattttaaattgttactcaaccgctattgacaattaattaacaatctcactgtttgcattataaaccttcgttaaaaaaatgtcaatatgtaaatgaaagattttataaattttttaaagagagggcaatataagaaagaaaagagctatcctctaccgcaatggcaatagaggatagctgtaattaacaatcgaacacaatggccaaatctcaagggccttcctatagataactttttaataattccaccttatccagtctctcccagggcaggtccaaatcattgcggccaaagtgaccataagcagctgtctgcttataaatcggacggcgcaggtccagcatcttgataattccggccggacggaggtcaaaattggagcggatgatgtccaccagcttctcattgctcaatttcccggttccgtaggtatccaccatgatggaggtaggatgagcaacgccaatggcataggacagctgaatctcgcacttgtcagccagaccggccgccacgatgttcttggcaacatagcgggcagcatatgcagcagaacggtccaccttggtgcagtcctttccggagaatgcgccgccgccgtgacgcgcataaccgccgtaggtgtcaacgattattttacgtcctgtcagaccgctgtccccctgaggtccgccgataacgaaacgtcccgtggggttgatgaaaaacttcgtgttcccgtcaatcatatcctgaggaagtatctcgtcaaagatgtacttcttcacatccgcatgaatctgttcctgggtcacgctctcatcgtgctgcgtggataataccaccgcatccaggcggaccggcttgtcattttcatcatactccaccgttacctggctcttgccgtccggacggagatacttaagcgtaccgtttttgcggacttccgtaagacgcttagccagcttatgggccagggaaatgggataaggcatgaattcctctgtctcattggtggcaaaaccaaacatcatgccctgatctcctgctccgatagcatccagctcctggtcagacatcttattttcctttgcctctaacgccttattcactcccagcgcaatatcctgggactgctcgtcaatagctgtgataacaccgcaggtatcgcagtcaaagccatatttggcacggtcatagcctatctcacgcacagtctcacgcaccagcttctgaatatccacataggcgttggtggttatctctcccatgaccagaaccagtcctgttgtggtagctgtctcacatgctacgcggctcattgggtcctgctccatcagagcatctaaaatcgcgtcggatatggcgtcgcacattttgtccggatgcccttctgttacggattcagatgtaaaaagtcttctctccattttaagtctctccttctttcagataaatgattaatagcagctgtaacatcaaccatttacaaaaaacaaagtccgcagcaattgcggacttgaaaatatctttaaatcttcaaatcctcttattgctcgaccaagtatgctcttgcagcatactcctcgctcaggctggcaccttccggccctttcgcatatcttgctgatatactcaaccggggttgccgtgacttcacaggtcctttgtacctccatcactctgaataagggatatttacgaactctttaattgtaaaatgtgttactttcaatatcttatagcaattatatctatatgtcaatactaaaatttatcatttcctattctaccttatggtaatccttccctgtccggcgggatttgcatactcagatgtcacaaagcctcccatccgcctgatataggaagataatatatccacatccaccatgacctcatcccggattacattgcatcctttaaacatagtcatgccgtcgcctccctgtttcagcatgtagttatgggacgctacggtatatgtcctattaaggtcaatgggctctcccgccactttaatatccgttaccctgtaggctcctgacacgccggtgaaattgcccttgtcatccgtctgtacgccggacctaacggatgtgtcgatggtgtaggtcagaccggaaacctgaaggaagcccccgctctcttccggacaatttttagacgccatctccagtgcatccttaatctgctgtcctgtggcctctatgacacatcccatatttccataagggaacacagccagggtatcgttataggtaatgtttcccggcttaataacgctgcggattccgcctccgttgctgagcccgatatcagcccccagctccacacggtaagcatccgctgtcaaatcacccagattcgtctcagcgtttctgacaatacggttccctgtggcaggatcattaaccgtcagttcatacggcgtggcgcccagaaccgtctttaaggtctcattgtattggttctcgattgactggataaactgccaggttccatagtccgcagcctttccgtccttgctaatatagcttcctccgggaatcacaatagtaagccccgccggaatcacatccgcattctttatcttatccaggttactgttataaatatcaatccaacggttataacttcccagctctctctttgcaatcctgcttaaggtgtcatgttcctgtactgtgtactccctgtccggatccgcggcaggcacctctgatatcagctcggcgcgtatggaaccatcggcggatatggtcagcttaccgatatggttcagcttggttcccgtctgtgtcagaaccacattctgtccatttttattctttacgttctccgacggaaccgtttcatgggaatgaccgtcaatacatgcgtcaattcccgtggtattggcaatcacattggcggaggaccatttctgggtaatgccgttttccccaagatggccggccagaatcacataatcagcaccctctgtcctggcggcgtccacgctggcctgcacctgattatacagcttctggccgctctcgtcctcacagaaggaataaatataattgccctggctgtcctggaaatacgccggagtggattttgtaaagctctcaggcgtggtcacacccacaaacgccacctgagtatctccatatgtaaacatcctatagggcgcaaaaacaggtgtgcctgtggcgctgtttataaaattgcaggaataatatccgcaatttaatttcccggccagttccagaaatctggacatgccatagtcaaactcatggtttcccggaaccgcaaaatcatatcccacatagttcatgatatcaataagataaccgccgtcggaaagcgtgccaatgggcgctccctgaatggcatcccctgtatccaccagggtcacataaggggtctgccgctgcatctccttcttatataatgccagaccggcatagccgatattgtcatccactccgcagtggacatcattggtgtacagcaccacgatatccttgtccgctgccagtgccgtgattggaccgcctgccagcggcaggcccgtcactgccactgcggtcaggacaattgcgagaaacagactctgcagccatttaaaactcttgtttttcatgattttcctccttcttcacccttttcttcaaacattttgctgctcgtatcatataaccatcatatcatattttccatcaaaagccaaatgaaacagcaggtgctccggcagatccggatatccgccaaatcaatccccggccagctccccctcgttcgcctcttccctgcatatctcctgtgcggattggtaatccgtcacagccagctccatcacagactgggaataatttacagatatcctgacatattttcctttttccctggctgcctcagacgcaattcccgcaatctgctccagcacctccctggtcagatatcctccccgccagtggaaaacataatagggctgtttttttctcagtaccgccttaaagcgtccggccacgtcctccaacttagtcagggacagccggttctccctgtaataaaaccttgccccgtccgtacatgccggcaccttatataccaggggctgatgatccttaaatatcatcctgtcatccagattaaaataatcaaaccgcttctgtccataccggcccagggaattatcaaaggtcgcatccagatggtaccatgtgtttttcagcttcaccagattccatgcatggcggtaccggattcccctgtcaggaactgattcacttatggctatcaggcactccagccccagcctgtcgcacagtattttcacggtctttgcaatgccttcgcacacgccgattccctgctggagaggccctataatttcatgagaatactgttttttcagtttgtcataggttacattggagcagatgaattcatgcacgtacttctccttttcctccggcgtcatcccctctgcctgccgcaccaggcggctgattctggcctccagggctgttttcatctcttttattttcttcttctcaaacatatattccggaatcatctgcacatattctgaattccgggcaaacctgtagtgaaagccctccacataaaatatggccggatggtccaggcgcaaccggaaaaaaatatctgacagttcttttccatccaggcccagaaccggaaattccggcgacagtgactcaaatccatccagcatggccctgtaggcgttctgctgcgctttattcatctgctggtaataaaattcctgtttcatatccgttccacatatccttcttaagtctgtttgtcctgcctctgaaagaaaaggcaggatccatgcaccttccggtacatcctcctgccttgtattctctcctgttatcagccgacccgcaatttaaacttctgtacttcccggtcggaatctactttttctatcatggctcccagtccctggagcttttcttcaaaacactcatatccgcgctggatataaccgatttcatccaccactgtatacccgtcagcggccaatcccgcaatcacaagggctgctcccgctctcaggtccggtgcattgacctgggctcctgtcaggcgttttacgccgtctataacagccacgttgccctctacctttatattgctgcccatgcgggccagctcgtccacatatttgaatctgttctcaaaaatactctccgtcaccatactggtgccgttggccaggaccagggcaaccgacatctgaggctgcatatccgtaggaaagccgggataaggaagggtctttatatccgtgtgtctctgggaaggttttcccaccacgcggacagcgtcatcaaattcaatcacctcacagcctatctccgtcagcttggcggaaatggcctccagatgcttgggaatcacgttcttaaccatgatatcgcctctggtggcagccgcggcgcacatgaacgtacctgcctcaatctggtccggtataatggaatactcggttccatggagacggtttacacccctgatacgaattgtatcagtaccggctccctttatattggcgcccatgctgtttaagaagttggcaacatctacaatatggggttccttggcagcattctccagaatggtctgtccctctgccagggctgcggccatcatgatattaatagtagctcccacagacaccacatccagataaatgtggcttgccaccaggtcgatggcatgggctatgacagccccgcgctcaatggtcacctcagcccccaatgccctgaatcccttgatatgctggtcaatgggcctgctgccgatattgcatccccctggaagtggaacctgcgcactcttatacttgcccaaaagggctcctatgaaatagtaagaagcacgtatcctgcgtatatactcatcatccacagatacctcgcttatattgcttccgtttatctttacagtgtgtcggtcaatcctgtcaacccttgcaccaatttcctgaatcgcctctaacagtacattgatatcccttacatccggcagattatcaatcaccacatcatcgtcagtcatgatagaagcagccagtattcccagtgcggcattcttggctccgcttatggtcacatctcccaccagtggattcccgcctttgataatatattgttccattccacacctctgatttttatttaaacaaatccaatatataaggaaaatactcctaaagaaatctttaaaaatttgttcatattttatttacatcttcttagattataccataagaatcagatttgtaaagtaaaacgaaaatgcacgctctaaagtacactgtctactccactgccaaagcgcacagaaaatcattctgcaggttcttgaaatactctgtggcatcattcagtcccatcttctgtgtctcctgggtctgaggattatagagagtcacattgtactggtcatagccggacaaaagcacatattggcctgattccacataggcaatcacaggaatacccttgtcaatataatacagcatctggatcaggctgcatcctcccgcgtcgatgagtataagcccgtcctcatagacgcggctgccgtcaaatgaatccagatactttgtcacctttctggcctcatccaccggggatttgatattgcgtatgggctgcctgttgattctgtcccacacaatatgctggctgctgtccgtcacatagcccatctgcccataggccatttccactgcctggctgaagtttctggatgaaccaatataatgtccgccaccgtaagccttaaataccatactgttatcagatgacgaggaagcagcgcttcccgtatccagaacgcttgtatattcataggaaaatgcctttggcgcagatgtacggaccttatccccgtttatttccgaatctgactgaacaaaataaaccttccccttatcctgggaagcaaaccagccgattccctccagggggtccttttccaccctctggttgcatacaatggtatcctcgttctgatacagatactgattttctcccagcggcaccaaacgcttcaggtgaatcctcccgtcctgggccaccacatccgttatatagatgccgtcctttctgtattcactctccacctgcatctgtgtatccacaatgtacattgcatacataggcatacccttcatgcggccattgacaatccacttgtccttggagctgctcagcccatatatcaaatcatttccaacaaatcccaatactctgacgtaatcatttacctcccccacgatttcctgtttctgggaagtattaaaatccatgacatgaaccttctcagattcatacaggttctgtccttcctgccatgcaaaccggctggcatctccgctgacagcatagcttccctctgtcagcccctgggccaatacaagggattcattgctcttaagatcgataccgtacacagtgccctgaagcataatgtacatcatatcattctcgctgagataggacaatttatcaatgtcagctttcaccatatcgtaggattcagacgcaggcaggaagaatttttcctgtaccgtgtcctgctccttatcatagtgataaaataccactcccatccggccttcgtacttgccccggttcatgtatccatacaccagaaaatccatggcgccgtcgtcctgcatggacaatatctttatatcgtgtctgtcgtaaccgcttctgacaccgtcatccgaattgcttctgaaggaaaatacgcacaccgcctgcttatcatcataatcataacaccacaggtctccgcctgttttaaatgccacatacttggattttggactctccatcgtcctcaccttgttgtcatttgtaattcctagaagaatctttttacctgaaaaagactggtgaccgccgtcaaacacttcattggcattccgttcataattcatcaggtagattctctgctcattccacttcatggtaaaattatcttccgcgtcaaccagggaacgtgttccgtcctcctcattgatggcaacctgataccgaatctgaatttgacccatgatgccgtcaaactcctggagagtcacctgtggctctcccaccatctccacatccagaccatcccaggtcaaatggctgaaattagccctgatggtaacatggcctaaggagctgttatcctctgtgtcattggtttccagataggataccaggtctcttgcctgattatagtccaggctcttcctggtaaattccccggccagcctgaccatatctgacgcataggtattgtccggccacatgattctggtataataatgcagttccttttcacccgtggacacggtgattgacaaaagataagtttcattcctggccagcaggttttgaatcggaagcaccgcgctgacacttccgtccccgctgtcccaatcttccacttccgttctctccaccagcctgtccatggtaagatttctcacctcataactgattccggtaacggtgtttccatactcctgaatccggatatgcagcccacggtcttcaggcagcacagagatgctctccctggctgcctgattccccatgtcctgcatgtatccatgcagacaattgatttcctgaccgcccagttgggtataaaccaccggcaaagacggttcttccatggatgtatatacagctgattctttttccattgtgtttctggcactgatgaaatacactaccagcgctcctataaatatcaggaacaaaatccctgctttttgcaatatttttttcatatgtgatttttatcctttataccggttactctgtatcatttctattttatataatatccagtaaaactacaacttaatcttttcggaattttattaataatctctttgctgttcctacaaggcgcaaagacctctggcgcaccttctgtggaacatttcattcaacagaagcaccttaaccatgtctctaagccaggatggcctgtttccgtgcttaggaggcggaaccggtctgggaggctgcggcggtctcggcgggggcggtgtcggcctcggcggctgcggcggtctcggctgcggcggtctcggcggaggcggtgtcggcctcggcggctgcggcggtctcggcggaggcggtgtcggcctcggtggctgcggcggtctcggcgggggcggtgtcggcctcggcggctgcggcggctgcggcggctgtggtggctgtggcggcctaactggtccgggacctcccactggcggtctgccctgattaggtcccgccggcggtcttactggtcccggccccatgggtgggcgttccgggccggggcccataggcggcctccctgaattattttccatgggtgctctgcctgatccctgacccatattaggtcgtccacccattcttccatttcccggaaatccaggttctcttcctctcatttcctgggtttccattatgattccggatggatttaccactgattccctgtacccccggaaatcattatggatattggaaacagactgttcctcctgtgattcttctgtggttgacacctcagcctcacttatgttttcagccggagcattctctaaatcctgctccatctgtgcgtcatcatcctctgtaaataaatcttcgtccagccgtttcatatcttttttgagttctgccatttccataacagctttatcattttctgatatgttccacatgcctctgaccttttccgcgccttcggatgcaatcaccgtatcacaaattgtatcacaaagacggttaatcatcatatggtcaggatactcatcatacatgggactatttttataatctaatctgtcgcaagcttctgccacataaccctgtaggattcgtattcctgacggatacatgcttttcaggtattcaatgtcctgcatctactctcccttttccagttttctcttaccaatatcatatgcgggcaaaatccattatgcgccaacttcccgcacatttcataaaataaataaaagaccggatgttttccagtcttttacaattattgcagatttaacttttcttaatatagccaagagcctgctccaatgcctcctgttcctcattccccagaacaatatcggtctgtcccatatccaccaccttgatatacagataacaaccctctcggctgtggacgcagtttaatacaaatccgctgtttgtataatccaacatggcaaatgcaaaactgagatttcctcccatccctttaaaggcattgtattttacaagcccatacttttggaacgaagctctctgattccggttcaatgttcggatggaatccttatttgacctgtcttcggcccttaaatctctgatttcctcaatctggtccagaatgacatcttccagagtctctgcatcttttcctctcataaaatagtcatattggcgatccagccttcttacttttgtcattgtcgtaatcgtcaatatcagcagcagaaccactaatatcaataatcccgctattatgtatgcaggatcaaagggaatttgatttaagatgctgttctccatataatatccatctctcctttgtacctagcgaattgattcaatcatttctacaatccgctctaattctgcttcagaataatattcaatttcaatgcgtcctttatttttatccttgttatggatgctgacctttgtacccatgacgcttttcatacgttcttccaaactctgatatatcaaagccagggcctcgtccttagatttatccttcttctcttccccggtctctgcttcctttgcaaggcgctttacaaggcgctctgtttctctgacactgagcgattcatccaatatcatttttgcggccttcaactgaagccctttatcctccagggataataaagctctcgcatggccgctggaaataagattctgaatcagcatttcctgtatctgtccatccaattttaaaaggcgcatggaattggtaatggtagctctgtttttagatactctgactgctatttcctcctgagtcagcttaaattctgtcaccaaacgctgataagccaatgcctcttcaataggatttaagtcagctctctgcacattttcaatcagtgctatttccatgctctcctgcttattgtactcccgcagcacaacggggatttcctttaatccggctatcttggctgcacgccatctgcgttctccggcaattatctcataaaatgtcccctttttctgaaccaaaaggggctgtaaaattccgtatcgcctgatggaatcagccagctcagccagctgttcctcattaaaatcttttctgggctgttctctattgggttcaatcaatgccatttttaccatcaattccccgcttttgccatcctctttttcagtcgtagccgcttttgcttttgcaatctcctcttcgctttcctttataacatcttctccaaagatggctcccaatcctttacccaatccttttttagccattacaattcttctcctctgctcattacttctgccgcaagcatcctgtagctctcggcccccgttgatctggaatcgtaaagattaatagacatgccatggctgggtgcctcagccagacgtacatttctcggtataatggttttataaattgttctgttcaaactgctcttaacactttccactacttccagtgatagatttgtccttgcatcatacatggtaaatacaacgccttccaattccaattccggattcaactttcttttaaccaggtccactgtctttaatacctgattgagtccctccagggcatagtactcacactgtataggaaccagtacggtatctgctgccgtcaatgcatttatagtcaatatatttagagacgggggacaatcaatgatgataaaatcatatgtatctcgaacttgatttagacaactgctcagaagcttttccttattctcgacttcctgaaattcaatctccgctcctgccaggttcatgtcagaaggaagcacatccagattcggctgtatttccttaataatacattcatccacagatgcctcttcaatcatcatatcgtaaacagttctatcaaaatcttcctgttccaaccccagtccgctgctggcatttccctggggatcaaaatccaccagcataacatgttgtcctgcttcagccaaacaggcggaaagattaatggctgtggtagtcttacctacaccgcctttctgattggctattgttatgattcgtcccatacgtataaattcctttctcgaaaaaacaaacctttcttcgattacttttacgattataacacaagtcctattcttttcctacgggaaattaggagaaaaggagaattttcatgttttatacaaaaaaatgtttcacgtgaaacatttttaaggcagaaaagtggcatcctaattctattgtgtcttaataataatttaattctctaaccgttgtaatagcccccagcttgtattataatggagaagaatcaaaaaaccggttatataatatataatttcaggagactattgaatgaaaacaaggaataaattactgaccttactcatactgtcatccggagctgctgctgctactgctctgattaacaaagcgataaaactttcggccacgtcccgaaatgtattggaagaaccagaggcactgtgttataagtggcgtttaggaaatatacattatactaagacaggaaccggtaaaccgattctgatggtacatgaccttgctcctgcttccagcgggtacgaatggaagaatctggttggtaaacttgctgagacatatactgtatataccattgatttgctgggatttggacgttcagaaaagcccaatcttacctatacaaattatctgtatgtacagcttctttctgatttcataaaatcagaaatcggacacaggacagacatagttgccagcggttcatctgctgctctgggaatcatggcttgcagcaatagtcccgaattatttaatcagttattattcataaatccggagagccttctctcctgcagtcaggtgcctggaaagaatgcaaagctttacaagattatattagatttgcccattgtgggaaccttgatatataatatagcctgcagtaaacagtttataacaaaagaattcttaaccaattactattataatccttactcagtaaaaaccaggataattgacgcgtatcatgaatcagctcatttaggtgagtcgcccaagtctgtctatgccagcttaaaatgcaattatgttaaatgcaatattgcggctgccttaaagaaaattgataacagcatatacctgttaggcggagatgccatagatgatataagtgaatgcatggaagaatacaaagaatacaatccagctattgaatggactgttgtacccaatacaaaatcacttccacatttagagaagcctacagaagtattcgatgtgattcaaacttatttatcctaaaacaagataatgtttcacgtgaaacatacggttcggatatatactccgagccgtttttactatcgctgctagatgatgaaacccgttgattaactacagaacctatataaagaaaggaaaacacaatatgctacaaattggatgtcatttgtcctcatcaaaaggataccgtgccatggcaaaggacgcaaaaaaaataaacgcaaatacatttcagtttttcacccgtaacccgcggggaggaaacgccaaatccatagatgaaaatgatgtaaaagaatttctggcggaagcccagtcactggacattaatcctatattagcccatgccccttacaccttaaacgcctgttcggccgatcctaaattaagagactttgccaaacgaaccatggctgatgatttagttagaatggagtatactcctggcaatatgtataattttcatccgggaagccatgtaaaacaaggtactgaaattggcatacaatttattgctgagatgttaaatgacattctttctccggaacagaccactactgttttgctggaaacaatggcaggaaaaggcagcgaggtagggggattttttgaagaattgagacagattcttgatttaattgaattaaacagccacatgggtgtctgccttgatacatgccatatatgggatggaggatatgatatagccaatcacttagatgatatcctgacagagttcgataataaaatcgggttaaaacgtttaaaggccatacacttaaacgacagtcagaatccgttgggcgcgcataaagacagacatgcaaagttaggtgaaggatatataggattggacacctttaagcgtattgtcactcaccccgaattgagacatctcccattttatctggaaacccctaatgatttggatggatatgcacatgaaatacaaatgatgcgtgaggccgcagattaaatctgattgtatggaaatttttaatgagtataaacattctcatgaatttatataacacttatatacatttatacaaatgcttacataaatacttatatgaataactgtatgaatgactatctgaatatctatatgattacctatatgattacctatataaatacctatatgaataaaataataggaaggcacaaatgacaccgtgccttcttatttaatatagaaaattaatatacaaagcatatgtaaatacccttagcacattttaaatgataggtaactaaattatatcgatcattccaaaaaatctcaaaatagcaccaaaaaaaggatgtttcacgtgaaacatccccgcaaccacttctaccccaaaggctccttggtcggcattcccgctttccttggatacttctttgatattcctttcaccttcttaattatcaccaaagatctggaaacatctgtaccgggcagcatgaatttatctacaaataccagctctccccccaatattccaacagccttacctgcggacctaagctcatcttctatctctccggatttatatggaacaaagaatccgccaatcttcacaaaaggcatacaatactcagacaaagaagccaaatttgccacagccctggatacgcacaaatcatacatttccctgtgctctttctgtcttcctatatcctccgctcttccgtgaataaattccacgttttgtaaccccaactcattacagacttcctccagaaatttaactctcttatttaaggaatccagcaaggtaagttttattacgggaaaagctatcttaagaggtattccgggaaatccagcccctgtacccacatcaataatggattttcccttcaacatatcttcctcatacacgccgctgccgcagcatccatcgccagaatccatcacctttttcaatactctaaaaagtgacacgctgtcactaaagtgtttggatacaacatctgcctcatctgttatggctgtcagattcatgaccttattcttttccaccagcatttcataataagtaaaaaattggtccaattgtttctcatttaactttatccccagaagccccagctcccggtccatctgctgtctaaatgtatctgtcatatcagaccctctcactgctttcttgtaaaatgcaccagcaaaacagatatgtctgccggtgaaacacctgatatacgggatgcctgtccaatggtagccggctgcactttattcaacttctgcactgcctccctgcgaagactgttgacctctgaatagtcaaaatcctccggcagcttcttatcctccagtttcctaaacgatgccacctgctgcatctgacgctttatataaccttcatatttaatctcaatattaacctgttctctgacatcatcaggaagccggggcctgtcctcatccagttcctccagtttatcataatccaattccggcctcttgaccagctctgccagtgtaattccagacttcaataaagtacttccatatttttccaaaaaagtctgtgcctgaccgtttactcctataacagtcttttccaaccgtttgatctctgactgtatatcatccaccttctttaaaagatgttcatactcttcatcgcttaccaggccgatatcatgaccgattttcctgagtctgatatctgcattatcctggcggagcaaaagcctgtattctgccctggaagtcatcatccggtatggttcatggttttcctttgttaccaggtcatcaataagaacgcctatatatgcctgtgaacggtccagaaccacggcctcccgtccctgtatcttcatcgcggcattcacaccagccatgaatccctggacggccgcttcctcataccctgagcttccgttaaactgtccgcccgcaaacaagccggaaatcttcttaaactccagggtaggcttaagctgaagcgcgttaatgcagtcatattcaatggcataggcatttctcactatctttaccttttcaagtcccggaaccgtacggtacattgcatactgtacatcctccggcagggaactgctcatgcctcccagatacatttcattggtgtatagcccctccggctccacaaatacctgatggcggttcttatccggaaatttgaccaccttatcctcgatagaaggacaataccttggcccggttccctcaatagcccctgaaaacagaggtgaacggtccagattatccttgatgatgcggtgagtatcttcattggtatacgtcagccagcaggaaacctgttccttctggatttcatccggattcgtcgaaaaggaaaagggcaccacccgggaatccccaaactgctcttccattttggaaaaatcaatactcctcttatccaccctggccggtgtccctgtcttgaaccggaacatctcaatcccattttccttcagggaatccgtgagatggttggctgcctgaaggccgttaggccctgtaggattgctcacatccccatagatacacctggctttcagatacgttcctgtgcacagtaccacagcctttgcgtgatacaccgcgccggaaaatgtctttacgcccctgattttcccgtccttcaccataatttccgacacttccgcctgacgtatggtgagatgctctgtgttttccagggtctttctcatatgcctgctgtaatcctgtttatcagcctgagcccgcagggaatgaacagccggtcccttggattcgttgagcatcttggactgtatgaaggtcctgtctatgttcttccccatctctccgcccagtgcgtccagctctctgaccagatggcccttggaactccctcctatgttgggattacagggcatcagcgctatgctgtccacgctgacagtgaacatgatcgtttccatgcccagtcttgcactggccagggcggcctcacatcctgcatgaccggcgccgacaatcaccacatcgtatgtttcttctacataaggcatcattccacgttcctcttccatcttaaattcccctatttacccatacagaattttgcaaatatctcattcacaacatcatcatccactgactccccgataatgaatcccagctgttcatatgcattcatcaggtcaatcgaataaaaatcctccggcatgctgtcttcaacgcttccctttaccatcaaaaggctctccaggcactgctccagcgcctccttatggcgcgcattggtaatgtaaacctggtcattaaaagacaggtcgccatgataaaacagcttcttgatttcctgctccagcagctcaattccctgttcttcctttgctgaaacagggatcaccttatgactgcagagctgttccagctcctctgtccccacttccagatccaaatccgatttattcagcaatacaatggttttcctgccacggataaaatccatgatttccctgtcgctttcatccagcggcctggaaccatccaccacatagataatcaaatcagcatccctggccgctttcagcgcccggtccacaccgattttctcaaccacatcctccgtatccctgattcccgccgtatccaccacattaaggctgattccctgcaaatatatatgctcttccagagtatccctggtggttcccgcaacctcggtgacaatggccctctcctctcctaaaagcacattcatcagggaggatttacctgcattgggcttgcccagtatgactgtctttaccccttcagacataaccctgccgtcatctgcggacaggagaagctttctcgcctcatcaatcatgggtgccagcgcatccataagctgactcccatatccatccagtgatatgtgttccgggtcatcgagagctgattcgataaacgcaatctgatacaatatctggctgcgcagttccttaatcttattggacaccgaaccgctcagctggctcaccgagcttttcagcgcatactcattggtggcgtgaatcacatctgccaccgcctcggcctgagacaaatccagccttccatttaagaaagccctctttgtaaactctcccggctcagctgttctggcccccgcgtgaagaacggtctccagaatccgcctgaccataagcactcccccatggcagtcaatctccaccgtatcctcagccgtatagctgtggggtcccttcataatgatcaccagggcctcgtccaccttttcatccccgtcatatatatacccgtaatggactgtatgggactgggcaagactcagacttaccctctctcccttcctgtttcggaatatggaatcgatcacggaaaatgcttcctctccgctgattcgcacgattccgattcctgagttgctcatgcctgtggctatggccgctatcgtatctgtcttcataagctctcctcacaatagagcaaaaaggccgtcgcttcagcaacagcctcttaacctgtttcattactgcctgcatccaatcaaccgtggatgggcttattcttcttcaccggcagcagtctctgctgatgcatctgaacttgtctgagatgcactgtttccattggtgcggcggttattcctatatccgccggaacggtcggaacgttcataacgtccccctttattcctgtcatagcgtcctttgcggtcgccggatgcagcttccttcttaagcgcaatcaccacatggcggaagggttcttccccttcgcttctggtggtaacatacttatcattctgaagggccgcatggatgattcttctttcataaggattcataggttcaagggataccggtctcttagtcctcttaaccttataggcaatgttcttagccagggtctccagggtttccttccttctctcacggtaattctcagtatccagcttaaccctgagatatccttccgttcccttgttcacaataaggctcaccagatactgaagagaatccagggtctggcctctcttgccgataaggattcccatatcctcgccttccaggtttaaggacaactcctgctcctcctggttatatgcagccgtaatgttcacctgcatattcattgcctcaaatatctgagacaggaaatccatcgctctatcctcaatggactcttttttcttagcacgaatgatggctggttttgcgccgataccaaggaatcctgtacttcctttatcaaccacttcatattccagtttgtcgctggtggtttcaagttcgattaacgcctttgtaactgcttcgtccactgtcttggcagtaactgtaatcatatccatacaaaaccctcctactttttacccttctcgtgcttctcattatacttggaaaccatgttagccttagccgccagacttccgggcttggcattatcattatagtacttggtagactcctcaacaatggacttagtcttagcgatcttagccatctgggcctgttctgccttttcttcccttgcctcaatcttcttgagcatctcgtctacattgcccacttttgtaggaggaaggcctttctttgcacgcttcttgttggtcttttcaatgttcttctgaaccaggtcgtcaatatcaactttattaaggtaagaattgattcccacctgctggataatggtgaatacactctgtgcaacccagtaaagtccgataccggatgcaaatgagaaacagaagaatacggacattaaaggcatggtcacattcatgctcttcatcatgtttgcgcccggagcatcttcagactgctggggctgattggccgtcatcagcttggtgctgtaccactggctcaaacctgccagcagcggaatacaaagcgccgcaattgcagtcatcagcgtggtgttgtcaaccttattaaaatagttcatgataacctgcataggtgtgtatgcaatgttcagaccaaagaagttctgcatgttctcaatggcatccactactcttacgccggtttccgtaactgcctgtcccacggaagaaaaagcgttgaccagtgaatcccactgctgtcctgtcagcttatataataaatcaatgactgtgtttacattggtatagtcaaatctctcacccaccatcttgtgggcctgcgccaggtctgtaaatgcctgagacgcctcatatccgctgggaagcttgcttaccactgcttcataatatacccttacggactgtacgtatgcaggaatattgtagatgacgcggtacaacgcgaaaataataggcatctggatcagaagagggaggcatccgcctgtcatggatgtgccgtacttctcataaaccgccttaatttcggtctgcatcatcatggcgtacttctggtcattttccttgcccttgtactttttctgaatggctgtaatttcgggctgcatgaccgccatgagttttgatgatttctgctgcttaatggtaagaggtatcatcagcacctttgttacaagggtaaataaaatgatacataaaccaatattcaatatcccgaaggcactggtaaaacggaacaataagtccatgatcccccccaggatatcagctatcggccccagaatacctcctgtttttgtcaataatactgcgccagctatactgttcaatacactacctccttcgatctacggaactggatcataaccgccttctgcaaatgggtgacaacggagtatcctcttgcaggccaaccatgtaccttttaacgcaccatacttcttcaatgcctcaatggcgtattgagagcatgtaggtgtgtaaatacagtgagttcttactttaaggggtgacagaaatttctggtagccccttacaaacaaaatcagacatcttgccataatcacttcacttcgattcttttaaaatgtgatgcagtccgcacaggtgcaggtaagcaccctccaaatgtttgtaatccgattgtctggcagcgcctctcgctaccaggatgatgtttaacccagtctttattctgtaattgtttaaacggaaaatctctcttaaaagccttgttatatgatggcggacaacgctgttgcccacttttttgctcacagatatgccaatgcggttttcatcttccccggttttcatcacatacatcaccagcagtctgttcgcataggaagttccattcctgtatatcacctggaactcactgttcttcttaacggaaggaaatcgtttcatccgaaactccttacaatcaggttgtcaaaacacttcccttttttccgggaaggtaagaaaagaaaaggccacatgatgctgtggcccgtagttcttttgctttaagcttgaaacaattaagcagataatcttgctctacctttagatcttctggcagcaataacttttctaccgcctgtagtcttcattcttgctctaaagccatgaactttcgctctctgtctcttcttgggctgaaatgtcatcttcatatccgggcacctcctatcaaaaattatgtggcaatgtgaaaacacacatttagactagtataattaaacatcttctcaattatatagaagaaatccgccttcgtcaagcggattttctcaaaaatcaacaaaaaagctgcaaaaaaggacagtctcagagactgtcccaacaagatgtgtgcattgcaaaactacattactatatttagtataaatccggttccctgcctatcctctgctgtctggtattaccttcagcaggattccggccacagccgtcacgataattcctgccaccagggcttccggcactccctgcataccgatgattcccaatattactccatatacccatttggctgtccagctggcagcagacgcatactgatccccaaacaaaagataaatcaagttcataaccagaagtgtgttagtcagggatccggctacgcctgccgcaaacaatgcggtcccctgcttatttctcctgttcttaagcatcctcataaacagacggtacacataataggccacaaccccaatcagtattcgcggaaccaggcagataaccaggcttcccggatttccgtgaaactgtcccatggtaacaaagggtgaaaacacaaaagacgtgggatttggcatgaaggtattcttccacaaactggtcaggccgaatgtcaaccccaggaatgccccatatttcggtcccagaataatggctccgataatcacagggatatgaacggtggtcgcattcatgaatccaagcggaatgtaccctaagaatggcacaaaggccatgattacgataatggctgcaatgactgctgccaataccaggtcgcgggttttggataaagtattcattttttcctcctgctactgttcttatgataaagatacaatgcaatgctacaacgtaattataagtaaaaatcaccccagcgtcaatgtttcatgcttatgttttcctttctgtgcaaggttattttcacatcggatcccagattaacataacattatccacaaaatgtggataagttgtggataagtatgggataatggccgttttttccccagcccgatctaaaaaatccagaatttatgaatatttccaccatgtgtaaaactccagttaactttctcacgatttttgtggacaaaagatctttccacactgcttacacaaggcttccacccccaattcacaaagttatccacaatattttacacttgtcattgaaaaaatttttactttagtatacaatagatttagattgggcaattctgcaatacagttttaggagacaaaaaatgatcgaaaaaatcaaagaaaactgggacaaaatcttacttactttaaaagaagaacacgaaatatccaatatctcctacagtacctggctggaacccttaaagccgcactcttttaaagacaacacagtaaccatcattgttcccgaacagacctttttacaatatgtaaataaaaaatacggatttttattaaaggtaaccatctcggaattccttgaaaaggaatgcgaggtggatttcaaagttaaggagcaaatcgcggagacggaggaaccgtctgcgccccagctgattaagaataacaaggtttctgtcagccccgatgtcatacagagtgccaacttaaatcccaagtatacctttgatacctttgttgtaggcggaaataacaacctggcccatgctgctgccctggccgtggctgaatccccgggtgagatatacaaccctctctttatatatggaggcgtgggacttggcaaaacccatctgatgcatgccatcgcccacttcatattaaagaacaacgcgaaatccaagatactgtacgtcacctcagaaacctttaccaacgagctgattgacgccatccgtaataaaaacaacataaccaccacggaattcagggaaaaatacaggaacaacgatgtccttctcatcgacgatatccagttcatcataggtaaggaaagcacccaggaggagttcttccatacctttaacacattatatgaatcaaagaagcagattataatatcctcagataaaccgccaaaagaaattgagacactggaggaacgtctccgatcccgttttgaatggggcctgaccgtggacatccagtcccctgattatgagacaagaatggcgattctgcgcaaaaaggaggagatggaaggatataatatagataacgaggtaattaaatacatcgctaccaatatcaaatccaatatccgtgagctggagggagccctgacaaaaatcgtcgcgttatcaaggcttaacaaatgcgacatcacactggaactggccgaggaagccttaaaggacatcatttcccccaatgcccagagggaagtgacaccggacctgattattcaggtggtttccgatcattttggccttacccccctggatatctcatcccagaaacgtaataaggaaatcgtatacccaaggcagatcgtcatgtacctgtgcagggatatgacggccactcctctccagactatcggacggtacctgggaggaagggaccataccaccattatacatggcgccgagaagataaccggtgacatggcaaaggacgacacattgagaaataccatagagatactgaaaaagaagatcaatccacaatagacagtggaatccatgtggacgggctgttgataactgatcgtttctgaaggacttgtgaatgacttttaaccacctgtggataaactttaagttttccctcatgaaagtggatggtttccacatcctgttccacaggtgcttgtccttaattatcaaggacttcagacagttttacacaaacccacagcccctactacggtttcttcgaaaattatttatatcttcactcacagatgacacatcgggcacacaattactctgaaaggaagttatcaacattatgaagttaagatttcaaaaagacgccattgttaatggaattaatattgtaatgaaagctgtaccttccaagaccaccatgaccattcttgaatgcatactcattgacgccagcaccagcgaaatcaagcttacaggcaatgatatggaattaggaatcgagacaagggttgagggagacatactggaacacggcaagatcgcgttagatgcaaagctgttctctgaaattaccagaaggctttccagcgaaaatgcgtccgttaccattgaatcagacgataagttcaacacaaccatacgctgtgaaaactccgtgttcaatatccagggacgtgacggggaagagtttgcataccttccctatatagaaaaggataaatatatctgcctgtcccagttcaccttaaaggaggtcatccagcagaccatcttctccatcgcccctaatgacagcaataagatgatggccggagagctgtttgaagtcaatgaaaaccagctgaaggtggtctccttagacggacacagaatctccatccgcaaggtgcgcttaaaagaccactatgaggacaccaaggtaatcgtaccgggcaagaccctcagcgaggtcagcaaaatattaggcggagataatgaaaaagaagtgctgatttatttcagcaccaaccatattctctttgaatttgacaatacaatggtggtgtcccgtctgattgaaggtgaatatttcagaatcagccagatgctttccagcgattatgagacaagggtatctgtgaacaagaaggaattcctggactgtattgaacgggccactatcctgatccgtgaaaatgacaagaagcctcttataatcaatatcggagataactccatggagctgaagctgaactccagttttggctccatgaatgcggaattgatgattcacaagacaggtaaggacatcatgattggatttaatcccaagttcctcatcgatgcgctgcgcgtcattgacggcgaggatatcaatatttatatgatgaatcccaagtccccatgctttatcaaggacgaggaggaaagttacatttatctgattcttcctgttaattttaatgctgccactgtctaagagaggaaaagtatggaaataattaagcttagggaagactatatcaagctgggtcaggcgctgaaagcggctggcctggcagaatcaggcgtagaagccaaatatgctgcccaggacggccttatacaggtaaacggcgagactgtttatcagcgtgggaaaaaactggtggacggtgatgtggtcacctataagggtgaaaccattaaaatcacgaagtgacagactggcagggaaatccatgattattgaatccatagaactgaaaaattaccgcaattacaaagaactacatatggagtttaatcagggaaccaatatactctatggggacaatgcccagggaaagaccaatatcctggaggcagtgtatgtgtgctgcacgtccaaatcacataaaagcgccaaggacagggatatcatccggttcaatcaggatgaatcccatattaaattgcagataaggaagaacaatgtcccttaccgcattgacatgcatctgaaaaagaacaagccaaagggcattgccatcaatggggttcccatacgcaaggccagcgaactgttcggcatagccaatgtggtattcttctcgccggaggacctgaatatcataaagaacgggccttccgagaggaggcggttcattgatatggaactgtgccagctgaataaactctatgtccattcccttgtacagtacaataaggtcctccttcagcgcaacaagctgttaaaggaactgtatttcaggccggagtatgaggaaaccctggatgtatgggatatgcagctggtgaattacggacgtgaagtgattaagttccggagggatttcattaagcagctcaatgaaatcatacacgccattcatctgagtctcacaggcggcagggaggatattaccatttcctatgaaccctacacccaggaagaccagatggaggatgtccttaagaggaaccgggcccaggacatgaaacagaagaccacattgtcgggacctcacagggatgacataagctttattgtaaatggtattgatatacgcaggtttgggtcccaggggcagcagcgcactgcggccctgtcccttaagctgtcagagcttgagctggtcaagcaattgagccataacgacccaatcctgcttttggatgatgtgttatcagagcttgacagcagcaggcagaaccatctgctgtcagccattaaacatatacagactatgattacctgcacgggtctggatgattttgtcaataacaggttccagattgataaggtattcaaggtaattgacggaactgtcatcaacgagaattaatgccgtactagaaagaaaggatgattatataacatgggagagcaatacggagcagatcagattcagattttggaaggacttgaggcggtcaggaaacggcctggcatgtatataggcagcacatctgccagaggtctccatcatctggtgtatgagattgtagataatgcggtagatgaagccttggcgggatattgtgattccatcgatgtgaccatcaacgaggacaattccatcacagtggtggatgacggccgcggtattccggtggatatccagaaaaaggcaggacttcctgccgtggaagttgtattcaccatcctccatgcgggcggtaagttcggcaacggcggatataaggtatccggcggacttcatggcgttggtgcttcggttgtcaatgcattgtctgaatggctggaggtccaggtctataaagatggaaatatttaccagcaacggtatgaaaggggaaaggtaacatatcccttaaagatagtgggcaaatgcggtccggaacagcatggcacaaaggtcacctttctgcctgacaaggaaatatttgaggagacagtctatgattacgatactctgaaaatccggctcagggagacagcgttcctgacgaagaacctgaagatcatccttaaggataacagggaagaaaaaaaagaaaaggtattccattatgaaggcggaatcaaggaattcgtcacatacctgaacaagggaaagacccctatctatgatcaggttatttactgtgagggaaccagggaaggcgtgtatgtggaagtgtccatgcagcacaatgattcctataccgagaatatatacacatttgtaaacaacattaatacgcctgagggaggcactcacctcaccggctttaagaatgctctgaccaagaccttcaacgactatgccagggagaaaaagctcttaaaggacagcgaggataacctgtccggcgaggacatacgtgagggcctgacagccatcatcagtgttaagatcgaggatcctcagtttgagggccagacaaaacagaagctgggcaacagcgaggcccgtgcagcggtggataatattgtcagcgagcagctgacctatttccttgagcagaatccggctgtggccaagtccatgtgtgagaaatccatactggcacagagggcccgtgcggctgccagaaaggccagggacttaacgcgccgcaaatcagccctggacggcatggcccttccgggcaaactggctgactgttctgacaaaaatccggaaaactgcgagatttacattgtagagggagattccgcaggcggttccgcaaagacagcacgttcacgtgccactcaggccatacttcccctgcgcggtaaaattctcaacgtggagaaggccagaatggatcgtatttacggcaatgcggaaatcaaggccatgataactgcatttggaacaggtattcatgacgattttgatatatccaaactccgctaccacaaaatcatcatcatgacggatgccgatgtggacggagctcatatcagtacccttcttctgacctttatttacaggtttatgccggagttaatcaaacagggatatgtatatctggcccagccgcctctgtataaggtggagaagaataaaaaggtatggtacgcgtacagtgacgaggagctgaattccatcctcatggacattggacgcgacaacagcaataaaatccagcgttacaaaggtttgggagagatggatgcggagcagctgtgggagacaaccatggatccggagcgcaggatacttctgcgtgtcaccatggatgaggaaaccacgtctgaagtagatttgaccttcaccaccctcatgggcgaccaggtagaacccagaagggaattcattgaggccaacgcgaaaaaggtgaagaacttagatatctgattttagactgcaaacataaaggagattgaatatggaaccaaatgtatttgacaaggttcatgaagtagaccttaagaaaaccatggaacagtcttatatcgactatgccatgagtgttatcagcgccagggccctgcctgatgtcagggacggccttaagcccgtacagaggcgtgtgctttattccatgatagagctgaacaacggtccggataagccgcatcgtaagtgcgcccgtatcgtcggtgatacaatgggtaagtaccatccccatggagacagctccatctacggcgcgctggttaacatggcgcaggagtggtccacccgttatcccctggtggacggacacggaaactttggttctgtggacggcgacggcgcggcagccatgcgttataccgaggcccgcttaagcaagatttccatggaaatgctggcagatatcaataaagataccgtggacttcgtacctaacttcgatgaaaccgagagggagccccttgtccttccttccagataccctaacctgctggtaaacggcacctccggtattgccgttggtatggccaccaacataccgcctcacaatctgagggaaatcatcggcgcggtggtcaagatgattgacaacagggtggaggaggatagggagacctccctggaagaaatcatggagattgtaaagggacctgatttccccactggcgccaccattctgggaagaagaggaatcgaggaagcttaccgcacgggccgcgcgaaaatcaaggtgcgcgccgtgaccaacatagagaccatggccaacggaaagtccagaattattgtgacggaacttccctacatggtaaataaggcacgtctcattgagaaaatcgcagacctggtcaaggaaaagaaaattgacggcattacctacattggagatgagtctaaccgtgaaggcatgcggatcaacatagagctgcgccgggatgtaaatgccaatgtaatcctgaaccagctgttaaagcatacccagcttcaggacaccttcggcgttatcatgctggctctcattaataaccagccaaaggtactgaacctgcaccagatgctggaggagtacctaaagcatcaggaagaggtagttaccagaaggacccagtatgatttaaacaaggcagaagaaagagcccatatattaaagggactgctcattgccctggatcacattgacgaggtaatccgcatcatccgcggatcagctaatgtggcggatgccaagaaccagttgatggagcgcttcgggctttccgacgcacagtcacaggccattgtggatatgaggctccgcgctctcacaggtttggaacgtgagaagctggagaacgagtacagggaacttcaggcaaagatcgaggagttgaaggcaatccttgcagatgagaagaagctgcttaccgttatccgggacgagatcatgatcatctctgataaatacggggatgaccgccgcacggccattggatatgacgacgatatgtccatggaggacctgattccggacgaggataccatcattgctatgacccatctgggttatatcaagcgcatggacgtggataatttcaggagccagaacaggggaggtaagggaatcaagggcatgcagaccattgaggaggactatattgaggaccttctcatgaccaccaaccatcactatatgatgttctttaccaataccggacgcgtataccgtctgaaggcatatgagataccggaggcaggacgtacggccaggggaacggctattataaaccttctgcagctgatgccggaggaaaagattacggccattatccccatgcgtgaattcaacgatgacaaatatctgttcatggctaccaaaaacggcatggtcaagaaaacgcctatggttgagtatgagcatgtgcgcaagaatggacttcaggccattgtgcttcgtgacggcgatgagctgatagaggtaaaggcaacagataatacccaggatatccttcttgtcacacgcaagggaatgtgtatccgtttcaacgagacagacgtaagagtgaccggccgtgtatctataggcgtcatcggaatgcgttttgaggaagatgacgaagtcatcggaatgcagatgcagagccagggagacagccttctggtggtttccgagaacggcatgggcaaacgcactatgattacggaattcagctcccagaacaggggcggaaagggtgttatctgctacaagtgtacggataagacaggttatcttgtaggtgccaagctggtaaatgacggcagggaaatcatgataataacgacagaaggcattattatccgcatgaaggttgacgatatatccgtgattggacgcaatacctccggcgtcaagcttatgagcattaatcaggattctgacatcaaggtggcaagtatagccaaggtaagggaaagcgttaccaaggacagcaatgtatatgatgaagagtattacaaggaagagagcgaagcagatgtagattcagatgaaacggtttaagatttagttccatgaaaaggctgtcagttacgacagcctttttacgaaaagatttaatataatattgccagggagccggactgcatactgcccggtgctgtgtttaacttaaaaaccagcaggttctcttccgcggaagcccttcggcgtctcagggattatgacggtgaacccgtatctccgtcggaattcatacctttggcagaagagaccggccttatcgatgacctgagctggattgtgctggaggagatctgcatgcttttcggacagagtcggggcaaaatagattccgtatccatcaatctttccatgcagcagttcgaggaccgcagtctctccgggagaatccatgaatgtctgaaacggtccggactcagtccggataaactgaaaattgaggttacggaacgggtcctgctccaggacatggactatatgaaaatgattatggaggagatgacaggagaaggatttgggttttatctggatgatttcggtaccggatattccaatatatcctgcgccctgtcccttccccttgagtacatcaagctggacagaagtctacggaaagtccatgcccgaagatgaatttaaggctgccatagcaaaaggatgggaggaacaaagaaaatgagggagatatccgcagcaaccattacaaaagcaataagggatatgtgtattgaggccaattacggactggctccggatatgagaaaggtctttgaaaaagcagtggaggaggaggaatcccctctggggcgccaggttctggaacagcttaaggagaatcttagaattgcgggagaggacagcatacctatttgtcaggatacaggtatggctgtggtattcatgaaaataggacaggatgtacatatcacagggggaagactggctgatgctgtcaatgaaggcgtacgtcagggatatgaacagggatatctccgtaaatccgtggtgggggaccctattgagagaatcaatacaaaggacaatacgccggcggttattcactgtgaaattacagatggggaacagattgacataacagtggctcccaagggatttggaagtgagaatatgagccgtgtattcatgttaaagccggctgatggcctggaaggggtaaaggaatccatccttcaggcagtgagagaggcaggacccaatgcctgtccgcccatggtggtgggggtgggcataggcgggacctttgagaaatgcgcccagatggcaaagcacgccctgaccagggatatagagaataagcctgaaaggcagtgggtcagagagctggaagaggatatgttaaagcgaatcaaccagtccggcatcggtcccggaggactgggaggaagggtgacagcccttgccgtgaacatagagacctttgccacccatattgccggccttccccttgccgtaaacatatgctgccatgtaaaccgtcatgcccgcagagtactgtaaatgagaaaggagtcctgttcagatgaatcggcatataaatgtacccatgacaaaagagaaagctgcctccttaaaggcaggagattatgtatatcttacaggaaccatttatacggccagggatgccgcccataagcggatggacgaggccctggacagaggggaagcactgccgtttgatatagagggcagcatcatatattacatgggaccgtcccctgccagggagggaagacccatcggctctgccggtccaactacagccagccgtatggataagtatacgccccggcttctggatctgggcatgagagctatgataggaaagggaaagagaaacagggatgttatggatgccattgtgcgcggcggggctgtttattttgccgctgtgggaggagcaggagccattttgtccaaatgcattctttcatccgaaattgttgcatatgaagatttaggcacggaggcagtccgcagactgaccattcaggattttccggtggttgtggtaatggatacacttggtaataatctatatgaaacagcagtaaaggaattttgtactctgtagcgaggggatatgaagcggattatatatatggtactcatgaatttactccatgcacccatgtggttcttcaccattgcacgtatggccagggaagaggatacaaggacagccgctgagaagtatgggtatatatcagagatggtaaagaggattaacagaaggggaagggttacggtcactgcaacgggaacagagtatattccgtctgaggatgggtttatactgtttccgaaccatcaggggctgtttgatatgcttgccctgttttcaacctgtccaagacctttatctgttgtaataaagaaagaggcatccaactggattctggtaaagcaggttctgggggctaccaatagccttgccatgaacagggatgatataaaagaccaggtacgcatcataacggaagtcaccaaactggtaaagtcaggccgtaactttgttatatttgcggaaggccaccggagccgcaacggaaacgagatactggattttaagagcggtacatttaaaagcgctgtaaaagcaggctgtcccattgtacctgtggcactgattaattccttccggccctttgatatgaactcattaaaaagggaagaagtgcaggttcactacatgaagcccattctgccggatcaatatatggaaatgaaaacctcagaaatagcacatcttgtgcacgaccggatacaggaagaaataaataaaaatctcacccaaaatggcttgacaagctaaagtctatttagtataatggtcaatgcgtctgagggcaagcatgtctaaagaagcaatcatatggaaaatatcaattcggagaaatactcaagaggccgaagaggcgcccctgctaagggtgtaggtcgggaaaccggcgcgagggttcaaatccctctttctccgctctgttttccaaatgattatttttttcactcttgtttgaaagatgaaaaaaattaaaaagatgttgacagtaaatgacagttgtggtatagttaatacccgctggacaaaaaacagcgtttgacgattgaggaaagccctttggctgaaaacaaaaatcaaaaaaccttaaaaaagttgttgacaaatacgagcgactgtgataagatataaaagttgctgctgaacaagccgacaacaaagaaccttgataattgaagattagacagtatgtaaaaccctgaaaattctaaaagcaaaaggtctggtttaggcctttggatttgagaaaattcagaacaaaaccaagtaatgaaggttaaagataactagccaagctaagtagtctgaaaacctggaatcaacttttgaacatgagagtttgatcctggctcaggatgaacgctggcggcgtgcctaacacatgcaagtcgaacgaagcaattaagatgaagttttcggatggaatcttgattgactgagtggcggacgggtgagtaacgcgtggataacctgcctcacactgggggataacagttagaaatgactgctaataccgcataagcgcacagtgccgcatggcagtgtgtgaaaaactccggtggtgtgagatggatccgcgtctgattagccagttggcggggtaacggcccaccaaagcgacgatcagtagccgacctgagagggtgaccggccacattgggactgagacacggcccaaactcctacgggaggcagcagtggggaatattgcacaatgggcgaaagcctgatgcagcgacgccgcgtgagtgaagaagtatttcggtatgtaaagctctatcagcagggaagaaaatgacggtacctgactaagaagccccggctaactacgtgccagcagccgcggtaatacgtagggggcaagcgttatccggatttactgggtgtaaagggagcgtagacggcgaagcaagtctgaagtgaaaacccagggctcaaccctgggactgctttggaaactgttttgctagagtgtcggagaggtaagtggaattcctagtgtagcggtgaaatgcgtagatattaggaggaacaccagtggcgaaggcggcttactggacgataactgacgttgaggctcgaaagcgtggggagcaaacaggattagataccctggtagtccacgccgtaaacgatgaatgctaggtgttggggggcaaagcccttcggtgccgccgcaaacgcagtaagcattccacctggggagtacgttcgcaagaatgaaactcaaaggaattgacggggacccgcacaagcggtggagcatgtggtttaattcgaagcaacgcgaagaaccttaccaagtcttgacatccccctgacgggccggtaacgcggcctttccttcgggacaggggagacaggtggtgcatggttgtcgtcagctcgtgtcgtgagatgttgggttaagtcccgcaacgagcgcaacccttatccttagtagccagcacgtgaaggtgggcactctagggagactgccagggataacctggaggaaggtggggatgacgtcaaatcatcatgccccttatgatttgggctacacacgtgctacaatggcgtaaacaaagggaagcgagacagtgatgtggagcaaatcccaaaaataacgtcccagttcggactgtagtctgcaacccgactacacgaagctggaatcgctagtaatcgcgaatcagaatgtcgcggtgaatacgttcccgggtcttgtacacaccgcccgtcacaccatgggagtcagcaacgcccgaagtcagtgacccaaccgaaaggagggagctgccgaaggcggggcaggtaactggggtgaagtcgtaacaaggtagccgtatcggaaggtgcggctggatcacctcctttctaaggaagaagaagtaagggttttagatactgtctagtgttcaatgaaaaggacacaaagaaattccggtggcgatgcgcttaggggaaacacccgtacccattccgaacacgatggttaagacttaagcggccgatggtactatgctggagacggcatgggagagcaggtggctgccggattcatcaaaaaaactcactcgaaagagtgttttatatagaacagacatgtttcaatgggtggaggtaaaagcgaaacctgtgttttaaagaacatgttaacctacgtcagcagggaagtgctgttccatatagctggtttttaccagtgattagtggatttgagcaaatcgagttcactaatgactgataaaacatcagtcacatacgtaccttgaaaaccgcatattggataaaaatgaattgaatattcaaaatcagaatatcaagacatccgaggccatacaagagattgtatggaagaaacaaacttgtaaatgcgaaagcgtttataaacaaacctagaaccaaagcgtccaacgctatggacgtgagaggaaccgcagcaacccgccgcggggaatcattttggttaagctataaagagcgcagggtggatgccttggcactaagagccgatgaaagacgtgataagctgcgaaaagcttcggggaggagcaaatatcctttgatccggagatatctgaatggggaaacccggctgagcaaacctcagtcactgcatggtgaatccatagccatgcagggggaacccggtgaactgaaacatctaagtagccggaggaagagaaagaaacatcgattcccaaagtagcggcgagcgaaatgggaagagcccaaaccagcgtgcgtgcatgctggggttaaggactgcgtacgtgaaccgaattgttagtggaactgtctgggaagtcaggccggagagggtgaaagccccgtacacgaaagcaataggaagcagcaggatccagagtaccacgagacacgagaaaccttgtgggaagtaggagggaccaccctccaaggctaaatactccttagtgaccgatagcgcatagtactgtgaaggaaaggtgaaaaggaccccgggaggggagtgaaaaagaacctgaaaccctgtgtttacaagctgtggaagcacgttaaggtgcgaccgcgtactttttgtagaacggtccggcgagttgccggtactggcaaggttaagagcttaaggctcggagccgaagggaaaccaagtctcaaatgggcgtcaagtcagtacaggcagacccgaaaccgggtgacctatccatgtccaggttgaagcggaagtaaaattccgtggaggaccggatccacatccgttgaaaagggtgggaatgaggtgtggataggggagaaattccaatcgaacccggagatagctggttctcctcgaaatagctttagggctagcctcatattagtttagcggaggtagagcactgaattcctaagggggcgtcaaagcttaccaagggatatcaaactccgaatgccgcgtaaatgatgtatgggagtcagactgcacgagataagttgggcagtcaaaagggaaagagcccagacctacagctaaggtcccaaagtgtgtgttaagtggaaaaggatgtgggatttcaaagacaactaggatgttggctcagaagcagccacacattcaaagagtgcgtaatagctcactagtcgagaggtcctgcgccgaaaatgtccggggctgaaacacaacaccgaagcttaggaatgtcgtaagacattggtagaggagcattctcaggacggagaagcggtaccggtaaggagccgtggagtgctgagaagagagaatgccggaatgagtagcgagatggaggtgggaatcctccaggccgaatatccaaggtttccagagtaaagctgatctgctctgggtaagtcggggcctaaggcgaggctgagaggcgtagtcgatggacaacaggttgaaattcctgtaccgtgtatcatcagaactgtggggacacagaaggacagcacatcccgggaatgggaataccggggcaagcgtggtaggagtacggctggaaaaaccgccgtgcaatccgaatacgtgacgcggagcgaacaaaagtagcgaagtgtgtgattccggctgtcaagaaaagccgctatcgtgtgatacatgcccgtaccgtaaaccgacacaggtagatgaggagagaatcctaaggccggcgggagaagcattgttaaggaactcggcaaaatgaccccgtaacttcgggagaaggggtgccgcagagatgtggccgcagagaataggctcaagcaactgtttagcaaaaacacaggtctatgcaaaaccgtaaggtgaggtatatgggctgacgcctgcccggtgctggaaggttaagaggagaggttagcgcaagcgaagctttgaatttaagccccagtaaacggcggccgtaactataacggtcctaaggtagcgaaattccttgtcgggtaagttccgacccgcacgaaaggcgtaatgatttgagcgctgtctcaacaatgcacccggtgaaattgaaataccagtgaagatgctggttacctgcgccaggacggaaagaccccatggagctttactccagtttgatactgggattcggtattgcatgtacaggataggtgggaggctgagaagcatggacgccagtctgtgtggagccaatgttgggataccacccttgcgatattgggtttctaacctgcgcccgtgagccgggcgggggacaatgtcaggcggggagtttgactggggcggtcgcctccgaaagggtatcggaggcgctcaaaggttccctcaggatggttggaaaccatccagagagtgcaaaggcataagggagcttgactgcgagaccgacgggtcgggcaggtacgaaagtaggacttagtgatccggtggtatgaaagtgggattgccatcgctcaacggataaaagctaccctggggataacaggcttatcactcccaagagttcacatcgacggagtggtttggcacctcgatgtcggctcatcgcatcctggggctgtagcaggtcccaagggttgggctgttcgcccattaaagcggtacgcgagctgggttcagaacgtcgtgagacagttcggtccctatccggcgcgggcgcaggatatctgagaggagctgtccttagtacgagaggaccgggatggacagaccgctggtgtatctgttggcctaccaaggccatggcagggtagccaagtctggacgggataaacgctgaaggcatctaagcgtgaagcccccctcaagatgagatatcccatcgcgaaagcgagtaagaccccttgaagacgacgaggtagataggttagaggtggaagtgcagtaatgtacgtagctgactaatactaatcggtcgagggcttatccaaaaggttaagggaaaagttggtttgtgaagcaatcggaattcaatatgcggttttgaaggtatgtatatgcctttaatggcccggtggctcagctggttagagcgccgccctgtcacggcggaggtcgacggttcgaacccgttccgggtcgtttttctttcatatacacgctgaaagagatacctattggggtcttagctcagctgggagagcatctgccttacaagcagagggtcacaggttcgagccctgtaggccccatttaagtattttttacagaaaagtgtatatactaattcaataagggcgaattcccgagtggccaaaggggacagactgtaaatctgctggcaatgccttcggtggttcgaatccaccttcgcccatttaaaatgttggttgacaaaacattttaaaacatttataattatatattagcgcggggtggagcagtctggaagctcgtcgggctcataacccgaaggtcgtaggttcaaatcctgcccccgcaattttttttgtaaaaacttaaaccttatgggcgtgtagctcagtcggtagagcacttgacttttaatcaagttgtcccgggttcgaatcccggcacgctcatcagatgcccagatagctcagttggtagagcagaggactgaaaatcctcgtgtcgttggttcgattccgactttgggcactcagcacttatccttgacggatgggtgcttttttattgtaagatttacttcattgtaaaaaagccgaaagtctgatagtataaataatgttttaagaattaagtatactactaacaaaagataccaggggaaaattaatgagcagacggcgcaaaaaaaaggattcaccaatcaagactgtatttttgattattatggcagctgttattatgacggcagccgtgtatgttgttatgtcagtggttgggaaaatacggtcagattataaaaatctggatttcagtactgagcagaaggagatgccttccattaccatagataccagggaggaaccaaagccaggatggaatgagactgataatggatggatgtattatttggatgaagaagagtacgtgacggaccagtggaaggatatagaggggtttctgtattactttgacagcgacggtatcatggccaccggggtattaaaacaggagggccagacctatacctgccacgatacaaagggctatctgaaggatatccaaattgatttggactacaaacctgagagtacaggagaaaacctggacagcctggtgaggaccaatgcgttctggtgttatctgagggcggaagacgcaggactgtttaagaccatcctgtaccgcaagaccgtagagaacaaggtgatggtactgggaggggagacggcctcggaaaagaccacaaggaattctatgcgtgcttacggcgattacgtatatttcctgcctaaggtaaaggaaagccagaaacagggcctttccgaggctgagagggggctttgcgataagctgtttaggatgaggccgggaagcgataccaaagagctgattgcggagaacgtggacgggtatatggtgatgggggatacaatctattactcccgggccgggaagatttacagcaccacctcaggcaccgaggtggccactggggaagccagatattcggtggtcataaaggatggaaattgttatctggtagatgacatgggcaatcctgcagtggctgaaagcggcagcagtgtcagcattggggaccgtgtttaccggattgaggaagacggaaagataaaatatgtaaaacatggccaggtaactataggaggaaagacgtattatctgagcggcagcggaacaaaatcttctgtcagtgcaaagagcgaagggaacgatactgccattatcagggaaaactatggtgtacagagctattgcattgtggataatcagatttattacagcagttatgtggataaaggtacgggaggagaatggtacagccagatattcaggacggatttgaatggacagaataaacaggcagtgtcggagcgtttccccggtgtgatgcagaatatgtactactacgaggatgagggacagatatttggggaatacaatccggctatctggaaacaggcctatgggacagctgctataatatcaagagacgggaatatttatcagataaatgatacagccgcgcggaccggaaagcatgtggacggaaatgatatgctggaaatcattatggctaaggatggtaaggtcatttgcctgtggcatgattgtgagtgggacagaaacagcggaataaccagtattctgtggagcaaagccattgaactggatgccggtgacaggagcctgattgatatggttccttctgcaaaaacacaggagagcagcgaggcccaggagtcaggggacattattcagccaattgagaccatgcccccttcctctgcggaaactgtttcaccggtggagccttctgtggataatgaccctgtaatcagtacggaagggcctcatacggaaacagctgctcacacgctgccggctccggctcctaccattccgccggtaacggaatcgtccgcagaggtgaagatagtgcccctgggttaaaattggattaagagaagtgttacctgttaacggggttcgtcctcatcaaaatctactatcacataaaaaccccgtgaattttcgcggatgtcttttacgattccgtattcagacttgatacggtaacgggcggcgaagcagccggacatagctacagcagggtcgatgatataactgtagctgctggttccttcccgctcgattatttttactttatcgcctttgttcacaaggccctggcgttccatcttaaattcaatggttctcattgatacctgcttcctttcctacttcatcacataccatattgatatagtcagataaggtgctgttctggcagcctacgatgtagtgattgcaccggttcaccggaatcagtatcttatatgctttactgatgccgatggccgtggccatggcaggcgtaatttcccctaaaagggaattcgccatgacaatgccgatagggccgatgatgatatctgcatcctgagcattgactatggccgggttttcacccgtagcgccataggtggcgcctgccttcagcatggcggaggtggcaatgctgtttgttccgatggcatatgtctccagacttgggaagcgctttttcagctgctcaatgactgactttcccatttttccgccctgtccgtctatgatgacaattttcatggattcaccttcttttcttttgtgctggatatattttaacagaaatgtgggggaaagtaaatgttatccacagatgggtggggaatgagggtgaaattgtggataaagatgaacggaacgatcttatatgggaataaaaagcagtgtaagccggtcttgacaaatcagagtcaggtgatataatcaagattagcaataagaagcaaaggcattgagggaaacagtagtcagtgggaagtatccagagagcaggccggttggtggaaaggccgcataccaaagactgacgaagaccggtcctgagccgcgtcagggatgtccgggcaggtgttactacacaaagaaggatgggaaatggcgccgtaccccgcgttaagggataaatgagtgaaaatcaaggtggaaccgtgtgaatgcacccttggacatatgaatatgtccaggggtttttattttcccgttttttacaggattccggcggcggacatattcagtaggaagcggattccgcagaacagccgaaatcactacagcggccggaatcattacagcagccggagtcatcacagcaggctaataccaaagacatggggccggaaaaggcccgtgaaaagaaaggagatttgtatgaaaattattttaccggacggaagtgtacaggaagcagaggatgagttgagggccatacgccacacagcatcccatgtactggcacaggcagtgaagagattgtatccagacacaaagctggccattggaccggccattgatgacggtttttactatgattttgacagggaaggaggtttcactcctgaggaccttgaaaagttagaggcggagatgaccaggattgtaaaggaaaatctgccggttaagccctttgtactgccaagggctgaggccattaagttcatggaggaaaagggagaaccttataaggtagagcttattgaggacctgccggaggaggagacaatcagcttttaccagcagggcgagtttgtggacctgtgcgcaggaccccatatcatgtatacaaagggcgtaaaggcatttaagcttacaagcatagcaggcgcttactggagaggcagcgagaagaataagatgctgaccaggatatacggaaccgcgtttgccaacaagacggacctggagagctaccttaccatgatggaggaggcaaagaagcgcgaccacaggaagctgggcaaggagctgggcctgttcatgtttgcggaggaagggcctgggttcccattcttccttccaaagggaatgacattaaagaataccctgattgattactggcgtgagattcactgcagggacgggtaccaggaggtttccactcccattatcctgagccgtaagctgtgggagaattcaggccattgggaccattataaggataatatgtataccactgtcattgacgaggaggactatgctgtcaagccaatgaactgtccgggaggaatgctggtttataagaatcagccccactcttaccgcgacctgcctttaaaggtgggcgagctggggctggttcaccgtcatgagaagagcggccagcttcacggtctgatgcgcgtgcgctgctttacccaggatgatgctcatatcttcatgagggatgaccagattgaggaccagattaagggcgtaacaaagctgattaatgaagtgtatacacagtttggctttgagtattttgtggagctgtccaccaggccggaggattccatgggttctgacgaggattgggagatggctacaaacggccttaagaaggcgctggaggacatgggccttgattatattgtcaatgaaggcgacggcgcgttctacggacctaagattgatttccacctgagggattccctgggcagaacatggcagtgcggcaccatccagctggatttccagatgcctcagaggtttgacctggaatatacggctgaggacggctccaagaagcgtcctatcatgattcaccgtgtatgcttcggctccattgagcgtttcatcggtattctgattgagcattttgcaggaaagttcccggtatggctggctcctgtacaggttaaggtaatccctgtttctgagaagtccatggattatgcaaccggggtatatgagaagttaaaggcagccggcatccgcacagagctggaccacaaggacgagaaggtaggctacaagattcgtcaggctcagctggaaaaggttccctatatgctggtcctgggtgaaaaggaagcggcagagggcgcaattacggtgagaagccgtgataagggtgacctgggcgctgcgcagctggatgcgtttattgaagatattaaaaagatgattgagacgaaagagaaataacaactgcaaaaaaaggcgcttaagatagggttctatatgtatcttaagcgcctttaagcatatatgcagttttacgtacggcactgaatggttcttggtaagtacatcatgatgctgaaaagtcggttaataaggaaaagtcatgaatgttggccctataaaaaagcacaaaattatgatttatgatagggagccgtactgccgcgtattttaagagtaggcatcagcactgtctttaggataggactattgtcgccgttaatccggttaatgatacgctctgccacaagctgccccatgatgtcgtaggggtggctgatggtagtcagatcaatcatgcgagtctgtgacatggggacatcatcaaacccaacaatacttaaatcttgtggtattgagattccaagtttcatacattcgtctataacaccgaaagaggtaaggtcgccgcccacaaatacggcagagggcggattttctgaaccggcaataatctttctggcaaattcgtggccggattccatattcagcgtacctgcatatacatggtgtggttccggggtcaggccatattctgacagggcttgcaggtatccttcatacctggcctggctggtggtggatatcttaggacctctgagcatgctgattttccgatggcccagtttaaggaggtgcatggttgccaggtatcctccctggcggttgtccacggatactgtgtcatagctggtgccggaagctaaggttaattccctgttgactaggacgatggggcagtttgactggcctaaaagctccgtaaaagaggcttcatttcttgcgtctgctatgatgatgcctgaaaagccataatcaaaaaggctctgcagatggcgatcgttttcacctgtgttctgggaactgttgtacagagtcataagataccccttttgccgaagatgatcgttgatagaccagacaagctcggaataaaagggattgcggatatccgagacaattaaggcaactatattcagctttcctgtggcaagaccacgggccatgatactgggatgataattcagctccctcatgacctcttggacgcggagcttggtatctttttttacattggatttattggtaagaacccgggatacagttgagcgggatacaccagctacttttgcaatatattcaatatctacttttttttgttccatatattgattcctcattctggtagcagagtcaaagcgatatagatataccatgactgctatatatgattggagtatatcatatttcattgaatagtaaaagatgattttgctaagtatgggagcgatttcatacaggatgtcttatgaaataaatatatctatataaaatgcacaaaaaaataatagtattatgttaaaaaatacccattgacgaaattatgccagtgggtatatattaaaaccacgtaataataatgagagcgctcccatataaaagagtcagagggcagaaaaatgataacaggtaatgaaatatggggaccatccgccacaagagaaatggggatgcggaccatacatggaattgagatgtttacttttttggatatgccagaaaacctgtatgagatgctggcccggacagcggataaataccctgaaaaatgcgggatatatgataactggggccatagtgagacgtatgcatccttgaaacgcagggtagatcaaatggccgcatggctggaaggggaggccggggtaaaaaaagggtcgcacgtaggtatgctgttacacaacagcagggagttttgcgtgaccttttatgcattggcaaaaatgggagcggtttcaataccatttcccactaagtacagggaaccggaattaagagctttggttgagaaagcggatttggatgttttgatatatcatgaacaatttgaagaatgggtacagggctttccgctggaacatgtgaggtgttttcggtcccaggatgaagaaaatggattcggattcaggcatctgctgacagatgagtggataggaagagaatatactccttccagggggaaacttgaagatccaatcatcattatgtttacttccggcacaacatctcagagcaaaggggtggtgttgcgcaattacaacgcggttcatgcaattatgacgtattgcagggtattggatattaagcctggggataagactattataccagtacctatatatcatattactgggctgattgcgctattaggactttttatctatgcgggaggctccttatatctgtaccgcagatatgatgccagacgcatactggagtgtatcagaaaggaagaaattacttttatgcacggctcccctacggtctatggcaagatgatggactttaaggaggagtatccggagcttccgtctttgaaagttatggcctgcggcagcagttatatgccagtagagaagatgaaggagtttcacagatggctgcctgatacgaagtttcaggtgatatatggtatgactgagacatcttctccagcccttatatttccaggagactcgtctgtcagcgagtatgcaggggcggcgggatggcctgtgccaggtattcagttcaaattcctggatgataaggggaaggagcttggtcccggacaggtgggcgaggtttgggtacgtgggagtatggtgctggaacagtattacaagatggaaacagggctcataacctctgaccattggcttaatactggagatatgggatattacaatgaaaaatattacgtgtacatagtggaccgtaaaaaggatatgatcaaccggggcggtgaaaaaatatggtgtacggatattgaggatgaaatacagaggattccaggcgtcaaagaggtggctgtagccggtattcccgatgcggtttatggggaagtcgcagcggccgtggtggtggcgcatcccgggacccgcctgagccgggaacagatacaggatgaactgaaggacagggttgcaaggtacaaaataccccaaaaaattctgtttgtggatgagatacctaaaacgccagggcttaaagtggataaaaagcatattagaacaatgtttggaggataaggatatgattaaagcaaattttgtgacagcccggaaagcagctgccatggtgaaggatggagatacggtctgtaccgtaggtatgactctggtcagcgctagcgagagcatattaaaggctcttgagaaggatttcattgagacagggcacccctgcggtatgacgcttttacattcgtgcggtcagagtgaccgaaaggatggtatccagcactttgcacatgaaggaatgataaagcgcatcatcggttcacactggggacttcagcccaggtggatggaaatgattgctggcaaccaggtggaggcatactgccttccccaggggcagattgctcagctctatcacagcatggcctgtggccttcccggtaagatgtccaaagtggggcttggaaccttcattgatcccagatatgagggcggtaagatgaatgacaggacaaaaccgctggaggatatcattgatattatggagtaccggggagaagagtatatgttttacagggagatccccattgacgtatgcatcatccggggcactgtctgcgatgagatgggtaatctgaccaccacggaggaagctatgaaactggaagtccttccggcagtgctggcagccaaacggtatggcgggaaggtgattgcccaggtcaagcatgtagcccagacggggaccctgaatccaaaggacgtgacagttccgggggtatttatagatgccatcgtggtgtgtgataatccgtgggaggaccatagacagacatcttcctggtattttgacccgtcctactgcggacagcttcgagtccctcagggcaatatagaaccggctctgtttaacgagagaaaatttatagccagaagaggtaccatggaactgtacccgggagctgtaattaaccttggaacaggtatccccaatgatatggtgggaaaggtgtgtaacgaagaaagggtgtcggaagatgtgatgattacggtggagtcaggcatctatggaggcgtgcaggcaggtggtatagattttggtatcggacagaacctgtatgccatgataggacatcatgaacagatggattattataacggtgccggagttgacattacctatatgggtctaggggagctggacgaaatgggaaatgtaaattccactaaaatgggtccgcggtgtacaggggcaggaggttttatcgacataacacagaatgcgaaaaaggtggtctttcttggcacatttactaccggcggagccagataccggtttgagaacggcagactggtgattctggaagagggtaagatacgtaaaatggttaggcaggtggcccagatatcgtttaacggacctttggccagggaaaagaggcagccggtctttattgttacggagcgggctgtatttgaactgagggaggaaggcgtggttcttacggaaatagccccggggattgaccttaagacacaggtgcttgatatgatggattttaaaccgattgtcagcagggaccttaaggagatggataagaggctgtttatccaggatggaccctttggccttaaggaacagatgatacagtgttgacgcacagtttaatgcccggaagcgggattggacaataaaagaagggagtatttttgatatgaaagattttaaggtagcggtgattggagcagggcttatgggaggcggaattgcacagacatgcgcccaggcagggtatgaggtggttaatattgatttctatgcaccagctcttgataaggccaagtctaatattgagaagttgtttgacaggaagatagccaagggaacaatgacagaaggggaaaaggccgagattatggacaggctgacttatagctgcgattttggcgatgtgaaaggtaccggtattgtgattgaagcggttcctgagaaaatggagatcaaaagagatacatttaagaaggtggacgagctggctgatccggataccattattgtgtccaatacatctgcattaagtatatccgaaattgcatccgctaccgggagagcggataaggtgatgggagttcatttcttttatccggcccctgttatgaagttggctgagttaatacggggtatcgcaacatcggatgatacatatgggaaggtcagggcgtttgccattgatattaaaaaggaagtggcagattgtccggagttaccgggctttatagtaaaccgtattctggtgccaatgatgaacgaagcggccttcctggttatggagggatgtaaacctgaggatgtggataatgccatgaaactgggggcaaatcaccctatggggccgttggagctgtgtgactttgtgggggtggatattatgctggctaccatgaccgggttgtataacggcttcagggacagcaaatacagaccgtgtcccatattggagaatatggtgaaggcaggacatctggggcgcaagacgggacagggattctatcagtatatctaacaggaggataatggagatgaacgatatagtaatagtaagcggagtccggacggcagtgggaagctttggaggaagtttaaaggacatatcagcccaggacttgggtgcgctggtcataaaagaggctgttacgcgggcgggtatcagcccggaggcagtggatgaggtaattataggacaggtaggacagattgcagaggatgggtttgtggggagggctgtatccttaaaggcgggacttccccaggagacaacggcttattctgtgaacagacagtgtggttcagggcttcaggccatagctgaggcagtaatggagatacagacagggcaggctgacgtatgtgtggcctgcggtactgagaacatttccagacttccatattatataaaggatgcccggtggggagccagaatgggacataaggtgtttgaggacggagtcatcgacatccttacctggcccctgggcccctaccacaatggcgttaccgctgaaaacgtggcggagcagtatcatgtaagcagggaagagcaggatgcatttgcactggagagccacagaagggctgtgcaagccatcaaggcaggtaagtttaaggatgaaatcgtgccagtagagctgaaggacaggaagggaaatattactatatttgatacggacgaagggccaagggagggcttgactatagagaagcttcagaagctgaaaccatgctttgttaagagcggaaccgtgacggccggaaatgcgtccagcctgaatgacggagctggggctgtggtaattatgtcaggtgaaaaggcaaaggagctgggatgtaagcctctccttacaatcaagggatatgctgtggccggtaatgacggagctgttatgggatatgcaccaaagctttccagcgaaaagctggctgctaaactgggcttggatcttacatccattgatatggttgagattaatgaagcatttgccagccaggcctatgctgtgagaagggatttatggttggatccggagaggacgaatatatatgggggtggaatttcaatcggccatcccattggcgccacgggtgtgattcttgcggttaaggtaatgtatgagcttcagaggacagacaagaaggatgccatggtgagcatgtgtattggcggaggacagggtatatctatgtactttacgaagccgtaataagcgtgatataataaagttccttggtgtgtataggaagggtggaaattatgctattgcctcgggaaaaaagaattctggagatactgtatgcaaaaaaacagggatatacatcttctgaactggctgcagctctgcatatcagcctgcgtacggtaaaaactgatatcaagagaatcagggaggaattagaaaagacgggctgtgagatactcacaaaagcaggaaagggtatatggctgtcctatgacagtcagggaaagaagtacctggacagtcttttgctgggaggtgaatgtgcttcatccatggatccgaaaaccagaaagtattatattgcgcttcaacttttggacagcgatacatatatatccactgaatccatatcaaattccatgtatatcagcaaaggaaccgcgactaacgacattaatgagttgattcctttctttgagaagcagggtctgacactggaaaaaagggtgaaatatggaatacgccttcttggaaaagagagtcagctgcgcattgcaaaggcatctgtaatccgtaagattgtggtgtaccaggggagccaagtatcccggaagctgcagccattttttgaggatttaaatattgaacatattaatgctatcctacaggaggcagaggagcattttggcttcatcctttcagatgcttcctactcggaactgctgatccattgttccattattgtgagaagaatccggaagggaaaagtgtgcgccatagatgagacggagctcagggcatatagtgaaatgaaggaatggggcatctgcgggtttatagcagatgccctggaaaagagcttttctgtccatatgacggaaggagaccgctcttatcttatgatgaatctgctgggtacaaggatgcaggaacatatcccggcagagacatattcctggggggatgatggagcggactccggacagatgctggagcagtgggaggatatactcagacacgccggagatatgtttcgtgagaatctgataggagatgaaacgcttaaaattgccatgtttctgcatttgaaagccatgtttaacagattacagcaccagattcatctggaaaaccccatgaagcgtatggtacgggaagaactggtatatgagtttgaggtagccacctatgtggccaagctcattaaagaggaattccatgcggatctgggtgaagatgaaatatgtgatatcgcgctctatctgggggccagcctggaacgggaacgggccatgagaaaccgccaaagtcctgtggttaccattgtctgcggttccggaatcggtacttcacagttttttgaggcaaagctaggccggatttttccagagatacaggtgagaaagatagtacctatatcaagggccaggtatgagattggaaaggatacgcaggactttgtgctggcaacggttccgctggagctggagggcatagaggtgcttaatgtatctcccatgctgggagagagggacgcccttctgattgaagagcgaattcatccggagcgcagacagttgctgatatcaggaaaagagaagtatccggccttgtttgcactcatgagcgagcgtatatcaatctttaagtgtgactgtcgctcgctggaagaggtaataagccttatgggtcgccgtctgattcacgagaaatacgtaaaagagggattcattgaatctgtgcttaagagggaggaacttgcccctacatctatcggcgacaagtttgcagttccccatgcctttgagggatatgtgctgaaaacaggaatcggtctgatgacacttaaaaaaccaattgtctggggaaatgaaaaggtgcagattatcatgatgctgtccattgatataagagagcaggagcaattcagggagatattttccgaactggcagcaatcacaaaaaataagtgggccattgaacagattcttaacgctgaacgcctcagtgatattaaaataaggaactaaaaaagattcggattgaattccggatctttttttaggtgcgcccggcgggcgcacgttctaacgggtgaaagtccctgacccgcccggcagtgggaagggtgcagccaatggcaagggcgtcatcgtgaggtggggtctgaaggaagccggaggcaaaccactggcctgtaaaagttgtccggataggctgtgaagcgtggatgaggttgcctaacaaactaaagtccaataactgcacggaacgccagcagtaaacggggcaggtataagtgggaaagaacgtgtgagtacccggggaggtctcacggacgtgaaagtggcgataaaacattcgctgtcacggagtaaagcctgccgtgagaagtcagcagaggtcatagtaccgggcggtcgcaaacgcaccgggaaggactgaacagtaggaggtgtcgttaccaaatggaaaccggacatggaattaagtacagacaacttcatattgaggactacctgcgagagatacctgcggaacagggaagggaaacaggagagtacgcccatgaaaggattaccgggaaccccgacaccaacacggactttcggacggacaacctgctagatacgattcttagaagcgacaatctaaatgccgcctataagaaggtcaaaacgaacaaaggcgttggtgggattgacggaatgcaggtggatgaacttctaccctacctgagagaacaccagtccgaattggtcgagcaggtgagggaaggcaaatacaagccaaacccagtccgaagggtagaaatacccaaagaggagaaaggaaaaacaaggaaactggggatacccacggtatgtgttgtgtgcggaagctcaggatattctttcccaggggatagaaaatatcacccccttttggcttccttccctgaatgcaaaatacggatcagtgcctgaacatatgccggctccatttggcatcatccattcctgcccggggatggactggcggcatgccggattgcctgaagcggagtaccaaagctggatgagtcgggttgcagctaatggtgcaaatttgtggcacagccttaccggatttaaagagaccattggtgaccagagacttttacgaaccatcaaagcagtgaaccaggatgccgtccaggtggagatggccatgaatggtgcaaaaagtgctgctcaggttttggtggtatggaatagtaccaaaagcgctgagggatggattggagagcttcttaatacacagatccagtttgatgtagaggatgaaaaacgctttagcgtgcagcgcgcctgccggtatcaagcggttattgtaccgtcaggcggaaaaatgttggaaacaaagaaaagggaactggaggagtgcgtacgcagaggggtcagcctgctgatagaagaacaccgcgcctcctgggcaagggagtcacatgaatttcttggaatcgaggaggaagtacagggaggaggggagctaaaggctgcttattggaggtttgagacagacagccttcggagaaatctggaggagactctattactgccgcaccagggggaaaccctgtattgtacagtaaaggaaagttctgtcactgaagcaaccctggtgccaccctttgctcctttagatgcggtaggagctccgccggaacgggcaagcatcccggtgcaacggacgcagctgcccctgtgtgtgacacataaggagggggatggggcagtgctttatctgccctttgcgtttggttgtcttctgagggagtatggccttcctgatgacttgcggcttttggaaaatatgatagaatgggcattgaaggattctcgtgtatttcgcatggaaccctgtcccggactggaagcggttttgtaccaaacccagaatggagcgctgcttcacttaattaattcagtgggaggacggcctttgatgaagatggtgcctctggtagatgtggagttcaacctactccttcctcctggggtgtcgggtgctgatgtaaaagttcttttgggtcccaaagcggtggttgtccggaataaagagaggatactgacagtctcggctgcaagagtagagacatggagtacatttgagattgtatggaaaaaaatgtttcccattatcggctaatagtatctcaggtatatcaattttatacaaatcactcggattccactctttgccagcagacagaatctggtaaatagcagtgagaatcattcgggcaattgcgataatggctcttttcttatcatttgcttcaatttgtaaaaagcccagagcagacacgagaggagaaaacaaaatggaagattcaattcacaaatattttcaggtaggaaccattcaatggatgagctatccccagggaaatcccatggaatcattgaaggctatttgcaaagatgatttctttgatgctattgagttaaaaggctacggcgataagaatgaggaggcgaaaaggcttctggaacagagccatctgaaggtttgctacggcgcacagccacgtcttctgggcggaaagttaaaccccaacgaccttgacgaggaagggcgcaagaaggcggaagcaacactgatcgaagcagttgatgaggctgaatacctgggtgcaaagggaattgcatttctggcaggtaaatggcagccggagacaaaggagcaggcttatatgcagcttttaaagacaacacgggccgtatgcgattatgccgcagaaaagggcatgatggtggagctggaggtgtttgattacgatatggataaggctgcactcatcggcccggcgccctatgcagcggagttcgccgctgatatgcgcaccacccacagcaactttggacttctggtggatttaagccatttcccaaccacctatgaaacaagccggttcgtaatacgcacactgaggccatatatcacccatttccactttggaaatgcagttgtcgtaaaaggctgcgatggctacggtgacctccatccaagattcggatatcccaacagcgccaatgacacaccgcagttgctggattatctcaaagtcatgaaagaggaaggcttctttgatgcagagaacccttatgtactgtctatggaagtgacattgcatccaggtgaggatgaggatattgtcctggccaataccaagagggtgctgaaccgggcatgggctctgctggaggataacgcatgaagatagtagttctggatggttatacggagaatcccggggaactaaactgggaaaaattggaaaaattaggtgagcttacggtttatgacaggaccagcgtaacggacgaaaatgagattatttcccgtatcggagatgctgaggtggtcatcaccaacaagacaccgatcacaaagaatatcatggatgcatgcccaggaataaaatacatcgccatgctggccaccggctacaatgtggtggattatgtatatgcaagggaaaaagggatccccctttccaatgtgccttcttacggaactgcttccgtgggtcagtttgcaatcgccatgctgctggagctgtgccaccatgtggcccatcacagccagacggtacatgaaggcaaatgggaacactgccaggactggtgctattgggattaccccctgatagagctggacggcaggaccatgggtatcataggtttcggacgaatcggacagcagacgggaaagatcgccaaagccatgggtatgaatatcctggcctatgacaaataccccaatgaatccggaaaagagatggccaaatatgtggatctggatacgctgtacgcgaaatcggatgtcattgcccttcattgcccgctgttccccgaaacacaggggatcatcaacaaggaagccattgcaaaaatgaaggacggggtaataatccttaacaattcccggggtcctctggttgtggagaaggatttggcagacgcactgaattccggcaaggtttccggtgcaggtctggatgtggtatccgcagaaccgattaagggagacaatccgcttctgaaggcaaagaactgcatcattacgcctcatatttcctgggccccaaaggagagcaggaagaggattatggaccatacggtagagaacgtgaaagcatatattgctggctctcctatccatgtggtaaactgataaattactttttgaaggaaaagggatactgatagcataaggacattttactactgatatgctccttggctctttgctgatggttggggtgagatttttatagatttcaccccaattttgtgataagaatcaaaatgtttctattctgtattttgtcatatagcagaaaaaatgcacgattatcgaaggcgcatagatgaaatcccaaaggaaaactagtaaaatcaatttcttagaatgaataatgaaaacaacaggtgggttaggtcgaggtctctttagttctgtgatgatatctattcagccatatgataaatgtttatgacatcgtccttatagagtgttttaaagaaccctacatgtcctcctcctgtggcaacgcatttctctgccatttcctcaatctggtcttcggttggctgaattcccagctcggtcatggatgtaggcatgcccagtctgcggcaccaatcttcccatgcctcaattccctttaaagcggttccctctaaatcgtgaaagtccatgggaacatcaaacacattgacagcaaactgggcgaaacgggccggatttactttataaacataccttgcccagctcccccaaatagcgcaaagcccggctccgtgggcaacgtcaaacatgccgcccatctcatgttcaatcttgtgagaggcaaagtcagatactcggccagtgcctgtgagaccgttgtgggacaggcttccggcccacatgagatcagcccgggcattataattatcaggttccttcatggccagaagagctgcctcacggacagaaaccagcaggccttctgccatgcggtcaataagctctacatgttccgtattagtaaagtagcgttccatggtgtgcatcatgatatcggtggcaccgctggccgtctgatacggcggcagtgtgtaggtcagttccggattcataatggcaaagagaggacgggcacagtcgtggttgtaggaacgtttaagcattccctcctcaatggtgataaccatggagttgcttgtttcagaacctgtggccgcaatggtggaaatacatccaaggggagcaattctgttggtggtaacgcggcccatgagaagatcttctacatcaaaatcattagcaagtccgtatgcaattcccttggcggagtcaatgggacttccgccgccgatagctaaaataaaatcgatgccttcctttctgcagagctgtataccttctttgaccaggccaagtctgggattaggtaccacgccgcccaaatccacatatccgataccacagtcagacaggctcttatggacccggtctagagtaccgttttcatacaggtatgtaccgccgaagtgaatcaaaacttttttaaagcctctgtcctgaatctcttttccaacctcttcttcggttcctttgccgaaaatcacttttgtaggattgtaaaattcaaaattattcatagtatcctttcctccgttttaaaatcaaagctgttggtgtcatctgtttcggacctattatagtatgaaaactgattgatagaataatcaaaagattgcatcttcatggtgcaggaaaatgtcgaattggaaaagagtatgaaaatataccaaataatctgggctgagggggatgataagaaagaaaaacaggtaattatgcatatttatatacgcagtaatattaaaaataatctaaatttgcactatcatggtgcaactaaatggtttttctatggtaaaaatgggtgatatacttaaggtacagtcagacggaggaatgaaactgaggcagaaaaggagcgagaaatacctgagatttactgtcggctgttaattggtaaggaggatggatgatggatttaagcagtatggtaaaccagaaactggttcagtttgaatatcaggcggccagtaaggatgagataatacgttctgttggccagatgatggcagaggctggaattgttaatgataaggaaaagtacatagaggcggtatttaagagggaaacggaatgcgccacgggaatcggaatgggggttgccattcctcattgcaagagtgatgcggtcaatgatgccgcgtttgcattaataaaacttaaaaatcccattgaatggggatccttagatggtgagccggtaaaatttgtgatacagctggcggcgcctgacagcgcagataatgttcatctgcgtatgctttcacaattggccagagatttaatggatgatgattttagagatggtttgctttgcgcctcatccattgaagatattaaaaaatgttttaagaaaggggattaaatatgtatattgtatgcgtaacaagctgtccggtaggaattgcccatacttatatggctgctgctaaccttgaaaaagcagttaaggcaaaggggcacgaagtgaaggttgagactcagggagcccagggcgtggaaaacgagattaccgcggaggatataggacgtgcggatggatgcatcattgcaagtgatgtccgtattaaaaattccggaagattcgaacctgtacccacactgacggtaggtgtaagcgaagcggttaaagatgcaaaagcaatagtagaagaattactggaggcgatttcataatggcagagataaaaagaaaaacaaacacaaagaaaagtcagggaatgtttattaaggattctattatgacaggtatttcttatatgattcctgttattgtaggcgggggtgttctccaggcaatcgccaagatgatgggtggttacgatatcggaagccatatgcaggagattgatacccttgccaaggttattatgttgattggtcagtcactgatgaactttacggtcccggctatcgcggcattcattgcatatgcaatggctgataagccaggtatagcaccaggtcttgcaatgggcgctcttgccaactctattaacaccggtttcgtagggggtgttgtaggcggattgctggtgggatatattgttatcgcatttaaaaaactaaaagtgccaaaggcattatccggtatcatgccgattatgattatacctacatttgcaaccttgatttcaggccttttgatgtattatgtatttggtgtgccgattaaggcatttatgggagcgcttaccggaatgcttttatctttaagcacaggttcaaagtttgtaatgggcgcagtgattggcgcaatgatctgttttgatcatggcggtcccatcaacaagacagccgctctgtttgtaaacggactcaacgcagatggtttcctgattcctacctcagctaaaatgtgtgcaggtatgacggcgcccttgggtattgctcttgcaacggttctgggcggtaagaagaaattcagtccaggtgagcgtgagcaggcgaaatcattggcaatcctgtcctgctgttatgtacaggaaggtgttatcccgttcctgatgaaagatccggtacgagtggctatctcctgcatgacaggtggcgccatcaccggcggtctgtgtatggtgacggcactggaatccccggctgttcacggcggtgcttttgttatcgccatgacttctaatcctcttttgtttatcggactgtggactctgggagcctgtgttaccggcgttctgtatgcgattctcagaaagccgctgccggaaggatatgtggacgaggatatggatagtccgctgctgtaatatagcagctacaataccggaaagaaggaatgtgtaatgtatgtatcaatgaaagaaatgctgtggaatgcccatgagaataactatgcggtcatggccatcaattgtgttaatatggagcaggccaaggctatcatccagtctgcctcagaggaacattccgctgttattatcaatatttccccgaggcaaatgaaagctcatggacatgggaatatcatggctcctatgattaagaacatggcagaaaaggttccggtgccggttgcgtttaatttagaccacggtgccaatctggaggatataacctatgccatggaatgcggattttccagtgtaatgattgattcctccagctacgaattcgaggagaatgtcaggaggaccaaaacagtggcggccttggctcacggtatgggtttgtcctgcgaggcagaactgggccatgtgggaatggcaaaccagtcggataataccagaactgacctttatacaaatccggaacaggcaaaggaattcgtagccagaacccactgcgattgcctggctgttgccatcggtacagcccacggaagctatccaaagggatttgtgccaaaactggactttgaccggctgaggcttctcaaggatactcttaagatgccgctggttcttcacggcggttcaggggcaggggatgaaaatattaaaaaagtagttggatgcggaattaacaaaattaacgtatgtacagatttgtttaagcatgcaagacaggccatggccgatgccattgccgctgatccgtctattgattatatggatgtgtgtatggtagcccaggaagccatgaaggtgtttatcaagagatatatgcggctgataggttccagtgggcgttatacctttgaaaaggaccagggaccggagctggattgaaaaatataatccttaaataagagacaggcaagaattttcgcttacaaacgatgggggtgttgcaaaactagctaatgctagttgcgacactcccttgccatttatgagctgtccattacaaatcggttttcctcaggcatatttattattaccgcaccaggctgccatccgtcctcaccgtcacaacctgccacggtatgaacttcccgctggcctggagtgcgcgtttcgctgcattttcaataccgccgcagcatggaacctccatgcggacaatggtgacatccctgatatcattgagacggatgatttccgtcagcttttcagagtaatccaccatatccagcttcgggcatcctatcagggtgatgcgtccggctataaaatcattgtggaaattgccataagcaaaggcagtacagtcagcggctatcaaaagacgggcatccttaaaatagggggcctggacaggagccagtttaatctgcacaggccactgggacagccggctctccatggaaacggttttttccgggaaaagggttcctgtggagacagtgttttcccttgcttccctggcaatgctccgggaccggcttcccggacatccgctgtgatgaggtgctgcaaatggggaaacggcggaaggggagacattggaggagacaccggcggaagggcagggggctgcgccggatgcattccggccctgggccatgcgggcttttacagctgcctcgtcataggcagcggcctcccgttcctcaaaggtaatggccccggtagggcaggtgggcagacagtctccgaggccgtcacagtaatcatcctttaaaagcctggcttttccatccaccattccgatggctccttcgtggcaggcggcggcacatgcgccgcatccgttgcacaggtcttcatttatcttaataattcttctaatcattcctttatcctccttgttgcaaaacagtaaattgttgttatgctggaagtatactatggataacgggaaatgtatgttgttatgacaacatctcatctgctgatttttaccatattttttaaagcaggcaggacagcgggaaaatgatggcaatggccggaagaatatttaagaccttggtccgcttgatacctgcaattttcaaacccactgccagggtgatgattcccccgcaggccttaaaattagccagcatggtgtcggtgaccagggggagtatgtaagaagcacctccaaacagcaggatacccacggcaaactgaggcacggcaataaagcccaccagaaagccggctgtggtcccgaagataatggctgtaaaaaagtccatgacggccttggcatagaggatggaatggtccccggtcatggctgagttcatggcgccaaataccccggttccgctgaaacagaacaggattatcatactgattaacacatccatctgttcgtcatccagtgtcaggggaagccgttcctccagccggtgaagcccctttagcaggttatcctccaggttcagaagttctcctatgacagttcccacaataagggccagcaccacggcagacagactttttaacatgataataaggctgattcccatggtaatggctgacaggccaaagatattggggagagcttcctttaatttctgaggaaaatggttttttaaaaatgcccccagcacacctcccaggaatacggcaatgcagttggttatgattccatatggcatatgacagttgtctcctttgctgatatttgttccaatgtttacttcgcgggttctcctgtatcaaaattccgctgcattcttaaatatagttcccggaacagttccataaattcctgtaccttttcaggcgggatatcccggaatgtatcctcttccagtctggaaaatgcctctgttactttctgccccatctctttcccgctgccagtcagataaatataaaaagaacgccggtcgccatccgtccgtctccgttcaataagggattttgcctccattccgttgagtacggatgtgagggtggcggcctctatgtgacaggcgtctgcaatctccctctggtttgctccatcatgggccatgagatagtccaggaccttgggctggccgggtgtcaggccggtatggtttagctgggccataagctgctttaaataaatggcatggcctgacattaacagataatgaaaattcatggataaacggaccgcctttcacaataattagaatcctaaccattataattctaactataggcggtgtcaaccgatttccgcatccctgcccttccgcacctctgcgccccctttattcctctgtatcccccctcccagcatcaccccccccgcatcccacctgcagtccttacaatcttcttaattcttattatatatcaatattaatttatcgattatcaataaataaatattgaaaaataatataaacggtgttatattccaattaaggattttgaatagaatttcgagtaaggaaaaagccctccaaggggcacataagcaatacagaaaggtggattgtagtatgaatatgcgtttggtaagatttacaaaggggcttctggacatcatgttttatgtggggatggccataacagtggcgattccggttctttttcattatgtaggcatgtatattgagaagttcaggacctattatgtggtccagtgtgtgctatacatggcatccggggtgctggctcttttgcttgtgctggagctgcggcggatgtttgccactgtgctggcagatgatgcatttgtcatggaaaatgcggcgtccttaaagcgaatgggaaaatacagcttcctcatagccttcctgtccattctgcgtctttttgtggcatttactccggccacagcagtgattattattgttttttcaatagcgggtcttttctgtttcgtgctttgcctggtatttgaacaggcaatacgttacaagcaggaaaatgatttgaccatatagacagggaggattggcatgggaattgtaatcaatttggatgtgatgatggccaggagaaaaaagggcctgaaggaattgtccgcggaagtggacattaccatggcgaatctgtccatcctgaaaaataataaagcaaaggcgatccggttttcaaccctggaggcgatctgtaaggccctggactgccagccgggagacatattaagttatgaaaaagaggaaggagaggacgagaatggaagataagatgtatttgaacgcggcagcccagggggaagtaagcggcagaggggaccggacagaggaaaaattgggcggacgtctgcagcggataggaagggattttggatttttcggggtactcagcatcttttatggcgtaagcgccagtttctgcctttttagaaatcctctggggattacagtccctttgtttgtggcagtgacctatggggcggcatttctgatattcaggaaaatgggagtggtcattaaaaaggattcttatctgctggcagcagtatctctgctgattgggctctccacctgttttacgggaaatatggcagttgggtactatatgaaccggctggccctgattcttttgttctgcatattcatcctacaccagtgtcatcaggataataagtggaatataggaaaatatatggcctccattattctgtatctggctcaggccgtgggtatggttttctatcccttccgccatttaggggaatatatactgtccttgaaggataaacggagccggaatgtgttccggctgctggccggcgcctgtgcggctattccggccgtcatattcctgtgcgtgcttttgtcaggggcggatatggtattcaggaatatgctgtcagttgtcatttcaaagtttctcaatccggttaccctgttcctggtggtgctccagaccatattctggtcactggccatgtactgcctggtttgcagcgcctatgggggaagcatcagtgacggtatggtcaatgtacgcaggcattcgccggtggcagcggtcagcttcatggccatggtaggttttgtgtacctggtattctgcgtcattcagattgtgtacctttttatgggaaagggaagcctgcccctgggaatgacatattcccagtatgccaggcagggatttttccagcttctctttgtggctgtcctgaatcttgtgatggtgctcatgtgccttaagtattttcgtgaacatgccctgttaaacgtttttttgctgttggtcagcctttgtacctatgtgatgctggcatctgccgtgtacaggatggtgctgtatgtgcagcagtatcagctgacatttctcagaatcctggtgctgtggttcctggccatgctgtttgtgctgatggcgggggtggtaattcttatttttaatcacgatttccctttattccggttctgcctggcagtagtatcttccttctatctagtgttcgcgtgggcgcgtccggactatataacggcccgttataatgtatcccacagagacaacattgcccgggaagaacagaatgactttatgcgcctttccacggatgctgcccctgccctggagggaatggcggattctgcgataaaggagcgcctgctgtcctggtatgccggaagatatgaggtatgggatgacggggagccaatgggacttcggacctgcaatttttcagttctgaaagccagatcgtatctcaaaagtcattaaggctgccaggaaaccggcgcaggaggttcatgcagggtacagctataagcagaaaactctgagaatccctctatgaatccgatggtttttcatgtatactatgaaaagaaaaacgcggatgatatggagttgactatatgaaaatagcagtgatgggatacagcggtgcggggaaatccacactggctaagaaactgggcaggctctatgactgccctgttctgtatttggacaggatacaatttgaacccggatggaaagagagggaccgggaggaggcgaagcgtatggcagaggcattcctggacgagaatcaggacacgggctggattattgacggcaactacgcaaaattctgccaggaacggcgtctggaggaagcggacctcatcgttttcatggattataccagaagaatctgcctgtggcaggcagtaaaacggtatttggagtacagagataaaaccagggagagcatggccgaaggctgccgtgagaagattgactgggacttcgtgaaatggattctccgtgacgggcgggatgaagcccacagtcatcagtccattaaagccagatatccgcataagacgctggtggtccgcaatcggaaacagttaaaggacagcatgacaaggctgatattacggagccgtgagaggacattgtgatgaaacaggaagaacttctgattaaccgcctggctgcttatgccggttcggacatgtatcccttccatatgcccgggcataagcgcatgccgggccctatggacagctttgccaatccctggacagtggacataacggagattgacgggtttgataatcttcaccacccggaaggaatcctgagggattccatgaaatgggcggcggatgtctacggggcggaccagacctattatctgattaatggaagtaccagcgggattcttgccgctgtatgcggagcagtacccagaggcggcagaatcctggtgagcaggaactgccataaatccgtgtaccacggaatttatctgaatcagcttaaaacctcctatgtttatccacaggagatagaaggattggggatacagggaggaatcacggcggaagatgtggacaggatgcttaagcggtatatggacacacaggcagtcctcattgtatgccccacctatgacggaatcgtatccgacatagaggccattgcccaaatcgttcacagggcaggacttccgctgattgtggatgaagcccatggagctcatttccggtatgacgccatgtttccggcgtccgcactggacctgggggcagatgtggtgattcagagcgtgcataagacccttcccagcctgacccagacagctctgctccatattaagtgcaaccggccgggcggcggatgctatgctgaccgggagcgcattgaccggtatcttcacatggtacagagcagcagtccttcctatttgctcatggccagcatagaaaacagtatattccagatggaacatatggatatgacgtcctatgggagacagcttcacaagctgcggtcggggctgggtcagatgaggcatctgcgcctggcggatacaggaatcataggacaggcaggaatcaaggacctggatatctctaaaatcgtggtttcaaccaggggaacgtacctggtttcacaggaaaatggagataccggctttaccggcgcccggctggacgatattctgcgcagggaatatcatctggagatggaaatgtgcggagctgattacgtgacagccattacgacggccatggacagctcacagggcctggaacgcctgggggatgcactgacccggattgacagctgtttggcatcccgcggttcggatgcccgcaggaaaaacggcaaagagcctgtcacgggaacggatgataaatcaggtggagaggatatgcacagaggcagtgtatacagtatgcggtgtgacacggccatgtccatgggtgaggccatggacagaaatatgaagtccgttggtctggaggacagcgcagggtgtatttccggggagtttgtttatatctatccgccgggcatacccattgtggctccgggggaatggattagcgggcccaccctggaggtgattctggaatacagggataaggggcttccggtgcagggccctgcggacaagtccctcaggactatccgcatagttcagaaggactgacgggatatcaggaagaatgaaacagaaaaagggacggaacagaaagactgaatgagataagaaagagcagtgtgaatcatgggaaaaatattttatgtcatgggcaagagtgcctccggaaaagataccatatataagaggctccacagcaggatgccggaacttaagacggttaccatgtatacaaccagacccatacgggacggggaacaaaatggggtggagtatttttttgtggaccgttcttatctggaacagtgcaggaaggatggtattttgattgagtgccggacctatgacacggtttacggcccgtggagttattttacagctgacgatgggcagattgatttgaaaacaggcaattatctgattatgggtaccctggaatcctacgggaagatgcgtgcttattatggagaggaggcccttgtcccgctctatatttatgtggaggatggattgaggctgcggcgggctctggaacgggaacagcagcagaccgtgcctaagtataaggaaatgtgcagacgtttcctggcagatgaggaggatttcagcccaagccatctggaagagagcagcataacaaggcagtatgaaaatgtggtgctggaggattgtcttagggagattgtgcaggagattgaggggatttgtcatagggaacaagatataggacagccggaatttcagaatatctgaaaacggtcattataaaatacgtgctgtgaatgccgactggattcggctttcgcagcacgttatttttgtatgaaaaatattacaaaaaaatcactgctttacctggcctcagatactgtgcaccggcttctgaggcctgccagtctggggattttccagattatattcattaatcttattaaacagctgcctggcgctgattcccagcttataggcagtggctgatatgttccaccccatctggtttaagacccactgcaggtactccttctcactgcgacgcttgaattcccgccagggcacgatgcccgcctgggtgaaggagctggaagtactgtcgtcatccgttgtcttcagattatagagaatgggaataccttccgtggtgatgacatggttcttggagaggaccaccattcggtccacatggtttctcagctccctgatgttgcccggataatcataattaataaggaaatcccaggctttctcgtcaatgcggtcgattctgatttgattcactctctgggattcctccaggaagaagtgaatcatgtccaccaaatcctccttcctttccttaagggcggggatgcggatgacaatggtgctgatacggtagaagaaatcctcccggaaggtactgttgcgcaccttggccaccaggtcgcggttggtagctgttatcagccggaaatccagctgtttgctgttgttgccgccgattcgttcaattctctttgtctcaatggcgcgcagcagcttgacctgggtggtcaggttgatgtcgcccacctcgtctaagaacagggtgcctttatccgccagctcaaacttaccggcccggcccttgatggcgcctgtaaacgcgccctgctcatggccaaacagctctgcttccagaagggattccgtataggcattacagttgaccgctatgagcggcatgtcggaacggcggctgcaggcatgtatgtactgggcagccacatccttgccggaaccggattccccaataaggaggacgtttacattggatgctgccacacgttcgcagtcttccaatgccctccggtaggcaggggattttgtgttgaaaaaaaacttttttttcatatcgttttcgtccataagcgggtctcctgtagttagattttcaaattttattaattatgtataaaattgagaaaaaaataacataaaaattgtaaaagaagggaaaaatgaatgacaaaaataaaaagaatccctctctaccccctattatagctgaaatttatttcactatcaagaaaaatagttcacgaaaaaaagaaatttaaaaaaagtaagaagttaaaagaatgacaaaatagacaatatagaaaacctataaaggacggaaaagcaatagaaaaaatgaattttcattggttaaaagataaaaaataaaaaaaatcccactttagaaaaagttggcacgataattgctctattattatgtggaatggaatcctatgcctaataaatttaagaaagattcaaagggtgaaacatcatgtacatcgtagtgacaaacaacatgaagtgcagggacagatatcaggacaaattaaaagtggacttcctggaaaatggttcctacattgatgtgttaatcaaggtgagaaactatatacataaaggttatcgcctggaaacccatcctatggcagggagcctgaagcctaaccagattccttacaaaacaatcataatttccgactctgaggttgaaagagaagaattttaccagtttgagatggtgatggagaacagtattcagtcctgtgagaaattcatgaaggacagacggactcctgattggccggaaaatatactggaagacttcagggacgttgatttatctttgattgaaggagctgtaaaaaaaataatatacaaggaggagtgattagatgaaacttgagttggggttcgttcagattaacgacattcagtttgcatctgaatcaaaagtggaaaacggaactatttatgttaatgcagaagagttaaaggcacttttgttggaagatgagaacctaaagtctgttgagctggagattgcaaaaccaggagagagtgtccgtatcatgccggtaaaggacgtgatcgagccacgtgtaaaagttaacggaggtggaaacttattcccaggcgttatttccaaggtggagacagtgggaagcggaaggaccaacgtattaaaaggttccgcggttgttaccacaggtaagattgttggcttccaggaaggtatcatcgacatgtgcggcgagggagccaagtacacaccattctcccagttaaacaacctggttgttgtatgcgagccaatcgacggacttgcaaagcatgctcatgagaaggctgtcagattcgcaggcctgaaggctgctgattacatcggcaagctggctaaggacgtagagcctgatgaagttaaagtatatgagacctgttccgttaaagagggaattgaaaagtatcctgagcttccaagagtagcttacgtacttatgcttcagagccagggcctgatgcatgatacatatgtatacggcgtagatatgaaacagtccttgccaaccatcttaaacccgaccgaattaatggacggcgctgttttaagcggtaactgcgtatctgcgtgcgacaagaacacaacctatcaccaccttaataaccctgttgtcgcagacttatttgaacagcacggaaagaccctgaactttgtaggtgtcatcatcaccaacgagaacgtataccttgccgacaagatgcgttcttctgactggacatccaagctttgcgagttcttaggcgttgacggcgctatcgtttcccaggagggcttcggtaacccggatactgaccttatcatgaactgcaagaagattgaaggaaaaggcgttaagactgttatcattaccgatgagtacgcaggacgcgacggagcttcccagtccctggcagatgcagatgcaagtgccaatgcggttgttacaggcggaaacgcaaacatggttatcaatttaccggcaatggacaaggtaatcggctatcctgaggtagctgatatcattgcaggcggattcgacggaagcttacatgaagacggctccattgttgctgagcttcaggtaatcacaggagcaacaaatgagatgggcttcaataaattaagtgccagataggaggataagatgtcaaagttaagaattgttcattatattaaccagttcttcgctaacatcggcggcgaggaaaaggctgattaccagccggaattaagagaaggcattgtaggccctggtatggcgttcaaccaggcatttggagatgaggcagaaatcgtggctaccgttatctgcggcgactcctatttcaacgagaacgttgaagctgctaagaagaccattctggatatgatcagcagccagaagccagacgcagttatctgcggaccggcatttaatgcaggacgctacggcgttgcctgcggtaccgttgcactggcagttaaggaagaattaaacattccggttctgacaggtatgtacaaagaaaacccgggcgctgatatgtacaagacaaaagtatatatcgttgagaccaggaacagcgcagccggcatgagaagtgctgttgccaccatggctcctctggcaattaagcttgccaagggtgagaagcttggttcctccaaggaagagggctatatgccaaacggcatccgtgtcaacttcttcgaggacaagagaggctctcagagagcagttgagatgctggttaagaagctggccggcaaggaattcacaaccgagttcccaatgcctgatttcgacagggtagatcctaatccggctgttaaggatatggctcatgcaaaaatcgctttggttacctccggcggtattgtaccaaagggcaatccggaccacatcgagtcctccagtgcttccaagtacggcaagtatgacatagacggtgtcatggacctgacagaggccacatatgagactgctcacggcggatacgacccggtatatgcaaacgaagacgcagacagagtccttcctgttgacgttttaagagaatttgaaaaagaaggaaaaatcggcagcctgcacagatatttctatactacagttggcaacggtacatccgtagctaacgctaagagattcgctgcagagttcgcacaggagctgaggaatgacggggtagacgcggtcattctgacctctacctgaggtacctgtacacgttgcggtgcaacgatggtaaaagaaattgaaagagcaggaatcccagtagttcatattgcaactgtagttccgatttcgctgacagtaggagctaaccgtattgttcctgctatcgctattcctcatcctcttggcaatcctgcattgaccatggaagaagagaaggaaatcaggagacatatactgacaaaggctctgacagcactggagaccccggttacagagcagactgtatttgagtaaactgaaagttcgacatccgtaaaaaagaacattgccgggtccctccaatggtgctaaagttaccatggtatgattcaacaacgttctgaaaatggtgtaattgcacaaaaaaagagtttgcaaactgtttatttgatgataaaatgtaatttgaagcggcattttgtgaaccctgaaattcaattgatgtgtaaggagatattctgatggacaagatttatgatgtcatcattctgggtgcgggtcctagcggacttgcagccggaatctatgcgggaagagcgcgtctggatacgctgctcattgaaaaaggaaaagacggcggccagattgccatcacagacgagattgagaattatcctggacagatggtagacggcgagagcggtccttccctgattgaaagaatgaccaagcaggtcgagaaatttggtgctgagcgtgtctgcgataccattgtcagcgttgatatcgaaggcccggtaaagacactggttggcagcaacggaacttataaggcacgtaccctgatcatcgctaccggcgctttcccaaggccaatcggctgcaagggcgagggcgagttcatgggcaagggcgtttcctactgcgcaacctgcgatgcttccttcttcgagggtctggaggtattcgtagttggcggcggcgattctgctgttgaggaagccatgtacctgacaaagtttgcaagaaaagttactgtcatccatcgccgtgatgaactgcgtgcagcaaaatccatccaggagcgcgcgttcaagaatcctaagctgttcttcatgtgggacacggttgtggaagagcttcacggagacggcatcctttccggcatgactgttaagaatgttaagacaggcgagcttacaagaatcgatgcagacgaagacgacggcctgttcggcgtattcggcttcatcggatacaacccaagaagcgaactgtttgaaggcaagttagagatggaccgcggatacatcaagaccgacgaagacatgcacaccaatgtggaaggcgtgtacgcggttggcgatatccgcgtaaagagcttaagacaggttgttactgctgctgcagacggagcaatcgcttccatgcaggttgagagatggcttgcagagcagaaataagtgattcatagttgagaatagggaggtaataccaatggtagatttaaccaaggacaattttgaagaagaagtattgaaggctgaaggcacagtactggttgatttttatggcgacggatgcgtaccctgcgcggcgcttatgccacatatccatgctatggagggtgattacggcgataagattaaattcacctctttaaacaccaccaaggcacgccgtctggcaatcggacagaagattcttggtcttcctgttatcgctatctacaagggcggcgagaaggttgctgagtgcgttaaggacgatgcaactgttgagaacatcaaggctatgattgaggctaacttataatttgtcctcagataactgcattattttactagcaaccgtcaatactgacgtttgtctatattatggtgccgggctaatacccggcggccaaatcaaataccaaaaataaaacaaggaggaaaacggatatggcaattttgaaagacaaaaaggtcattatcatcggagaccgtgacggtattccgggaccagccatagaagaatgcgtaaagaccgcaggcgctgaagttgtatattcttcaactgaatgcttcgtctgaacggccgctggtgctatggatctggaaaatcagaagagagttaaagatttcgctgagcagtatggcccagagaacattgtagttgttcttggagcagcagagggtgaggcagctggtttagctgcagaaaccgttacagcaggcgatccaacttatgcaggtccgctagcaggagtccagttgggactaagtgtattccatgtttgtgagaacgagatcaaagatgaggttgacagcagcgtttatgacgatcagatcagcatgatggagatggttatggacgttgatgacatcgctaaggagatgtcttccatcagagagcagtattgcaaatatttataattaaaatgtaattcccctggaggctcttcatgggggctccggggggttttgtgtaataaaggggtttttattgcacaactatgctagtactgcattgcgcaagttccagtatgatacatagctgtactttgcagcggccgcgcgaagacggccgcggactgagacttgcgcaacgcagtactagatgtcataaattatggtgaggtgaaggaatgaacggttatgcagttttaaagggtgccagctatacattggcggttacacctgatatggttattcacaatggtacaacacagacaacagagatgattgttaatcctgagtcggaatatttgaaggagcttccaagccaccttagaagttttgaggatgccgttaactatatgccgaaccaggtatatattggcaatgaaaagccacagaaaatggctgaagttggatttccatggtatgacaaattaatggatggggccagcaaggacggcaagtacggagagattatgcctgaggatgagttctacggcctgattcagatctgcgacgtatttgacctggttaaactggaaaagggatttgcagctgacattaaggcaaagctggatgcacatcatatgttcacagacgagcatgtagcaatccttgataagaacagtgagacaacacaggaagaaatcgctgctctggtaaatgacgagcacgcagagccgctgtacttcaacaatgcactggttggcgctgttaagagagctcatgacgtggatgttaacttatccgcacacgttatgttagagaacctggtaacaaaggcttctaatgtattatccttacttaacttggtaaaaaaagcaggagttaatcccgctgacatagattatgttgttgactgctgcgaggaagcctgcggcgatatgaaccagagaggcggcggcaactttgcaaaggcagccgctgaggttgccggatttgttaatgcaaccggttctgacgtaagaggtttctgcgcagggccagctcatgcaatgcttcatgcagctgccctggtaaaggcaggaacattcaagaacgttgtggttacggcaggcggctgtaccgctaaattaggtatgaacggcaaggaccatgtgaagaagggacttccgattctggaagacgctatcgcaggattctccgtattagtaagtgctgacgacggcgtaaacccacagatcagaactgatatcgtaggacgccatacagttggaacaggatccgctcctcagaacgttatatcttccctggtaactaatcctctggatgaggctggtttaaagattgtggatatcgacaagtactctcctgagatgcagaatccggacatcacaaagccggcaggcgcaggcgatgttcctgaggctaactacaagatgattgctgctcttggcgttaagaggggcgaattacagcgcaatgagattgcggatttcgttaaggagcatggtatgaccggctgggctccaacccagggacatattccttcaggcgttccttaccttggacttctgagagacgaaattctggcaggcgagacaaagcgcgccatgattatcggtaagggaagcttattccttggaagaatgaccaatctgttcgacggcgtatccttcgtggttcaggccaacgatggttctgcttcaaaggagagcggcggtgtagatgagagcaaggtaaaggctatgattggccaggccatgagagcgtttgcccagggtctgatgggcgaagaggaataattttcaccgagagaaaggaaataagttatgtctgataagaaaataaaagctatgattgctaatacttttcttgaggtggccgatgctcttgaaacaggacaatatggcaaaaagccggttatcggcttcgcctcagaaggcagcgaacatggccaggataatatagaagaagccatgaaaattgccgagatgaagggacttaaggctgtcctgatcgagggggaagaccttcataagaagatggaagaaatgctggattccggcgagatcgacggcgctgtaaccatgcattatccattccccatcggtgtgtccacagtgggaaaggttatcaccccgggcaagggaaaacctatgtatattgccaccaccacaggtacgtccgacacagaccgtatcagcggcatggttaagaacgcaatctatggaatcattgcggcaaaggctgacggcgtgaaaaacccgaccgtaggcattgccaacattgacggcgcccgccagacagagaaggcacttctcaagctggctgagaacggctatgatattaacttcgcagagtctgtaagggctgacggcggtattgtcatgagaggaaatgacctgttgggaggaactcctgatatcatggttatggattccctgacaggcaacctgatgatgaaggtgttctcatcctacaccacaggcggtaattacgagtccttaggattcggttacggtcccggcgtgggcgagggatatgaccgtctcatcatgatcgtgtcgcgtgcttccggcgcgcctgtcattgcaggagccatggagttcgccaccaacctggtccgccatgactggaagaaggttgctgatgaagaatttgagaaggctaacgaggccggacttaaggatatcatcaatgagctgaagtccgcgggcaggaaggacgcaggcgcggcatccgaggaagtgaagatgcctcctaaggaagtagttacttcacagattccgggtatcgaggtaatggacctggaggacgctgttaaggcgctgtggaaagccggtatctatgctgagagcggcatgggatgcacaggccccatcgtactgatgtctgatgccaacaaggataaggcacatgagattctgaaggcagccggatacgtcagctaaatatataccggtctggctgtacgggcctgatatcataaataaagccattcattcataagttatacatgttccgtacccgcgaaacaacgttttcgcggggcggaaactcagaagaagcttaagttttcgcgataactttttcggaagttacggattgacatacaactgaatacatgatagtatatttaagctaaatgctatccaaaggatatggaggttgataggttgctggtgtgcctcgcggtcttcaaaaccgttgtggggggttaagagccctctgggtgggttcgattcccacctcctccgtttaaaccatatctgtagtggaggtaatatatgatggaagatagaagagagttactccgaaagattccgaagatagacgaggtgctgcaggatgagcgtctctttttttttacggaaagtacgcccagagcagtgattgtggaatcggtcagggaagtcacccaggagttgaggaaggatatcctggaaggcagaaggaatcaggtgggtaccaaggaaacactgatgacagaaatcgtggcccgcattacaggcaagaagaaaaagagcctgcggcgcgtcatcaatgcaacaggggtggtgcttcacaccaacctgggaagggcaaatctatcggacaaggcatgcgagagcatcatggacgtagccaggaactataccaatctggaatatgatgtgaagcgcggctccagaggatcccgccatgaccatgtggagaaaatcctgaccaagattaccggggcggaagccgccatggtggtcaacaacaacgcggcggcaaccatgctctgtctctccgccctggcaaaggacaaggaggtcattgtctccagaggggagctggtggaaatcggcggttccttccgtgtgccggaaatcatggaacagagcggcgccaagctgatggatgtgggaaccacaaacaagactaagccctcggactatctgaacgcctaccacgaaggtgagaccggcgcactgatgaaggtccacacgagtaattacaggatactgggattcacccaggaggtggagcttcctgagatggtggagctgggtaagaaattaaatcttccggttatctacgatatgggaagcggtctcatggctgaccttacagactatggggtggacgagcccacggttctggacgccttaaagaccggcatagacgtgattctgttcagcggggacaagctgttaggcggaccccagggcggtatcatcgcaggaaagaaagagttcattgataaaatgaaggcccatcccctggcaagggcatttcgggtggacaagatgacgctggcggccatggaggctaccttctttgagtattcggatatccgccaggcccgcaggaccataccggtgctgaacatgataaccacgccggccggagagcttaaggacagggcagagaggctggccggggacatccgcagtgcggtccataacttcaccgtggaggtggaggcgtgtaaggaccaggtagggggaggctccgcgcccaccgtgctattggacggatatgcggtggccgttcagggaaaaacattggcgccggaaaagattgagcgccttcttcgcagggaagaaattccaattattgtaaggattacccataaccaggtatatctggatgtgaggaccatcagggaagatgagtttgaatatattgtagcagcgtttaccgcaatggacagcagacaggttgaggggtgatgatatgcagaatgtgatagtgggaacagccggtcatgtggatcacggcaagacatgtctcataaaggcccttacagggacggatacggacaggctgaaggaggagcagaaaaggggaattaccattgagctgggatttgccaacctgcccaatgacgccggaatccatattggaatcatcgatgttccgggccatgagaagtttgtgaaaaacatgctggcaggtattgggggcatcgatctggtgcttctggtggttgctctggatgaaggcgtcatgcctcagaccgtagagcattttgagattcttaagatgctccatatcaaacagggtattgtggtatttaccaaggccgacctggtggatgaggaatgggccgggcttgtaaatgatgatgtggacaacctggttaggggaaccttcatggaaaatgccgaccgcattcaggtatccgcctataccggaaaaaacattgatgtgttaaaacagatgatagtggataaggtaagggctgcaggcgccaggcgtcaggagaaggaattgttccgtctgcctatagaccgtgtatttaccatggaaggattcggcacagttgtcacaggaactcttttggagggctgctgccaggtggggcaggaggtggagctctatcccaccgagagaaccgtcaaaatcagggagatacagacccacggtcacagggtggacatggcctatgccggtcagagaacggccctgaatctggtcaatatcaagaaggacgagattaacaggggagaggttctggctgcccaggattctcttttgaaaagtcagttcatagacgctaaggtacagttgttctcttccacggacagagaactgagaaacggggacagggtccacatcaactatgggtcggcccaggccatatgcaaggcagtgctgcttgacaaggatgtgctgtccgcgggtgaggaggcctatgtgcagttccggtttgacgagcctgtggccgtgaggaggaatgaccggttcatcatccgtttctattctcccaccattacctttggcggaggcatcgtgctggaggcagaggcgttaaagcataagaggaatcatgaggatgtcattgacagccttcgtataaaggagctgggcactgatttagaggtcctggaactggagcttaaggaggagagccggtacttccctgttcctaagatactggctgccaagctcaactggacaaatcaggagacagaggatcagctggaggccctggtcaaggggaagaaggctgtccgtctcagcgatggcagctatattcataaatattactggaatgaaattacccaatacggtacagagcttctgaatcagttccacaaggagaatcctatttccgacggaatggagaaggaagaatttaaaagccgtatactggataatttcaggattcaggagtctaagaaagcagatgtccttttaaatgagatgataaagcgcggcattacggttaccataggcagtgcgattgcggcagccggatttaatgccgaatattcccatgaaataaagggaatgttaaaggagattgaagatacctacttgatggcagggtatgagataccggccacagacgatgtgattaacaagtttaaggataagaaactgtcgaaacagattgtgaatgatttggtaaagaagggcgcattggtaaagataaatcctggtgccatgattcacagggacaattgggaaaaggccatggggcttcttaagaaatactttgaggaccatccaaccatttcactgggagattacagggatctgctgggaacctccaggaagtatgctgttttgttcctggagtactgcgaccagcagaagataacacggaaacaggacgatgtgcgtatccttgtccagaagtcgaggtaggcggatatggaattcagacaattagaagcattcgtaaatgcggtaaagtacaaaagtttttcaaaggcagcggacgcctcctttctgacccagcccacgatcagcgcccatatcaataacctggagaatgagatggggacaacccttgtgaaccggacaggaagggagataaccctgacaaagcagggggagctgttttacccttatgccattgatatgctccataccaggtcgcaggcgctggccacggtacaggcccaatgcgaggcaatggacggtgttctggacgtatatgcatccagcattccgggtcagtactatctgccccggctcataggggagtttcacgccaaatgcccgaaaatccgtttttatgtggagcagtcggacagcaagacagtgattgaagatgtcatgagccagaagggcgagattggactcacaggctataagatgcataacagtctggtatatgagcctgtctttatggatgagctggtgctcattgtgcctgatacggagaagtattcccgatggaagaaggggagtacggtgagcttccgggactttgaacatgagaccttcatccttcgggaggagggctcaggtacaaaacaggagatggaaaaggcggaaattcacggtgtacctgtgtttaaaaacgtggacgtgattgcccggatgaacagtaccgaggctatcaaacaggcagtggccggaggcctgggaatctccatcctgtccaggatggctgccggggaaaaagaaggaacccaccggattaagtactttaagatagacggcctggagaagaaacggactttttacatggtatacagcaaaaacatacgtctttcacccatagcggaagccttccgggaccttgtgattgactacagggacaggaactggcagcaggatatcgggcggtttatgtaagtgtttatgcaggcttgtcctgcacaggattttgcatagaaaatgtctataacaaaaaaagataccatgtttttttgaattggatttgcccctttcactttggtaagatgaaggtagttttaccaaaagaaaaggggatatgattatgaatctgacaagctctaaaaaaacgctgctcctgtccggagtggcactgggaatactggcatgtattctcgcttactttggcaatccaaagaacatggcaatctgcgtggcctgctttatcagggactccgcaggagccatgaagcttcacaccgcggcggtggtgcagtatttcaggcccgaaatcgtgggttttgtctgcggttccttcctgattgccctggctaccagggaataccgttccacggcagggtcgtctcctatgctgcgctttatcctgggtgtcatcatgatgattggctccctggcgtttttgggatgcccgctgcgcatggtaatccgcatggcggcaggtgatttgaatgcgtatgtgggattcatcggatttgcagccggagtatttaccggaacaatcgctttaaagaatggattttcactgggaagggcccacgaaacaggaaagatgaacggggcagtgcttccggttgtcctggcggtgctgtttgtgctgagtctgactaccacattgtttgcgttcagtgaaaaaggtccgggcagcatgcatgcgcctgctcttcttgctttggttgtggccctgctgtttggagccatagcgcagaaatgcaggacctgctttgcgggcagtatccgtgacgtcattttaatgagaaattttgatttgattactgtaatcggcggactgtttgcggtcatgctggtgtttaatctggctacaggcggattcaagctttcctttgcaggacagccggttgcacattcacaacatatctggaatattctgggactttacgccgttggcttcgctgctgtcctggcaggcggatgcccgctgcgccaactggttttagctggccagggttcatctgattccgccgtgacattccttggacttctggtgggagctgctttctgccacaactttggactggccgcatcggcggcagcggcagccaccgcagatacccccgctgcgccgggcggccttgccatggctggtaaggttgcggtgattggatgcattgtcattctgtttatcatcgggtttgtgccaaagtcagaggaagggaaataggaggtaagagatatgtatgaagtggatgcaagaggattatcctgtcctgaacctgtgatgctgaccgcagcagccctcaagaagcacaagggtgagtctgtgaaggtgctggtcagtgaacctcacaccaggatgaatgttgagaaatacgcaaagagccagggtaagacggctacagtaaccgaaaaagggtctgaatttgagattgtgattgaataatacagatgtcccggattcacagcgtgtctgaaccagggcttctgaaaccggatgctgcagtggaaggcagtcaggctgtttgacagcctggtgacagtctgctgcagcatatttttagatacgaaaggatttatgggatgagaaaaaaagaaccaaaattaattattacgtttcataccacggctgaagccattgccatggagaagctttgtaaggaaaaccaaaagtcagggaggatgataccggttcccagggaaatatccgcgggctgcggccttgcctggtgctgtgaacctgacatggaacaggaaatggctgagttcatgaaggaaaagggcatggagcatgaagaaatggtccggctcatgtattgatttagagggcatggctcaacggttgcgattagggcggaaaggaaggcgctatcatgatttattttgacaatgcagctactaccatgagaaaaccggactgtgtcatagatgcagtggcggatgccatgaagaatttcggcaattcgggcagaggagcccacgaggcatccctggacgcgtccaggatgatatacgagaccagggagcgaatctcggaattgtttaacctgggtaatcccctgcaggttgcatttaccagtaattccacggagagcctgaatacggccatccagggcctgttctccgaaggggatcatgtgattaccacggtgctggagcacaattctgtgcttcggcctctttatcttatggaaaaacggggaatcagcctgaccattctgccctgtgatgagcagggagtcctgtgttatgaccggctggaggaaagcatacgtccggagacaaaggcggtggtgtgtacccatgcctccaacctgaccggcaacaggatggatttggaccggattggtgaaatatgcctcaggcacggaatccgcctggtggtagatgcgtcccagacagcgggagtccttcccattgacatgaagaggatgcatatagacgtgctgtgctttactggtcataaggggcttctgggcccccagggaacaggcggtatctgtgtgggggacggcatacacataaggcccctcaagacaggaggaagcggtgttcacacctatttgaaggaacatccccgggacatgcccacggccctggaggcagggaccctgaacggccatggaatcgcaggccttcatgcagcccttggctttataaaggaaaccggggtggaaatcattcaccggcgggaggcagaactgatgcgccgtttttatgacggcgtggtgcagataccgggagtccgggtgtacggcgatttttcttccgatgagagggcggccatcgtggctctgaatatcggagattacgattcctcggaggtcagcgacgaactggctgtcacatacggaatatccacccgccccggcgcccattgtgcgcctctgatgcatgaatcctttaagaccgtggaacagggaatggtgcggttcagcttttcttgctttaatacggaggaagagatagatgccgggattcaggccgtgagggaactggcggcagaggagtagtccgttaagtctggtggtaacaaaagaaacaatgacggtggagggaaaaaaacttttagttgggcaatatacatatataaatattaaaaatatcataaaatatatgcaatagttcagaataacaaaagaaatgtaagaataacaaatggaaaagcgcacagtaaagtcatataatatgactatcggaggtaaaaactcccaatgaatacgtgaactgaaaatatgatataaaaggagaggtgtattatgaagaaacggtttttagcagcttcactggcaacaatgatggttttaagcctggcagcatgcggcggcggtgaaaaggcggccgataccacggcagctcctgcagccacagaggcaccggctgataccaaagcggaggacaaagcagaggagactaaggcagaggcggaagctacaggcgggaaggctcctgaggattataagggaaccgtggtggtatattcgccccatgacgcagatcctctgaatgcaggcgttaacttgttcatggagaagtatcccaatgtcaaggttgaggtagtggcggcaggtaccggcgagctgtgcaaccgtattgcggccgagacagccaatcccatcgcggatgtactgtggggcggaggcgctgactccctggcagccttcaaagaatattttgagccctatgtatgcgctaacgacgaatttataggagctgcttacaaggacccggacggactgtggattggcgagagtccgctgccaatggttattttctataacaaagacttgattgagaaggacggcctgaccattcctgagacatgggaagacctgacaaagcctgagtggaagggcaagattgcgtactgtctgccttccaaatccggttccgcttacacacagttatgtaccatgattctgggccatggcggcaaggaagacggatgggatttcatcaagaaattatatgataacctggacggaaagattgttgactcttcaggcaagtgccataaaatggtggctgacggtgagttctatgtgggactgactctggagaaggccgctgtgcagtacaaggatgacccgtcggtaggatttgtatatcctaaggacggaaccagcgcagtaccggatggcgtggccctggttaagggatgccccaatgaggagaacgctaagctgtttattgatttcgttacatctaaagagtgccagacagagcagagtggaaactggggccgccgtcctgtaagaagcgacatggaagttggcgaaggcatggctaaactggaggacattccgctggttgactatgactttgactgggcagccaatgagaaggaagccatcattgagcatttcaatgacatcatggtagattaacctgtgggagtattgcgtattatatataagcagcagagataagaatcagagtaacacggtgaaaaggctgtccggacccggaagggcgggacagtctttcacgtaaaggatatgattgaatcaggattggaagatgggccgggatacaggcagcgtcagcatataaggaggaaactggtatgagccatggagttatcataaaggacgccgttaagaggtacggtgattttacagcgttaaagggagtgaatctggagataaaacagggcgaattttttacactgttagggccctccggatgcggcaagaccaccttgcttagaatgatagcgggttttaacagcgtggacggcggagaaatccgctttgacgacaaggtcatcaataacctggaggcccacaaaagggatatcggcatggtgttccagaactatgccattttcccccatctgactgtggcagagaatgtggcctatggtttaaaggcaaaaaaatatcccaaagaccagattcccggcaaggtggaggaggcccttgacctggttcagattaagaatctgaaggacagaaagcccaacgagctgtcaggcggtcagcagcagagggtggcccttgcaagggcatttgtcattgagccgggcgtgctgctgatggatgaaccgctgtccaacctggatgcaaagctcagggtgcagatgaggacagtaatcaaaaagctgcagcgccggctggggatcaccactatttatgtgacccatgaccaggaggaggcactggccatctctgaccgtatcgcggttatcaaagagggcgaggtaatgcaggtgggatcccctgagaatatatacaaaaaaccacagaacacttttgtggcaggattcataggggtctccaatttcgtggaatgtgatgtaaacggtgaaaatccggaggcggctgtccttgatatcaagggcgagtgcacgattacatgcagtctgaaggctccctttaagggagagggcatcatttcagccagaccggagcagctgttttttgacgaaaaggagggtctgccgggaaaaatcgtgatatccaccttcctgggagatttcattgaatatgagattgaactggataacggacagaccgtacagctcaacgagtacaccaaggatgtccgggaacttcgcccggacggacagcgggtcaaggttaacttcgatatcaacgcggtaggagtttacgacgcccggacccaggaggtgatttcatggtaaagtcgcaaaaaaagctggacttttggttctgggtcaaggtactggtagtgggattcatgcttattttcctgttttatcccttctgcaccctgattacacgaagcttcttttcaaaaaatgcagccggttttaccctggagaactatatccggttctttacaaaaaagtattattacaacgcccttgggcgaagcctgtttgtgtccgtggtcaccacactcacaacattggtggtgggtgtgcccatcgcttatgtcatgtccagatataatgtggcgggaaagcggttcatccacattttcatcatcatgagccttatgagcccgccctttatcggggcttacagctggattaccctgtttggacgttccggttttatcaccagtctgtttgcaaatatcggcatccatctgccaagcatttacggcaagatgggtattatcatcgtatttacctttaagctgttcccatatgtgtatctgtatacctcaggggccatgggaagcattgattccagcctggaggaggccgcggagaatctgggaagcaataagtttcgcaggctgtggaccattacccttccggtggtgcttccgtccatcgcggctggagccatcatggtattcatgaccagcctggctgatttcggaacccccatgctcatcggcgagggctacatggttcttccggttctggtatacaatgaatacatgagtgagattggcggcaacgcccatctggccagcgcactgtctgttatcatcgtgctctgttccaccacagtgctgctggtgcagaagtattatgtatccagaaagaattacgtcatgacagccatgcgtccgccaaaggaagaggtgcttcgcggattcaagcgtttcctggtcacattccctgtgatgctggttacctttgtgggaatcctgcctcagattgtggtgctcatcaccagctttatcaaatgtgatttcacgggcttccagaaagggttcagcctgggcagctatatcaccatattcaaccgcctgtggaccaacatcaggaatacatttgtattttccacggttgccattgtgttcatcatagcgctgggtatgctgatttcctatatcgtggtccgccagaagggcgtggccgggcagctgatggacctaattattatgtttccgtttgtcattcccggagctgttctcggtatcagcttaattgttgcattcaataagcctccagtgattcttacaggtacggccctgatcatcattatcgcctttgtggtcaggaagctgccctatacggttcggtcgggaagcgccttcctgcagcagatggacccaagtgtggaggaggcgtccatcagtctgggagtgtcgcccatgaagaccttcggcaaggtgaccgccaggctcatggcgcccggcgtcctgtccggagccatcctcagctggattacctgtatcaatgagctgtcatccagcgtcatgctctatggcggcaagacaagtaccatctccgtagccatctatactgaggtggtccgcaacagctatggcaccgcggcggcgctggcgtcgattctgactgtgagtacggttgtcatgctgctgatattcctgaaggtgagcaaaggaaaggtgtcaatcgtgtagtatgtgcaaaagcctgaagcgttttgtggaaaccttcaggcttttatgaggaaaatgaggagaaaacatatggtaaagttcgggacgggcggctggagagccatcatcggggaagaatttacaaaggagaacatacagaagctggcgctggccatatgccttaagatgaaggaagaaggcgtggagaaccagggcgttgtcatggggtatgacaggcggttcctttcaaaggaggccatcatatggtcctgcgaaatatttggaaaccagggaatcagggtgtggttcgtaaaccgcagctcgcctactcccctggtaatgttctatgtgatgaagcatgagctgagctacggcatgatggtgacagccagccataatccggccatctataacggaatcaaggtgtttacatacgggggccgggatgcggatgagagacagacagcggagattgagtattacctggaacaggcagagaagctctatgaacccaatgaggaggaaaacgggcagatgccgcctccatcctacctgaagcttgtaaggcagggcatggtcagggaaatcaatcccatgaacgaatatctggataacatcatttccgtaattaacatggacgccatcaaggagcgtgatttgcgcgttgccattgaccccatgtacggtgtgagcctgactgcgctgagcaccatcctttccgttgcaaggtgcaccatagaaaccattaattccaggcacgacaccctgtttggcggaaagatgccggcgcccacggagcgtactctgcggaatctccagaattatgtgctggaccggtattgtgatatcggcatagccacggacggggatgcggacaggatgggggtcattgatgaccagggacattatctccacgcaaacggcatactggtcatgctctattattacctgctgaaatacaagggatggcggggacctgctgtgcgcaacctggcaaccacccatgtgctggacaaggtggcggagagctttggacagaaatgctacgaggtgccggtgggattcaagcatatatccgcgaaaatgcaggaaacggatgccattataggcggcgagtcctcaggaggactgacggtaaagggacatatacacggaaaggacggcatttatgcggcggcacttctggtggagatgatagctgtcagcggtaagaagctgtcggagattgcggcggatatcaggaaggaatatggagccatccatatggcagagcgggattacaggttcacgcctgaggaaaaggaacgaatccataacatccttatggaggaaaggaaactgccggaaatgccctttgagacagaccatgtttcctatatggacggatgcaaggtatattttaagaacggcggctgggttatcgccagattctcaggtacagagcctttgcttcgcatattctgtgagatggagcatgagccggatacggtcagggtgtgcaatctgtttgaggagtatctgggactgtaggaaacggaccggacagcgggagcggctgtttggggcaggcctgaagaaatatttgaatcagggttaatgaagtcaaatgttaaggggtttaagtattattgtacgatggaggctgcggtttcattggcatgagccagtgggatcgcggccttttttagcaacgaggaatatggagcactgtccatatcctatgcaaccatttccatgatatgctgtttctccggagtgtagattgcggaacatgtaccgcaggcgctgcagcggcggtcatccttattaagagtatcagggaaaatcaggctctggttacaaaaccacaaaccgcacataggtccggtcatcaaaactccggtttccttttacaagcccttttgttcctctgttttcccggaggcactgagggtccttttgcagcagttcatccagggctttctcgctttcagccaaggtgccctttaatacggggtagccgtcgctggacagcacgacctggatttggggcggcaccggatagacggatacatggtgaggctggatggcaaaaccgtcaagcacatcataaccatagggccggtcccggttggccagcaggaactggcggcgcagcagaggaaggatgcaggcccggcccgggtcatggcgggctaattcatcctcggatcttcctaaaataagttcagcctggttatagagacagcggatttccgccatgaggccgtcaatttccttgctgtgggagtgaagggtatctcctataaggcactgacagtccccaaaggcccacacctcctttttctgacagctatacaggatgattactgcctggagccgttcctcagggtggtccctcaggaaatcgcggcggccgccggcggccgttgccagggcctggtttaaatattccattgcagaagcggcgtcaatgccgggctccatggttttaagagcctgtgtcagtatttccctggcatagcgcccgctggtcataggaggaagaaaaccggatccgccctctgacggatccggccatgtaagctctcccttgctggtgacaccgtctatgacagcgataaagtcactgctgataaaaaggccgtcctcgcatgtttgctggtccgggtatttggagcagataaattgttcaatgatttggacttccatattgtttgcctccgtttaacgataattcccgcgttctgtcttaagggtaacacgggacgggaatgatttcaatggcttcgtcaatggaaaagtaggtttttctctggtataatgtagcaaacgggactgattggcattgaggcgccaatgccagggggaggaacggacattaagatgaaagagactgtcatgggtatgaaggcagatgtgaggagtatgaaggcggcttcgagggggatgaaggcggctgtaaggagtataaaagcggcggccgccggcccaggcagggctgccgggggaaaacgaaaattcacattctccatcctgtgccttttctgcacggctgttctttcttcgtgccagtcagggccggagacagctcccatgcctgctgtgccggacctggttctctatacggctcaggaggaagagatatacgaacccatcatcaaggaatttgaggagcgaaccaacctgatggtgaaggtggaacgggggtcctccgaggaaatgacaggcaggctggagtatgaggaggaaaggccggattgggatgtggtgttcggagtgggcatagagacactggaacagtctaaggaacattggcaggtatataaaagtccggaagcagcgtttataacagagagcttccaatgtgaggataaccggtggaccagcttctccgccctgcccctggtcatcatgtacaatacaaatgtggtgacctaccgcgaactgccggtgggatggaacagccttctggagcccaggtggaagggaaggattgcctttgtggacccgcgtaggtctgatgtgtattcggctgcccttgtgacggctgtccatacatgggagaaaaggggggattacctggaacagtttatggaaaatctggaatacggcaccctgaacagcatgcaggaagtaaatgccggtatcctggatgggcggtattcccttggggtcaccatggaggagtccgcccaggctctgctgtcagagggggccgacgtggattatatctatccccaggaggggaccacggcccttccggacggtacggccattgtaaagggatgctcgaatcctgacgctgccaggcagtttctggattttacggtgagcagggatacccagaggattctggtgtctgacttaaaccgccgttccgtgagaagcgatgtgccgccgctgccgggactttctcccattggcaggctgccgttgattgagatggacctggaggagcttaccagggaaaagaaggacgtactggccaggtggaacggcattctgtcccggcgggaagggaggcctgtggaatgaagtggtacaggagactctcttttaaggccagggtattcctgggctgccttctggtggctttggtgccccttacattttcaagtgttgtgatgatgcgtctgtttacagcctcaatcaaccgtcagataaccgtggacggaaaccagcagctggaagaagtcagggaacggtttacccagctgttagagaattgccagaaagcctgtgaaacgctgacagaggacggttccgcggcctgggtcatgattgacaataagaccatagagttccagaaggatttgtatttgtccatgtaccaggcggttcaggagatttacagccatgcgcagttttgcatctacgacgctggcggaaaactgcgttttacgacggatacagcgcctaagagcagccgtctgcctgtgaattggggactgctcaacaaggcgtcggaggaacagggaatcacctattacaggacggacccttacctgccgtcatccggcagcgacgttctgatgcagggtgcattctctctggagagcacccatggtgccagaaccgggtatgtggtgctgaactttaccagggaaaatttcgacaacgtgctgaacggtttttattcgtccggcgatacgctgctggtactggattcccaccaaaagcccctttactgttccaggccggaatacggggagcgtgaaatcagtgatattatagggcacaccatatcgggccagggcgggacggagaaaaagggggtttataccaaatatctgtggaccagggaaccttcccagggcttctacatcctgctgcgctgttcggcacccatcagcgccccggccgtgcgcaccatgggtacggttagccttgcgctgtccggcctgggactggtgctctgcctcctcatagcaggcgcgttgtcccggagcatcggccagccggtgagcctgttggacaaggccatggcaaaggtgaagaagggggatttgtccatccgcatccgcaccaaccgtcaggatgaactgggcaggctgacagaaagctttaaccagatgaccggggaccttcagaagtacctggatgatacggtgcagaagcagaaggatttaaataagaccaccctcaggctgtatcagacccagctgaatccccatttcctctataataccctggattccatcaaatggagcgccaggatcaaccaggtgcctgagattgcggtgctggcggaaaatctggctgtcatcctgagaaagagcatatccagccggcccttcatcaccctgagggaggagttggagaccatcgagagctatgtggagatacagaaaatacgttttacaggacggttcctgtatgagacagagataccggatcagctggaggactgtatggtgcccaagatgatattgcagcccctggttgagaacgccatcatccatgggctggaaggatgcgagcacggctacatctgcatttacgcgttccagaaagagggaatactgaacatatcggtgactgacgacggatgcggcatgagccgggggatggcggactggattaacagcggcgctccggcaaagagggacggccatctgggattatacaatgttatcaacatattgaaaatatattacggacaggagtatggtatgaaggcagctgtcacggaggatgggactaccgtcaccctcaggctgccggttcagaaggaggtaccggatgtataaagtcattgtggtggaagacgagacaatggtcaggcgggggattatcctgaccattgactgggcggccctggactgtgtgattgcaggggaggctgcgaacggggaggaaggggcagagctggcggtccgcctgtccccggatataattgtgacggatgtgaagatgcccagaatggacggcgtggagatgataacaaaactgcgggaacagggctgccgcgccaaatttattatcctgaccgcctacagcgattttaaatacgcccagagcgccctgaggctgggagtcagcgattatctactgaagcctttgagggacggagatttggaacatgcggtggggcacatcagagagcggatggaagaacgcccgccaagggaggaggaaacagacgctgccccggtcctgcgctttcattccgataaaaaatccaagaacaagtatgtggaggcggccacccggtatatcagggaacattaccgggaagatatcaccatcagtaccgtagccgcttttctggaaatcagcgagggatacttaagcagagtctttaagaaggaaaccgactacacctttaccaactatctggcctattaccggatgcagatggccatgaacctgttaaaggactgcagggtaaaggtatacgaggtggcggaccaggtgggatattcagatacagcctatttcagcgcgcagtttaagaagatactgggggtatcaccgtcggagtatcaggacaggtgcagatagctgcaacagtccggacaggttataataaacagggaaagcagggaaaaatgtagtactatacattgaaaaattcttatgctatacttattgaggatgtctgtccctgccgggatggaggtccggatataccggtttagggcattttcaggatttttggaaaccaggccggcagcgtaagggggaaccaatcactatgttgggatttaacgatatattaggacatgaacaaataaaggaacatttccgcaacgcagtgcagacagggaaggtttcccatgcttatatactgagcggcgaggcaggcatgggaaggaaatccctggctaacgcatttgccctcagcctgctttgcgagaaggggacggcaaagccctgtatgcagtgccatgcctgcaggcaggtactttccggaaaccacccggatcttatttacgtgacacatgaaaagcccgccagcatcggcgtggacgatataagggagcagattaatgataccatccaggtacgtccctacagcagttattataagatatatatagtggatgaggcggagaagatgaccgtacaggcgcagaatgcccttcttaagaccattgaagagccccctgcctatgcagttatcctgcttttgaccaccaatcaggacgcgttcctgcccaccatcctgtcaaggtgtgtgcagcttaagctgaagcccttaaaggattctgtggtgaaggaatatctggttcagtctctgggagaaaatgagagcgaggctgatatttatgccgcttttgccaggggcaatctgggcaaggccatccatctggcccggtcagaggcgtttggggtgatgtacagggagatgctccatctcctgaagcacatcaaggatacggatatatccgggcttttagactacatccacaaggttaaggaggagaacctggatatccgggaatgcctggactttatgcagatgtggtacagggatatcctgatgtataaaaccacaaaggatattaacctgctgatattcaaggatgaattctccgctgtcaagagtatcagcaccacaagcggctatgacggtctggagaaaattctggaagccattgacaaggccagaatcaggctggacgccaacgtgaacaccgaactggtcatggagctgatgcttcttaccatgaaggagaattagaacgtgtcagggctgtaagagaaggagaacacagaatgattacagtaatcggggtgcgcttccgcaccgcaggaaagatatattattttgaccccgcaggccgccggattaaaacaggcgaccacgtcatcgtggagacggccaggggcattgaatacgggtatgtggtcctgggaaaccgggaagtggatgaatccaaggtggtcccgcccttaaaatcagttatccgcatggcgacggatgaggatgaggcggcagaggccaggaacaagcagaaggaaagggatgcctttaaaatctgccaggaaaaaatcaaaaagcatcacctggagatgaagctcattgacgccgaatacacatttgacaacaacaaggtgctgttttactttactgccgacggcagaattgatttcagggagctggtgaaggacctggccagcgtgtttaagaccaggattgagctgcgccaggtaggagtcagggacgagactaaaattatgggaggcatcggcatctgcggaagggcgctttgctgccattcctatctgtctgaattcattcctgtgtccatcaagatggcaaaggaacagaacctctccctgaatcccaccaagatatcaggtgtgtgcggacgccttatgtgctgccttaaaaatgaagaggaaacatacgaggtgttaaacagcaagcttcccaatccgggagactatgtgaccacaagcgacgggttaaagggcgaggtacacagcgtcaacgtgctgcgccagcaggttaaggtcattgtgaccgtggaacgggacgagaaagaaatcagggaatacaaggtggaccagctcaagttcaagcccaggaaaaagaagggcaaaggcggcggggaaaagcacggaggcgacacgccggacgcagagcttaaacagctggaagcccttgagaagaaggaaggaaagtcgaagctggatgacaactgatacagttacggtgaaacacacttggcgtcaggaaggtaccatcatgctgcgggacgacgagcggatcgatgatttgcagcgcaaccattacggaattatccagaggaagggcgcattctgctttggcatggacgccgtccttctgtccggcttcgccgttgtgaaaaagggggaaaaggtgctggacctgggaacaggcacgggcatcatccccatcctcctgacggctaagactgagggaagccactttaccggtctggagatacaggaagagtcggcggacatggccaggcggagtgtggcatataatcatctggaaggcaaggtagacatcgtcaccggcgatttagtggaggccagcaggttatttgcactggcttcttttgatgtggtaacagccaatcccccttatatgaatgaatcccatgggcttaagaatcccggggatgccaaggccattgcccgccatgaggtgaagtgtacgctggaggatgtggtgagggagggaacccgggtactgaagccgggaggccgtttctgcatggtccacaggcccagacggctgattgaaattattactgtcatgaagcgccatggcctggagccaaagcgcatgaagatggttcacccttatgcggaccgggaggccaacatggtgctcatagaggccgtgaggggaggcggtcctctccttaagatggaagccccggtcattgtctttgatcagaacggggagtattcacgggagatacggaccacctacggatattgacggattatcagacttatgagggaaagcgtctaaaaaaacagacgcaaagcgcccaatggatagaagggagaggctcatggcaggaacactttatctctgcgccacgccaatcggcaatttggaggatattaccttcagggtactcaggacattaaaggaagtggatttgattgcggcagaggatacacgccacagcatcaagcttctgaatcattttgatataaaaacgcccatgaccagctaccacgagtataacaaggtggacaaggccagatacctggtgggccggctggaggaaggggtgaacatagccctgattacggacgcgggcacccccggtatatcggatccgggagaggagctggtaaggcagtgctatgaggcgggaatccaggtcacctccctacccggtccggcagcgtgtatcacggccctcaccatgtcggggctttccaccaggagattctgctttgaggcctttcttccctctgagaagggggataaaaaggagcgtgccagaatcctggaggagctgaagcgggagaccaggaccattatcgtgtatgaggcgccccaccatctggcgagaacccttgaagatttatataaagtccttggagacaggaacataaccatatgcagggagcttacgaaaaaatatgagacagcctgcaggaccacgttccgggaatccctggaacgctgccgtgaggaagagcctagaggtgagtgtgtcatagtaatagaaggaaagccgctggaagagctgcgaaaggagcagataagccgctgggaggagatggaaatccaggagcatctggcctgctatacggaccagggcatggataagaaggaagccatgaaggccgtggcaagggaccggggaatcacaaagcgggatgtgtaccagaaacttctgtaaatggacgcaagagcataagatatagaaagaacctgcggcttatgtgccttctgatgttgagaaggagccgcaggttctctctatgtacgtgttttgattactcggtgacattaaggccggctaacttagccagcgcaacaacggactgacgggatactttcttgccctcatattccagcaaatcgtcagtgcttccggtgaagatgtcagcacattctgccttcttcaggataatgcagtcatcctgaaccgtaatttcaagaccatctttcacatccaaatcaaggcttcttcttaattcgatgggaagggtgattctgccgagttcatccaatttacggataacacctgtagttttcatggttaatacccccttgtgaaatgtattcgccccatttgtacaagtctaacttaccaaattcagggagcaaagtcaatatatgtaaatgtcagaattggtaagaaatgtaagagaacagtaaagttaacaaaaagcgacaaaaatatttcttgacaaatacttacgtttcctgtagtattactttgatgttcaaagtatttcctctgagcaagcaaaagaaggaaggcaggagtccgctgattgctgatggattcgggatgggtaagaagaatgacaacaagaatcgtaggaaccggttcctatgtaccggagcagattgtgaccaatgacgaccttgcaaagattgtggagaccaacgacgagtggatccgcagccggacggggataggggcgagaaggattgccacaaacgaaagtacctcctatatggcggctgaagcctcagtcaatgcgctggagaatgcaggtgtaaaacctgaggaaatagaccttatactgctggctacctcatcgccggattactgttttcccaatggggcatgtgaggtacagggcaggataggcgcgataaacgcggcctgctttgacataagcgcggcctgcaccggttttgtctacgcgctgaacacagcccatgcgttcataagcagcggcatctataaaacggccttggtgattggcgcggatgtgctcagcaagctgattgactggacggaccggggaacctgtgtgttatttggagacggcgcgggcgcagtggtggtaaaggccgatgaaaccggtattctgggaatgaacatgcactcagacggaacaaaaggcggagtgctgacctgcggttccaggaccaatggaaatttcctcctgggcaagaagccggagctgggatatatgaccatggacggccaggaagtattcaaattcgcagtaaaaaaggtaccccagtgtatcaccgaggtgctggaagacacaggagtgaaggcggaggacgtcaggtactttgcaatccatcaggccaattaccggatcattgaatccatagcaaaacgcctgaaggtaaatgtggaccgtttcccggtcaacatggaacactatggcaatacatcaggggcatcggttcccatcctgttagatgagatgaaccggaagggaatgctttcagccggagataaagtggtgctgtccggattcggtgcgggccttacctggggtgcggcactgttggagtggtaaaaataaaattataatataaattaagaaaatgtaaaaggagaacaacaaccatgttagagaaaatgaaagaaattattgcagagcagttaagcgtagaggcagactctgttacagaggcttcctccttcaaagaagatttaggcgctgattccttagacctgttcgagctggttatggctcttgaggatgagtactccgtagagattcctgctgaggacttagagcagttaaccactgtgggcgaggttatgaactacttaaaaggcaagggcgtagaggcataaatagcagatagggtttgacaacggcgtgtggatgaattgaagcacgctgttactttaataggggagaacccaggaaatgtagaactggaggtagaacaatgaaaacaagaattacagaaatgttaggaattgaatatcctattattcagggcggcatggcctgggtagcagaacacaacctggcagctgccgtatccgaggcaggcggtttcggactgattggcggtgctaacgcacctggggaagtggtgcgcgacgagattcgcaaggccagggagctgacagataagccttttggcgttaatgtcatgctgctgagtccccatgcggacgatgtggcaaaggtggttgtggaggaaggcatcaaggtggttaccaccggcgccggaaaccccgaaaaatatatggaaatgtggaaggcagcgggcattaaggtgattcccgtggttgcaagcgtggccctggcccgccgtatggagaagtatggggcggacgcagtggtggctgagggcatggagtccggcggccatataggagagcagaccaccatgactctggttccccaggtagcggacgctgtttccattccggttatcgcggcaggcggtatcggagacggaagaggaatggccgcggcttttatgctgggcgctgaggcagtccagatgggaaccaggtttgtggttgccaaagagtccattgtacatgaaaattataagcagcgcattatcaaggccaaggacattgattccacggttacaggacgcagccacggccatcctgtaagaggactcaggaaccagatgaccagggaatacatcaagctggagcaggagggcaagtcctttgaggagctggagtacctgactctgggaaccctgcgcaaggcagtcatggaaggcgatgtaaacaggggaaccgttatggccggacagattgcaggtatgatatccaaggagcagacctgcaaggagatgattgaggaaatcatggcgcaggcaggaaaattgatgcattggaattagggacctgggacgcaggcgccggattggatggaaacaaacaggatttaggataaggagattacaggtatgagcaagattgcatttattttccctggacagggagcccaggcctgcggaatgggtaaggatttctatgagcagactgagaccggaaaaagaatctttgacaaggcgacacagttaatgggattttccatgccccagctgtgctttgaggaaaatgacaggctggatatcacggaatacacccaggcagccatggtaaccgccagcatcgccatgatgcgtgttctggaagaaaatggaatcaagccggatgtggcggcgggactcagccttggagaatactgcgccctggcagcggccggagtcatgagtgatgaggatgccatccggacggtccgccagaggggaatacttatgcaggaggctgtacctgtgggcgagggcgccatggcagccattctggccctggacgcggcagtgattgaagaagtgacaggagccatggaaggcgtgtggattgccaattataactgtccgggacagattgtaatttccggtgagaaggcagctgtggaagaagcgtgtgagaagttaaaggcagccggggcaaagagggcagtgatgttaaatgtcagcggccccttccattccggtatgctgacagccgcaggcgaaaagctgggacaggtcctttcccgggtggagcttcatgagccccggattccttatgtggccaatgtgacggcacagtatgtaaagagcgccggagaggtgaaggaactgcttacaaggcaggtttcatcctcagtcagatggcagcagagcgtggaggccatgattggggacggcgtggacaccttcatcgagattggccccggtaagaccctggccggtttcatgaggaagataagccgggacgtgaagaccctcaatgtggaaaaattagaagatatcggtaaagcagtggaagcacttaaatcataagcaggaggagagaccatatgctggaaggaaagattgcactggtaacaggcgcaagccgcggaatcggccgtcagattgcccttacactgggccgggaaggcgcagccgtaatcgtaaattataatggctctgcggcaaaggcagaggaagtagtgaaggaaatcgaagcagcaggaggcagggcagaggcggttcagtgcaatgtttccgattttgagagctgcggcaggatgatggcggacgtggtttccaggtatggccgtctggatatcctggtgaacaacgcgggaatcaccagggacaacctgctcatgaagatgtcagaggaagatttcgacgctgtcatcagcactaacctgaagggcgtatttaactgcatcaagcacatttcccgccagatgttaaagcagaaggcaggaagaatcatcaacatctcctccgtatcaggggttctgggcaacgcgggccaggccaattactgcgcggccaaggccggcgtcatcggcatcaccaaatcagctgccagggagctggccagcaggggaattacggtgaatgcggtggctcctggtttcattgccacggagatgaccgatgttctcagtgacagcgtaaaggcagctgccacggagcagattccaatgaaacatttcggaagcacgcaggacattgcagagacagttgctttcctggcttccgataaggcaggatatatcacaggccaggtcttaagcgtagacggcggaatggccatgtaggatgccccggaatacgttccgggctgtaaaagaacaggagtgagattagtatgaaaacaagagtagtagtaaccggcatgggcgccattactcccattggaaatgatgtggagagcttctggcagggacttaaggataagacagttggaatcggccccattacttattttgacacaaccgaatataagtgcaagctggccgcggaggtaaagggatttgaccccaaacagtacatggatgccaaggcagcccgccgtatggaggcattttcacagtttgcggtggctgcctccaaggaagctctggagcagtccggcattgatatggagaaggaggatccctaccgcgtaggcgtgtgcgtgggatccggcatcggctctctccaggccatggaaaaggatgtgaagaagcttaacgagaagggacccagccgtgtgaatccccttctggttcccctcatgataagcaacatggcagcaggcaatgttgccatccagttcggacttaagggaaaatgcttcaacgtggtaactgcatgcgcaaccggaacccattccatcggtgaggcattccgttccattcagtacggcgaggcggatgtgatggtggccggcggagcagaggccagcattacgccaatcggcattgcgggatttacctcccttacagctctgaacaccacagaggacgcttccagggcatccatcccctttgacgaggacaggaatggttttgttatgggcgagggagcaggcgtggtagtgctggagtccctggaacacgcaaaggccagaggagccaatatcctggcagaggtagtgggatacggcgccacctgtgacgcattccacatcacttccccggcagaggacggaagcggcgctgcccgtgccatggagaacgccatgaaggatgcaggcatcacggcggaggatattgactatgtcaatgcccacggcaccagcacccatcacaatgatttgtttgagacaaaggccatcaagctggctttgggagaccatgcggaaaaggtgaagatcaactccaccaaatccatgattggccatctcctgggagcagcaggcggcgtggagtttatcacctgtgtgaagtccatccaggatggatttgtccatgccacagcaggacttaagaagccgggagagggctgcgatctggattacaccatgggcgacggcgtatccatgaacgtggatgtggccatcagtaattccctgggatttggcggacataatgccagcctgattgttaaaaagttcagcgaataataggaggccatgagctatgaacgtagatgaaatcataaaattgatgcaggcagtttccgaaaacgggctgaccagcctggagttaaaggaaggggagcttaagctttcgctgaagcgtgaaaaagagatgcctcaaattgtgacggtaagcgctccttccgcagacgcggtgtccatgcagatggcagctgtgcagaacggcctggcaggcccgtccatgatgtccccggccatgatgccccagggcgtgatgacgcctcaggcagcccgggatacggcttccggcgctgatatcggttcagacaaggtagttacctcccccttagtgggaaccttctacaatgcctcctcaccggatgcagcaccctttgtacaggcgggagataccgtgaaaaagggccaggtactgggaattatcgaagccatgaagctgatgaatgagattgagagcgaatacgacggcgtagtggaagctgtccttgtgaacaacgaggaagtggtggaatacggccagccattgttccgcatcaaataacatcaaaagacggagggatttagggatatgttgatgggagttaaagaaatccaggaaatcataccgcacaggcatcctttcctgctggtggactgtatcgaggagctggaaccgggcgtgcgcgccgttggctataaatgcgtgacctatgatgagtcatttttcaagggacactttccccaggagccggtcatgccgggcgtgctgctgattgaggccctggcccagacaggggcagtcgccattctgtcccaggaagggttcaagggaaaggtggcttattttggcggcatcgaaaaggccaagttcaaacgcaaggtagtgccgggcgacaaggtaaagctggaatgcgaaatcatcaagcagaagggaccggttggcgtgggcaaggccaccgcaacggttgacggaaagctggcggtgagcgcagagcttacattcatggtaggttagggaatcgagggagaatgccgatgtttaacaagattttgattgccaatagaggtgagattgcggtccgcgttatccgggcctgccgtgagatgggaattcagaccgtggccgtatattccgaggctgacagggactgtcttcacaccatgctggctgacgaggccatctgtatcgggccggcgccgtccacggacagttatctgaatattgagaggattctggctgcaacggtggccatgaaggcggacgccatccatccgggattcggcttcctgtctgagaatgccaggtttgccaagctgtgcgccgagtgcaatattgcgtttatcggacccagcgcggaaatcatcaataagatgggcaataaatccgaagcccgaaagaccatgatggaagccggggtgcctgtggtgcctggcagcagggaaccggtgcacacggctgaggacggtctggctatggcaaaagaaaccggcttcccggtgatgattaaggcatcatccggcggcggcggtaagggcatgaggatttccagaagccaggaggactttacggagctgttcaacgcggctcagatggaatcggttaagggattttccgacgacaccatgtatattgagaaatacattgaaaagccaaggcatgtggaattccaaatcatggccgacaagcacggcaatgtggtacatctgggagagcgtgactgctccatccagagacgccaccagaaggtgctggaggaagccccctgtgatgtgatttcccccggcctgcgaaaagccatgggcgacaccgctgtaaaggcagccaaggcagtgggatatgagaacgcgggaaccattgaattccttctggataaggataagaacttctatttcatggagatgaataccaggattcaggttgagcatcctgttactgagatggtcacgggaatggacctgattaaggagcaaatccgggtggcggcaggggaaaccttaagcgtcagccaggaggatgtgaggattgaaggccatgccattgagtgccgtatcaatgccgagaatccggctaagaactttatgccctgtccgggacgcatcaccaatgttcacattcccggaggcaacggagtccgtgtggacactcatatttacaatgattataaggtgcctgcaaactatgactccatgctgatgaagctgatagtgtatgacaaggaccgggaggcagccatctccaagatgcgcagcgccctgggtgaggtaatcatagagggaattgagacaaatatcaacttccagtacgaaatcctggaaaatgatgcattccagcagggagatacagataccagctttattgagaagcatttcccggactatgtgcggtgattttgcttccctggcggaaaggaaactttgacgatactaagctcgaaaagaccttgctgagtattgcgaagttctttcccgcgtaaacgcctggaggacaggcgctaagcgctcaatgcaagtgctcaatgcagaaaggaaattgcaatgttgcggaacatgttcaaaaaaacgtatacgaaaatagatacgaaatataagccccaggccggttccgaccaggagccggtaatcccggaaggattatggcgcaaatgtaacaagtgcgggcagccaatctatgtggaagacgtaaagaacaattactacgtatgtcccaagtgcaacggctatttccgtgttcatgcataccgccgtatcgagatgctggcggatgagggaacctttgaggagtggaacaaggaaatgcccttttccaaccccctgaactttccgggatacgagaaaaaggtcctggctgccagggaaaaaagccgcctcaacgaggccattgtcacaggcaaatgcaaaattgacggaaatcccgcggtcgtgggcgtctgcgatgcccgttttatcatgagcagcatgggccatgtagtgggtgagaagatcaccgacgccatagagcgcgccaccagggaaaaaatgccggttatcctctttgcctgctcaggcggagccaggatgcaggagggcatcgtatccctgatgcagatggccaagacctccgctgccttaaagcgccatcacgaggcggggcagctgtttatcagcgtgcttacggaccctaccacgggaggcgtcacggccagctttgccatgctgggcgacatcatcctggcagagccccatgcgctgattggttttgcgggtcccagggtcattgagcagaccattggacagaagctgccggaagggttccagcgttctgaattcctgctggaacatgggtttgtggataagattgtggagcggaaggaccagaaaagagtcattggacagattctgtacatgcaccgcagccacaagatgaatatagaatcaaagaatccggtggagacagccaggacttttgtggataaaccatctgagtcacaggaggatggtggaaaaactgcctgggatacggttcttctttccagaaaatctgaccgccccgttgccacggattatatcaacgctctgtttgatgaattcattgaattccacggggaccggtattttaaggatgacggagccattgtgggcggcgttgccatgttccacggcatgcccgtaacggttatcggacagcagaagggcaagaataccaaggacaacatcacccgcaacttcggaatgccgtcccctgacggctaccgcaaggcgctgcgcctgatgaagcaggcagagaccttcggacgtccggtagtctgctttgtggatacgccgggagctttttgcggactggaggcagaggagaggggacagggagaggccattgccagaaacctgttcgagatatctgacctcaaggtgccggtgctatccattgtaatcggagagggcggaagcggcggcgcattggccatggctgtggccgacgaggtgtggatgctggaaaatgccatttactccatcctttcaccggagggatttgcctccattctgtataaggacagcaagaaggcgccggatgccgccaaggtcatgaaggtgacggctaaggaccttttacagcttaagctgattgaacgtatcgtgcctgaggaacagccagcatgcacggataatctctaccgtctcgctgaatatatggacagcgccatggcagagttctttaaaacgtatctcgccatgagcgatgaggagcttagggagcacaggtaccagagatttaggagaatgtaatgagtgagttaaaaccattggtaatcggtgatttagtagttgaaaaaccaatcatccagggaggaatgggcgtgggcatcagcctgcacaggctggccggagccgtggcaaaggccggcggcatgggcatcatatctgccgcccagattggtttcagggagccggatttcaccaccaatttcgtggaagcaaacctaaggtccatccgcagggagatgaagctggccagggaaatcgcaccccagggagcgattggtttcaacatcatggtggctaccaagcactatgacatgtgggttaaggaggctgtgaaggcaggcgccgacatcatcatatcaggtgccggacttcctgtatccctgcctgaatacgtggaagctgcctatgctgagatggaggaaaagccggcccgcaggattaagctggcgcccattgtgtcgtccgccaagtcggccatggtcatctgcaagatgtgggacaggaaatgccacattgcccctgatctggttgtggtggaaggaccgctggccggaggccatctgggattctcaccggaccagttatccgcctatggcgcagacaccgccgatgtgccggccacctatgaccgggatgcctatgacagggaagtaaaggctgtcataaaggtagtggaggaatatggagccaagtacggcaggcatatacctgtggtcactgcaggcggcatctacacccacgaggacgtgatgcaccagcttgaactgggagctgacggcgtccaggttgccaccaggtttgtgacgaccgaggagtgtgatgcctctgacgcctataagcaggcttatataaatgccggcaaggaagatattgtcatcacccagagtcctgtgggcatgccgggaagggcaatcttaaatcctttcttaagccggataaagggcggcggcaggccggctatcaagtcctgcttccagtgtcttgagcactgtgacatcaggaccattccctattgcattaccatggcgctggtaaatgcggcagagggggatacagaccatggccttttattctgcggaagcaatgcttaccgtgcggagaaaattgatactgtggataacgtcatgaaggaattaacaggagagctggcttaatgccggctcttttttccttattttacaaggaatttctgctgccgggaacagccggacaacccttatccccagataattaacaaagatatccacaagatatccacattatccaccaccggatatccagagctgtcccatggccattctatctgtcatttttattacggttctctttcattttccctctgcccattgaccctcaaaagggaagatcttaaaatgtagctatgaagaaactgaatgaaacagagggggtgaagatggaaaaagcgttggcggagaaaacaggggggtatctcataggcgacgttgcccagatggttggcctgagcagggatgccctgcgtttttatgagaaaaagggaatcatccatgcagataagaaggaaaacggatacagatattattcagaggccgatatctacagattgatgtatatactttatcacagaaagatgaataccagcctggaagagatagggggccttatgagcgggcagaactccacatccgctatgagacagcatgtcaggcagcgcatggccgaggaggaggaagccctcaggcggcacaaccaggcaattatgaggcttaagctgtttgaaaaggatataagccgcatagaggcgtgcatgggcaggtattccataaggaaattccccaaagcatatgtgattgccaactgttctgacctgcaggaggggttaagaacgtggtttaagctgtcctctaccattccgggactggatatggcttatttttataatgtactcacctacacgggacaggatctggaagaaaaagaaacccagcttctgctctatgagggactggagaaggggctgggccaggagtttaaccggagtctgtattctatgacggaggagccggaatgtatctataccattattgaatcagagtatactcatccggattttgacatgattcacaagatggtccagtgggcccataaacatggcctggagcccatggagcgcgtatacgccaatgatatgacttcctttttcgcaaaggacaagactacgtactgtctggaaatctacatgccttttaagaggattgcgtcgccggtatgatactggtaagggttcttgcccgtatctttatccttacccgttatcagccagtgtttccttgccgctgttctcatcctccttgtgaacgccgaagttctgtatgaagtcaatcataaaggaggatacgatcactgttataagtgagtatacgatacgtactgccgggatatacgacagggacagcaccagcacggatacgtccgtcagcaggtatgccctggatatacggcagcccgttaccttggagatgaccagggccagggcatcgtccccggcgcaggaagctccctggcggaccaccaggccgcagccggtaccgatgaagcatccgcctgccaaagccgccagaagggggtaatcagccagacttggaagtaccgggtgaaacagttcccagagccggaagaatccggccatacataaggttgcaaagacggaggtcttaaggaattccctgcccaggaaacgaaagcccagggcatagcttaaggcgtccagcacaggtgacagtatggaagatgacatgccaaaccagaaatgaaagagcagtatcagtcccagaatacctccctccgttatatccgcctgctggtggatattgtaaatgccaaaggtggtaatggctgtaccgaggatgatggataacacagtctttgggtgaaaggttaaggataattcctgtacagcgcggcaagccagcttcttcagctgcttcataataaaacgtcctttctgtaaatgggttataaaaccggttaggggcggtccgggaatccaagggattccgggccgccctgttatgctgtagtaccagtatacctcatgtaccccgggggctgtcaaggggagacttcatccaaccggagattcaaccgtaaaaccaaccgtaaattcaaccgtaaattcaaccataaatttaatcaaagactcagactgttatcagtccggcttttccgtgccggaatccacgattctgcccttgctgtccgtcttatagtacacatcgtcggaatcctttacgttcttcttgttttttaccagcttgccggatgtgctgatgaggtaagtctcatccttataggttacgggctgatacttggtgccttcctcggcttccagccttctgcccttcacatagatggaatcaccgtcaatgccgtcggttcccgcgccctttttgctgccggatttctcaaagctgtagtaatatttgtcgccgtcaatttccatggtcatggtgcctgttttcatggctccttccttaggggaatctccgaaataatatacaaatacgccgtcctcgtcctcatccggaatttcatccacgtcctcaatttcctcagcagatcggatggtctttccgttcgcctcaaattcaatgcggtagaggccctgaagcattttcccgtttacatcaaagccatagtactgcccgttgattttcttggagtcgttgtccacggtttttttgccgttggtggaaaaataaaaccagtaaccgtctccttccctgtcgtcatcctcgtcatttacagccggaatgtacttccatcctgtggccatgcggccgtcgccgttatcgctgcaatagtacatgccgcttttccaggcatcgtcatcggtcagcatttccccgctctcgtcaatccatccgtagagcatgtgtccttcgtcgtcaaaggtaaacttggcctggccggtggaggtggggagggtgacgaatttcacattgtcactgctgccggatttctttacagccttgccgttggactggaaatagtaccaccattcatccggctcgtctgagcccgagtcttcattttcaatggagcgccactggttcgtgaccattgctccggctgagttgacatagaaataattgtcatcgtcctcaatcagctggtttttggccatgattccgtcggaatccagatagaaccagttgttgccggacttcttgaatacatcggtggccttgctcccgtcgttgttataatagacccattcaccgttttcctcagcccatccggtggctgcaaatgataccagcgcgcttcccatggtcagggccatggctgcatatggaatcagaaaccattttgtttgtcttttcgtattcatgtctcctttcagtctgccattcagttcattgatttcaggatgttcaccttaattgtctttttgggggatgcggctgccgtttcgccggagctctggccggcgccgcacgttgtcatcactgacatggtgagaatatactattataactcgattttaataagtttacattattatcctgaaaaccaagggaaacgtgcgcccaaagcacggacacgtaagccaagaaatcagattactaccaatgcttaaattgtaagcttatttaaatcgagttatactatggagccgctccagggtcaatagaagttatgtaaacgtaaagaaccgtaaattttacgcaatccggggtaataattcttacggagaaggggcaattatgaatatttggaaaacggctgtgaccgatggtgcaatccaggcatcaaaggaggcggtgacgttgtgcatcaccatgctgggcatcatgactctgtggaccggggtactggagatcggggaccgctccgggttggtggaccagctggcaggaagaatggggccaatactcaccttcctttttccagggctggacccggacggagaggcaaggaagcagataagcgtcaatatgactgccaatatctgtggtttgaattgggctgcgacaccatccggactaaaagcaatggaggaactggaaaagctaaaggagcaacaaggaaaggtggtgcataatactgccagtaatgaaatgtgtacattcttaatattgaacatttcgtcattacagttgattccagttaacatgatagcttatagacagcaatatggaagtgtaaaccctacagcgattgtagggccggcgattatggcaacagcagtgagtacattggtggctgtggtgttttgcaaggtgatgaacaaaagataaaatgatttcaggctaaaaatatgcggtttgtgtaaaatgccaattgtatttgaggtcaatttttggtaatattgtacaaataaatttttataaaataatgtagaaatgcgcaggtgaaaaaggtggcaataccaaaagggaagaatgaatataaaattaacagtactaaaatagttgcatttggcatttctcattattataggaaagtccttgctgaaacgaagttatgtaaactaatgattctgccaaaggagggtatagaaaacagacggtggtttagaacaggtcgatatagaacccttcttcccatccatcatcgtcgaggtcgtcatcttcagttaaaaagtaatgcatatccaataaatcagaatcggtcatatttctgaccagtttgggtgtcattccttctggaggatttttgatgtatttttgtctgagttcatccacatatctttgattcatttgcaactgcctcccatctgtaataaatgtagtatgaagcagatgggagagaaagtcaagcagagcgggaccggggataaaggccatgccttatccttgtccttttgtataattcatccagaggaacccgttcatgtttatggtacagctctagaaagaccatttcatgtctgcagtttgggcattgcagggggtcgtaccccatggtaagaaggaaaagcttacgccaggtgttgaaatcgaggagaatcctgtgtttggattttgggactgctttatggagctgattgtcaatctcccggtgtctggcataaagcccatagtaccgggtcatcttgaagtttttttcaggtatatgcagaatgagcagcttaatgaaatcaatggcgggaagagtcttttttacaaaagagttgtcttcatgcttattgtaatggaaagtcaccatctccccatcgtaggaatcaatcctggaaagagcaatgacagggcggccaagataacggctgacatatttaataatggattttgggtcgcaaagattgggcttggcataaacgtagaatccatttctgtccctatggtaaacggcggctttcatctttttaaaagagggaccgatgcgtttttccagtttatttaacaaaacagtctgaaaggatttacggaggtaggaataattgaaatatgtgaccttgcgccagacaccatcatcagaaaacccgccttcggtaaggagacagtggatgtgtggattccaaccgagagggcgaccgaaggtatgaaggacacagataaacccagggacaaagtttttggatttgttcagggagaaaaaatattctttgatgacatcagaaacagcctcgaaaaggcagttaagcagagtgcggtcttcgaggaaaaagcggcggagggattcgtcaatggtgaagacgagatggcgatgggtacactgtattaatttaaaagacatagcggtagacctgtcattggaatacttagcgccgcaggaggggcaaaacttggagtggcagcggaaaggaacgaacttgaggttaccgcaatggggacagccatacatggcgccaccataagaaggatccccgcagttaatgaccttatcaatgttttccatgacgacaggtctgggttttatatcgtattcaatgatttcgtaatagtctctgagcatcttctgaatcacattcatgagattattatggaataaaatgacgcaaaaaacaagccctaattcccctcatgaatgaggggctaggggagttgaggtgccgaaggcactttcttgttcaaaagaggaaatggaattgtcactttgcacagatgtttacaataagttgtatgatgttaaagaaaatatagatttagtaaatagcctgcaagacactggctttgataaaatgttgataatgcagaagatttttccgaacgatacgaaagaaagttgggaaattggggaggcatatgcacaagcttatgctgagagtaatttatcggcaattattccttgggggataaccagagatattaaaaaacctggatcaagtttacctggtgcagatattattggactttatagacatgacagcggaacatattttttatttggggaaataaaaacatcatcagataaaaactgtccaccaggtgtaatgtatggcgaacatggattaaaaaatcaactagaggatttatgtcaaaagaaagaacttacaagtcagttggtaaaatatttggcacatagattaaaaggtggtacattatggccgcaatacacggaggcatttataaaatatatgtattctgaccagaaggctgtacatattttgggtattttagtgcgcgatattatgccttcaaaggaggacttgaatacacgagcaaaagctttggagaagtttgctgttggagatagaacaattgaattagtaggtatttatgtgccaaaagatgaattaaaaaaatttcctcaatttattcaggaagagcgtgggaggaggtctatttctaatgttagaaaagaatgatttaaatagattagaatcccattgggctattgcagcaatacctaaaacggacagaaaagcatgcttcaatattattgagaagataaacgtccaaaagtctattaaaaaaagtattcagttcaattttaaaattgaaaaagactggcaagaaaaggtattaaaaatggctttagcatatgaaatgccagcaatagaaaatattgcatcttttactaattatgctgatgaaagctgtgacagagggcttttttcagcttctgcttggcgttgctttgatttatatagtgttgtggaaataccgaaaaatattaatgctaaaattttctttgtattacatctttgctcaatggcatattgtggaggacgatggaatgatttgaaaaaatggtatttagataataaaaatactgttctattagatatgcaggatgcagaaattgatgattgggagcaaaagctactaaaaacgatttttagatgttggattcgattgtttataaaaaaagattgggaagatttatcacaggttggtttggaaattgtaaaactacgagaatcacagcggatttacgaggagaaatatttaaataaggcgaaggacagtcagcagagtgcgtttattttaatagctctatataatttatctaaaagtacagaattgcttgccacatatatgatgcaaggtgaaccagcagcaattcatgggcagttagataaacattttgaaagtgcaatagaagcagcattatgtgctgatgatacagagtttgaagcaatactgcgctggttacattgtgcttcgaactatatggtagatggttctatttggtggatagcgagggctattaattcacgaacaacagaatttgttcgatatgtaacaaaaaatagagggctttttgaaatgctaccaccgcaaaaagcggcaattagggagcaagggcttttggatcaggcatcaacggcaattgccgtagagatgcctacttcgggtggaaagacattgttggcagagtttaaattgcttcaagcattgaaccaatttgatcaagaaaaaggctgggttgcttatgtagcaccgactaaggcacttgtatcccagataacacgccgactaaggaaggactttagtgaaagaataagagttgagcaattgtcggctgctattgaaatagattcttatgaaagtgagatgttggaaagtagtgaaaggagttttgatgtaatagtatccacacctgaaaaattgaatttagtgattaaaaacaataaagtttcacgacctctggcacttgttattatggatgaagcccacaatattgaggatcaggaaagaggattaaggatagagttactattagcagcaataaaaatggattgtccgaaagcaaattttttgttgctgatgccttatgttgaaaatgcggaagtattatcacggtggctatctaacgatcttgcgtctggtaagagtataagtattgggagtacgccgtggaaacccagtgagagggtagttggactttatgaaaagatgtcttgccaaggtcgagggaactggtatttggtatttgatactttagttactatgtcgtaagtaggtaataatcagtatctgcaaatttccatccacatttgataagataagttcaaatgatggaggtgataccaataaatacgaatgacaatgtaacctcaaaggctgacctttgggcagaccggttccatgcttttcaggaaagcggtttatcccgcaaagaatggtgtcagcagaatggaatcccacagtctacactgggttactggatccgaaagctccagtcagaagcagctgagacagaaagtgcttctgatccggtgtttgcaaagctcccttcggaacatgaactccatttcagtacagcaggtacaggaaaacctcctgtgatgatctgtctcccggaaaatatccggattgaagttgctgcggactgtccagccagactgttgactgccctgcttcaggccttaaagaactatgcttgatttttacggaagtactacagtctatctggcatgtggctgcacggacctccggaagagctacactggtttagcggccatcatcaaactgaaattccatctcgatccgtactcccgctgtatgttcgcgttctgcaatcgcaggcgcacattgctcaagatccttcagtgggacgggtcagggttttggatcctgatgaaacggctggaccgcgattccttccattggcctgacacaccggatgaactgcagaaagttacgctgaaagagatccattggctgtgcgatggtttatccctgaaccccagcggcgcatttgaagaacgtcacccgaagatcgtcatatgagcccggatcctgtcaattcgcaaaaagccgaaaatcactttgttttgggcggattttcctccgtcccggaatgcagtttcctataggaacggaatgctttttctggtatactttctggtagagatttcagaaagttgaggctgtgttatggatccgctttttacagaggaacaactgaacaagatgagcagggaggatatcatctccctgatgaaaaccatgcgggagcattatcagaaacaggaaacaaagatccagatcctcgaagaaaaaacaaaggaactggaattcctgaacgcgatgctttctgaccgtctgactcttgcgcagcggaaacagtttggcccatccagcgaaaaatatgcggatggctatacgcagctgaacctttttaacgaggcagagcaggaagcagagcctgatgcgccggagccggaaatggaggagatccatccgtcttcctataaaagaaagaaacgttccggcaaaaaggaggaagatctttccgcctttgagacaacggaagtaattgagtataagctgaccggcgcggaccgaaactgtccggactgcaataccaaatataaagtcgtgacaaaagagacggtgaagcgcctgaagtttgtgcctgcacggtttgaagtggtggaggaggtcacctatgtttacagctgcccaaaatgcggggcgatgaaacgtccggaaaaggcgccttcccttctcaaaggcagtgtggcaacaccatccctggtggcaggcatcatgaacgcaaagtatgtgggcggcatgccccttgcgcgtcaggaacgggaattcgcccgttacgacctgaacctttccacaaagaccatggcgaattggatcatccagtgtgcggaccggtatctgcagccgctttatgaactgatgaaggaagaattcctccggagccggtacgctcatggggatgaaacccgtgttcaggtaatcgatgagccggaacagaaaggttccacccagaactggatgtgggtctatctcactgatgaatacagcggcgcaccccggatggtcctcttccaatacgaaagaacccgggcgggatatcatccggtggaattccttggggatcagtaccagggatatttcacctgcgatggataccaggcataccacagccttccggaaaggatcaccgtgacaggatgcatggcccatgcgaggcgcagatttgatgaatccctgaccgttttgaaaaaggactttaccaaagagcagctgaaggaaacaaccgcatatcaggcaatggcacggatcgggatgttctataagatcgaagagatgatccgtgacaagtcaccggaagaaaggtatgaagagcgtcaaaagcaggcaaagccgcttttagaggcttttttcgagtggcttcataccctggaggatgctgtggacagatcttctaagatcggagaggcggtcctgtatacgctgaaccaggaaacctatctgaaaaggtatctggaagatggccatctgagtattgacaatctagctgcagagcgggcactgaaaaattttgccatagggagacgcaactggctgtttgccaaaagcatccgcggggcacaggccagtgcgactgtgtacagcatcacagaaactgcgcttctgaatggactgaagccatacaactatctcacatatgtgatggaaaagatgaaagaactcggtgcgtttccggcaaaggaagaaatgctggagcttctcccatggtcctccaatctgcctgatgattgccgcagcaaacttaaaaagtaaaaaacagatcttcccccggtaagtgctgggggatttcttattttgtcaagatacggattattacttacttacactatgtcagaatctataaattttacagggaaatatcaagtaaatggggaacatcactttggaaaagcatattccaaagttggcacaacggatatgacagcagcaatggcaaaagagctgtctgttatgggaacctgcttggcgattgcacgtactacagatttttcgtggaatatggctagtacagcattgccaaaataataatgaatagacgttgcttttttattgtagtcggtgcataataattctatcactaaagaatggatgtgttattatgcgaaggaaaacaattgatactatcccggttttatctgatgccatgaaaaacatattatctgctttttcaaaaagccgctcccttccgtcaggactggtcaaaagagccagcattgtcctgcttgcgtcacagggggaactcaaccagaatattgcaccacaggtcgggcttcattataataatgttgccacctggcgcagtcggttcctcgcggcgctcccagccttgcggaggattgaaatggacgacccgaaaaagcttgaagatgagatacgggcagtcctgtccgataaaaaacgccccggtgccccgtctgtttttacgccggaccagatcatgcggatcatcgaccttgcctgcagcagcccaaatgattttgggtacgaagtaagccagtggagcctcccgctgttagtggcagaaattaaaaagcaggggatcgctgaacagatttctgagaaatctgtcagccgttttttaaaaatgaggtagatttacatccccacagaatccgttactggcttcattcttcggaaaagacggaagccccggaatcttttgcgcggaaagtaaacgaaatctgcggcctgtaccagagtgcccaggaacaaagccgggaaggtgcacacattgtttccacggatgaaatgaccggggtacaagcgctggaacataaatatcctgacaagctcccattacccggccagtgcgccaaaatggagtttgagtatatccgccatggcacgaccagcctcatcgggttctttgatgttgcaacgggccgtatggaaatgccgtatttaaactccacacgcacagaagaggattttgtggaagccgtgaaagcattggtagggacagacccgcaagccccatggacatttatatgcgatggcctaaacacccataaatcggaagcccttgtccgctttgtggcagaagcctgtgcccttggcgtggaactgggcaaaaaagggaaaacagggatccttaaaagtatggaaagccgagcggatttcctgcatgacccttcccaccggatccgctttgtctatactccgaaacacagttcctggatgaaccagattgagatatggtttggcatcattaaccggaagctgctgaagcggaaaagctacctatcaatagaagaactggaagcaagcatcctgcgctttattgaacaatacaatcttacagcacacccatttaagtggacatatgccgggataccattagcaatttaatcactgatatttaagcaatgctgtactagagaccttgcaagtgatatggaggatttagaggaagattataaaggtctgcagaatatacggttagtacaaaaatatttagcggatgaaatgggggaggggtttgaacttattcagatgctgaataaagggattggcgtacataatgccagcttgatggatgaaatcaaggagttgatggagtggcttgccgaggaaaattgtttaaaagtgttatgtgccactacaactattgctcaaggaatcaattttccggtatcttctgtctgcattcaaagtatttcattaagtgggataggttttagcaaggatatgaaccccagagagttttggaatttggctggaagggcaggaaggattggacaaaatagtttaggagttgtaggtattgcgtgtgacaaagataacagggagcatataacacgatttgtaagcactaaaacaggcaatttaatatctcgtttagttacaatgctagatgatatagaaaaggaaggtagattgtttgaactagtataactcgattttaataagtttacattattatcctgaaaaccaagggaaacgtgcgcccaaagcacggacacgtaagccaagaaatcagattactaccaatgcttaaattgtaagcttatttaaatcgagttatactagataaactgatttatcgtcgggaatggacagattttcgctgctatattgcgcatttgtgcaacgaaaaggataagttggatgatgtccttgcggatatggagcagttattgaggaatacattaggttataacgtgataaagtccacaccaaatggaaacatgaagtccagaaaacttttagaggttgcaaaagggtatgcatcgaaattacttaaagatccacaattaagcaaattatctgaccaaacaggattttctccagaaggaatacaaaaagcattttcagggattaatcaattaaacaaaaagctgtctgcagagtcctttaatacaaaaagtatttttggtggaaataatttgttagcggaattgtatggagtgatgttaaaaattcctgaattaaagcagttggaggaaattgcaggaagtggtgaacagcatcgcaacattgctgaaattactactgattgggttactggaaaatctatttctgaaatagcaaaagaatatttttcaggagatgatggcactaaaagtttaatgagggcgtgtaaagctattaataagcaaattgctaattgtggaacatgggggctttctgcaataactaaattatcaggaatagattttggaaagctggatgaggataagaaaaaggaaattgatatgcttccagctatgatttatcatggggtaaatactccggaagctgttttgatgcgcatgaattatgttcctcgaagtatttcaggtaatttaggcaaagaatataaaaaaagtgcaaaaaaatttactgctgaagaagctaaagagtttttggtttcattgaaagaatcggattgggaaaaattaaaaaaatctcaaagtcatatgagtggtaaagagtatatgtccatttggaagttgttttcaggaatgtaaaaatgttaaaaataaattatcgcactttgtttttaggtgctaaatacatttggatttttcattatacgaatagtaagggaataaatattggttactaatccatatgcttttagcacctattttgttatcaggaatggagatttgtatatttcaggaaaagatgagcaaagtatgttttatgccaaaacacattttctcacaaatgcaattcttgagtatgcaatatgcctagatatcagttggcaagtcatatgggcgtatatacaaccatcttcattagagtatcttatgaaacaagagtataagaagatggaaaaagaatgtaatagagataatgtacttcaacagttgaattgcgtcatttctcaaaggagcatagattttaccaaagcagaacgccttaaaaatataatgacagactttgataataataacaacacaataaaactgagagcaatttataatggtataaaacatcatgggacggtacattttaaagggttaggggagaattttgaatctttcggtgttgcagttgcaggaaaatgccctccaatgctttgtaggaagagttatacagtggaagaaatagaaaatatactattcgattatcattgcgcttttaaaaaatattttaatgaaattgttgatgctataatgccatcggaatatcttgataataaaatgcctttcggagactttattggatctgttattaatattgcaacggtatgcgattgatactgatttgcactatatcaatcataaaaaagttgaagaaatttttagtcctaccttgacacaagccaatatactgggactggggtgggccgccacgccggccgggttgaaggccatggaggagctgaaaaaggtggaggaggagcgcagaaagggaggcgtggccgggcagaaagatacgccaggacaagaagagacagccgggcagagagctgcggccagacaggcggggactgccagcaaggagatgtgtacatttctcattatcaatatatcctccctgcagcttatacccatgaacatgattgtgtaccggagccagtacggatgttttcttgcaagcaattttccctattttcagcgtgtctattccctataatcagcgttgtatattcatgcgcaaatgaagcatatcaatacattgctgaaaattcaaggacgcatatgcgccgctatcgcggttaaaatccttgactttccagcaatgtattgatgagaacaatcaaggcatgaatgaataattataattatctgacaatgatgattttagggaagcatcgcgctgattatagtgaaacgacctcgctcataaacatacggaagcgtgaatcctactgccattgcgggtccggccctggcggctgcctttatcagcacagtggttgcggttatattctgtagggtcatggaccggtatgtgcgggcggtgcattgaagcatgacgaaagaaacgctatactggatacaacagatgaagggaggctgtgggaacggctctatgcgaagacatatcccacagcctgatttaataatgtataacgttgtccgaattctgaattgccgcaattattttctgtgcttctgctgaagtaaagtaattccaggttgtatccggaactatcttttttaaatcttcccattgcatattttttatatactgacgcactgttgatgcactgataattgttccttccttttcttttctcggtaccacaatgcagtcaatatcttttttcttcagttcttccttcataatccggttataaatccccgtcacctgactgaaaggttcttcacccacatatctgcgacagatctgcagttcccgggctatctgaaaaaacactgccaaatcaagtctggcatgaccttctataaccgtttcctcatcctttagaaaataacttggaaacgtagcattgctgatgatatacggaccgctttcatgcaccactgcatttggaagatgtgccacaccctcctgcaccagcttcttccgaaccgcaaacggtaccagacttgcatcttcactgactacaaacaaatgcacaatatcattttcttctgccgctttttccaccagatattgatgtcccagcgtaaaaggattggcattcatcacaatcgctgctgcttttttgctctcaaagacaggtttttccagcttttttaaataatcacgaaatcccgtccggcggttttccataaatacaacacggttgtctgcccttgcaatctcataaaaaccaagatccctgaaaaattttgctgaatcacatttcgtataaagaaacagatgataatttccccgttcgaactgaatctgaatcaaatgactcaccacctggttcagcagtccttctccctgatgatctttgctgactgcaaaacaacgtaaggtatttccaaagcagcttcctgttgcaacaggattatagtcatcatcatataaacagcatgtataatccagatttttatccaaagtaattccttctttttccagtagcgcttttacctgttttatcccccgatggtcatttggataaatctgtgaaatcacaaatcccataatctattgctcctttaagaaatacaaaaagtatgtaaaggccagcaggtccgcgcttcctccgggcgaaagatttttactgataaatgccctgtcaagaatctccagcatatcttcctccggataaggatttctttccagaatttcttttatttcttctgtcacctgaagctgagtttcccgattgcttcgcgcaatcagatttgtatctaccgtagataccatcaatgccaacaaagctgcgcaccctgcctgttccagagataaaccttttttcagtcctctttccagagccggtaatccagcctccataactgcgggaaaccctttttccgcttggccgcggattcccgtgattccatattttacatacagtttttctcctgttgttccggcattctcttctgtcactccccgaaaatcatgttcaacaattccttttgtcatcgccgcacattctcccaatacaacttttacatttttccatttttcccggggaagacgaccaagagcaccacaaagtattccaatagaaaacaacgcacctttatgtgtatttacaccatttgtagcctgattcatatcataaccggcaatttttcctgcccagcgcagtctgcgaaaggtttcttttggaggttcctgggctgtttccattcccatctgtgcacacttctgaaaatagggccacaaagaagctgcactggacataaaagtaaagcagtccatatctttatgacttccgctgtttctccgatccacaagccccggtttcggagtagtgcacacttcatacaacaggcttctgcaagccagttccgcaatcctccggctatcctgctcctgaaattccttcagcaggagttcctttgtggtctgctcaagctctgcaacagaatgggttctgcttctggcacattccttcgcccggttaccacagagcagacaggttctcggactttcgccgatttccatacgctctatatgattgccattttcatcaagaacatccatatcaaagagacgcccaaccgacagattattttctatttccactgttattttttttatctccacagcattgccttttacacaataataacatacatttcccgtattttcgcaataacattcctgatgcagacattctattccggcactgacaagctgatgtcttaaaatatcacagccatattcaaacgcccggtatattaacctgttatttttgaccggtccggcaatattcatagtaaagcagatcagaacagaagcatatttctgctgcaaagacagctggcgatgcacacgcaattctcttgcatccagcatttccattagtgaaacttcttttcctgtcattttgtcgtctcctttttcacattgtttccggtttcttatttgtgcagagggtccgataggaggccagaccactctgctttttgtaacagatacgatttaaactattctgcagattcaaatggtttgagctggcgaaccacatccataattgtgccgtcacgtgcttcaattatacctactacacggtctgcgaaatgaaccttttccggttctccgataatagaatatgcgatgtcgcgcaattcctggatcgtcttcaacggaatataatctgctgccttcaacgcttccggcaggtccggtccgcgcggattaacagccacaccataatctgtaaccacaatatcaatgctttctcccggtgttgtaacagtggtaacatcagaacagattgcccataggttttgtcaggccgcctacacctgtctgataggaaagaccatctttaaaataaggagtattggcaactacctgcgtacagtattccgccatcagaagctttctctgatctgttgtcggttttgccgcccctgttgcaatttttgcaggatcaccgatttcatcaacaacacatatataatccactctctgcatcggtatatgtgccggataattcggaaacggcacaagacagcccgtaatcgcagctactttatctgcatgaatgtgcgcttcacctgtaattatggctcttacacgaccgccatgggaacgcatgatagcaagacctttcagttttccctgtgagatagctttgccgatcgcaccacgcacacctgatgattcaatagaggaaaaaccggcggagggattcgtcaatggtatagacaagatgccgatgggtacagaggattaatttaaaagacgtagcggtagacctgtcgtcggaatactttgccccgcaagtgggacaaaacttggagtgacaacggaaaggaacgaacgtaagatttccgcaatgagggcagccatacatggcgccaccgtaagatggctccccatagttgatgaccttttcgatgttttccatgacaacaggtctgggtttaatatcatattcaataatctcgtaatagtctttaagcatcttctgtattacattcatgagattattatgagacaaaatgacacaaaaaacaagtcctaattcccctcatgaatgagggaagggcactgaaaaagtagataataccgtctgcgtaattccggcagcaggatgggcagcacgttcctgcccctgccaggtgtgatgccaatacgcagtttcctgacatccccctttctcagttcagccagattggctccattgacactgcgcttgccctggctggccagggatatggggtctgctttgccagcagtttcagaatcaaaggacatgaggcttatcctcatatccacgtactgtcttttgggaaagaacgggtgtgctgggactttatcgcggccttccgcaaggattttcagctgcaggaggcagccaggtttttagtggacagtatgaaagaattatggccggaacaggattcttaatgatttttaagataaagcctttctgcatttaagattccccggctatgataaagtcagaaataaggaaatccggaacaaaaaataaatcaatgttatacaaggaggttttggggagtatggagattcgcaaaccagccgtggcagggacactggagtccagtgactgccaggtcaccgtggagccgggagagggaaatattgagttcgcgcttgagagcgctgtcatcaaccagtacggaaaccagattaagagagtggtcatggagacactgggaaatctgggcgtggaggatgtgaggattgccattgtggacaagggcgctctggactgcaccatcagggccagggtggaaggcgcggtgttccgtgcagccgggcaatatgacaatctgccgtggggaggtgccatccgatgataaatacaggtaaaaagaggctgagaaggaccatgatgttcctcaatgcccagaagccgggactgattaaggacccgtatatctacaggccggactccatcatgctggatttggaggatgccgtggctgagaaccagaaggacgcggccaggttttcactgtaccatgcccttaaaaccattgattaccggggatgcgagcgggtggtgcgcatcaacggactggacactccttactggaaggaggatatccggtgcgcggtggccggcggctgtgacgccatccgcattcccaagacagagcgtcctgaggatgtgaggacagtggaagaccacattgaggcagcggaaaaggaattcggcattccggagggcaggaccttaatcatggcagccattgagtcggccaggggggtcatgaaggccctcgatatatgcgaggcctcggagcggcttttcggcattgccctttcaggcggggattatacaaaggaccttcagacccatattacagggacgggaattgagcttatgggcgcccgccagaacatgattatagctgccagggcagcgggcgtgcagtgttttgacacggtttacaccaatctggacgatatggaaggcttccgcaaggatgtggagaccatacatctcatgggatttgacgggaaatccattattaatcccaggcagataaccattgtccatgaaatctttacgcccaccccgaaggacatcatttttgcggaaaaagtggttaaggagattgacgacaagaaagccaggggaatcggcgtgtttacggttgacggtaagatgattgatatagcattttatgacggcgccaggagaatcattgcactggctaaggcatccggcgtgtataagggggatttgtaagatgatgaatgcggttggacgggacatacccgaggaaatcttaaggcagacaggcaaggaagtgtttcagggagtccaccattttgacgggtacacctataagaaacacggacccatgacacagtgcgtcattaactccgatggcagcaagctggtggaaagcatccatgatgtactggtaaaatgcggcatacgggacggtatgactcttggattccaccaccatttccgggaaggtgactttgtggtcaacatggtcatggaggaggtccataaaatgggaatcagggatatcaccatctgcgccagctccctgggcaaggcccatgaccctattgtgccctatattgaggacggcaccattactaacattcagtcatcgggcgtccgcgggaaggtgggggaagccatatccgggggaaagcttaaggggcttgccgtcatgcggtcccacggcggcagggtaagggccattgagacaggggaaaccgtcatagatattgcctttatcggagcgcctacctgtgatgattacggcaactgccgggggattggcggcaagagcgactgcggcgtgctgtcctatgccatggtggatgcattccatgcggataaggtggtggccatcacggactgccttgtgcccttccctaattttccggcccatatcagcatgacaaaggtggattatgtggttgtggtggatgccatcggcgaccctgagaagatagccaccggggcagccaagccgaccacggacatgaggaagctgatgatggcggattactgcaccaggtttgtggtcaataccccctattttaaggacgggttttcttaccagacaggagtggggggagcttccatcgcctctaccatctcccttgccaaggtcatgaaggagaggaatatccgaatgaggttcggggtgggcggactgacaaagcccatgtgcgacctgctgattaacggccaggcggattgtctgctggatacccaggactttgacctggatgcagtggaaaatttaaaggatttaaagcatttccgcatatcggcaggagcctatgccgaccccttcaacaaaggggccgtggtcaataagctggattttgtgattctggcagccctggaggtggacgtgaattttaactgcaacgtggtggttggctctgacggagtcatcacaggagcccagggcggccatcctgacacggcggccggtgcaaagtgcaccattgttatcacacccctgctccagggcaggataccggcagtgtgcacccaggtgaccacggtcaccacgccgggagagagcattgacgtggttattacggattacggcattgccatcaatcccctcagacaggatttgattgagtgcatgaaggatgtggacctgccttttaagaccatcggagagctgagggacattgcctactccatagtgggcgaaccggaaaaggtccggtttacagataaggtggtgggaatcatcgaaagccgggacggaaccatcatggatgtggtgcggcaggtgaagaagtttgaatttgcggaagaatgagtctgcggaagaatgggtttgcagaaacgtaaataacagaaacagcagatgaaaatggcctgaaccggggaccgctgggcggaatctggttcaggccgtctgtctgtttatctgtctgtctatttataaggttacggaacaaaccggtaccccaggccccgtaccgtcatgatgtgggccgatttctggcggtccttctcaatctttgagcggagacggttgatatagaccatgatggcgttgtcgtccacggcaatggtattgccccacacatgctcgtatatcatttctttggtgaatacctgccctgggtgcttcatgaacaggagcataaggctgctctccttggatgagaggaagatttccccgccgtccttataaaaacgcatggtggatgtattgtatgaaaaggggccgcactccagctcgtccgggctgtccggggacaggttcttgctgcggcggattagcgccttgaccttggcgcccagcaccaggggccggaagggtttggtgatgtagtcgtccgctccgatggaaaggccgtagagggagtcgtagtcttcgttgcgtccgctgacaatcatcacaggggtcttgatgccctggctccgcagggccttgatgacctcaaatccttccatgtcccccagcatcacatccatgagaatcatgtcataggcatggtttttaaggagatgcagggcagcctgcccgctgtccgccacagtggtttccaggtcattgctgtgcattaccttttccagcagtttgcagatggacgggtcatcgtccacaatcaatactttatcagccatagttccccccaaaatcttttgtttcgttgtttgtttttatgtaaaattctttaaatcattataatattaaggtggggacaagtcaataagggagtctttttacatcgtaaggggtagtttatgaaagagaagaaaaaagacaggcagaggaacggatacctggcggcagcggccggtctgctgtacgcggtgctgctggccctggcctttgccggggtcagtgtgtggaatgaatataaacagtccatcatagacaaccagaagcagcagatgcttctgaccgcccagagcctggcggacaatctggaggtgctgattgaggaatataaggcggacctggaggctctgagcggcatggccctcaggaggactgagggggatggggaaccggactggaccgtgttccaggagtatgccggcgcccatcatgcatttgtctatgacatcatgctggaaaatgaggatggagaggtggtgcggagcatgaaggggcaccggattatcaccatatattccgtcagcgcggttgacagcaccatgaaactgtatcaggccaggttggacaacggggaaatctatctgatattaaagaaaaagaccgaacacaagaattcaatctcccttgtcattgacggccaggcctattaccagagcatgatttccggtattcgcttggggaccaacggctatgtggtggtcaaggattccaagggaaccatcctgatgcacccggcccaggaacaatgggggattgatgtcatatatggacggcgccaactgtatccggataaggacctggccagcctggaggatatgatagacaaacagaaccaagggcaggaaggggtatcggagtattattcctactggtggaccgaaccggaagcgccaagggtaaagaagataagcgcctattccccggcccccataggtcaggatttcctggtggtcagcgctgtcattgattatgacgatatctatatacccattgcggagggatttttaaagctggtcatggtgttttcaggcattattggggccatccttcttatgggggcttatatgttccgcctggtgctccagcggaaaaaggatacggagcagattgcctatctgaccgagcttaaccgcctgctggaggaaatgcaccagagtgaggaggccattgcccatcagcagaggctccagattatggggaccatgacaggcggcattgcccatgaattcaacaacctgcttacgcccataatggggtatgcggagatgcttatgatggacctggatgaggactgcgggtcatatgacagtgcgtcggaaatctacgaagcttcggtaaaggcaaaagaaatcatacagcagatatcctccctcagcaggaagaacatggagacagcctataagaacatgggggcggagcggatgatgaaacgcgccctgaaattggtacggtccgtatgcccatccaatgtgcacctggaaacagacctggatttcaggggaaaatgcattcttggaaatgaaactcagatgaaccaggtcatcctgaatatatgcgtcaatgccattcacgccataggccatgaggacggccggattcttgtaaggggcaggacagtggaaaaaagggatctggagtccggctgtcctgtaccggtttcaggtacctgggatgagtatgtgagaatcggcattgaggacaatggctgcggcatgagccaggatgtgctgaaacagatatttgacccgttttttaccacaaaaaagggaggaaagggaaccggactggggctggccctggtggaacaaatcatcacctcccacaggggatacatatatgcgcagagccagccgggaaacggcagcgtattccacatttacctgcctgtcaatgaacagacagagccggatagtgaggaagcggggacggaggccagagagcctgagctgcggcttcttattgcagatgacaaccccaaggtgctggggcttctggaaaagaactttcaccgccttaagataccggtggtgacagccatgggatttgaggaggccgggaagcttctgaggacccgtacctttgacgctgtggtggcggaccagtacatggaaggaggcagcgcagtggatttctgtatgtccgtccaggggcagtatcccggcctgataaaaattgtcatggcggaccaggtggacagggagctggcggaggccaggcagaggggaatcatagacgggtacattgacaagccggtctcagacacctctatactgaaagccctcaggaactgcgggcgggaaatggaatcttaacaatcattcatgttcctcttaatccgatttaagggaccggccgtaagggtgtaaggttgggcgcttatacttgaatcataaaataaatgagaagaggaggaacagacatgagtgagaccatgcttgcattgctgggctttgcaaccattatcatgattattgttttgttgctgaaaaacgttacggtgccggccattgcattcatcggcgtgtccacggtgacagccctgattctggtgctgaccggtacatttacggtaaaagaaatggggggatttatcaaggcgggcgtacagggggtacattccacagcggccctgttcattttctcggtgctgtttttcggaatcatgacagatgtggggatgtttgaccgcatcatcaatgccctgatgaagagagtgggacacaatgtggtgggggtagcccttatgacctgtatcattgccatgattggacatctggacggaggcggggcatccacctttctgattaccattccggccatgctgcctgtatacaagcgcttgaagatgcgtcccaccaccctgctgctgatttgcgtgactgccatgggcgtcatgaatcttctgccttggggcggccctaccatgcgtactgcttctgtgctggagattgaatccaatgtactctggatgaagcttatgcccatgcagattgtaggtatcggcattgcattgttcactgctgtgttctggggatttgtggagaaaaaaaggggcgcgggcattgacagcggcctggcggcggatgacagcgggattttagagattgcagaggaggcaggggaccacagcgatttggtcaggccgggaatgttctggttcaatgtatgtctgaccctgttcatcattgtgtgccttatatggcttcccgtgccatcctattacacctttatgctgggatgcgtgattgcgctcctggtcaattatcccggagccaggcttcagaataaaatcatcaagtcccatgcagggcctgccctgatgatggcctctaccattctggcagcaggcgtgttcctgggcgtgctggaggacagtgaaatcatgaaccatatggcaaatgtgctggcgtccttcatacctcagtccatgggaaggttcctgccgtttatcatcggagtgctgtccgtgccgcttacactgatgttctgtacggactcttatttctacgggctgctgcctgtgctgattggagtggggaacaagttcggcgtggaccctgtacatatcggcattgcaatggtggtgtgccgcaactgcgccaccttcatcagcccggtggtgcctgctaccttcctgggggtgggactggccggcgtggaaatcaaggaccacatcaggacctccttcttctggatatggggcgtcagccttgtgtgcatggtggcaggactgctgttaggggtgctttccgtcagctgacgatgaaaagaacggctttgtgatggataggtacgccgggccatgtaacggcgggcaggctatcaaattggatgtcgggccgtgtacggctggcggactattaaacaggaaacttcacaaatcggcaaagatggtttataatagactggaaataaaaaatggcataacaaaagagcgaaggtgtgacttcgccatgacgttgtttatgcagttttttgtttttggtttaggctgcactatctgacggtagagaaagaataaggagtatggagctatccatatcccataacctttcgaaagcgttcaaatagtgcagttttttgtggtaaacttctaaaaccaacatagaagtgccacacttcgggcatctgagcggatcatagccaaaggtcagaaggattgaattacgccagtccaggagtcgggaaagatattgccgcttctgatgggataaacatttccggagatttttttcctgtttatggtgctttgcatgaatgccatagtatcggaccattttaaaatgcttgtcagggatatgtacaatcaggcgtttgataaagtgggtgacgggaacacattccgtgatcgttttatgatcctcatggcgctgataatggaacgtcacgaaattaccgtcataggcatcaatcctggaagtagcaataacaggtctcccaaggtatctgctgatgtatttaatggtgatatcaggagaacacaagttaggcttagctctaacataaaagccttcgggatggtctttgtagagctgatttttaagcttctaaaaagaagatcccagtttaagggagagctgatctaaaaggactttacggaaagccaggcgcaggaagtcataatcaaaatgggtattggttcgccagggggtaaaattgccagcgcctccttcagaaatcagggtatggatgtgaggattccatttcaaatccctaccaaaggtatggagtacgcagataaagccaggggtaaagtgttcggacttgttaagtttgaagaacatgcgcaggataacatccctgacagaatggaacaggcagttaaggagtgagtgatccttaagaaaaaagatacgcagttcctcaggaatcgtaaagacacagtgcctgtgattgcaggaaatgagtttacaggacatacgaaaagcgcgtttctggttatacatgttgccacaggaaggacagaagcggcttttacaggagaagggaacaaatttaaggttaccacaatgagggcagccaaagaaagcgcccccgaaagaaggatcatggcaattgatcatcctgtcgatgttatccaaaacattcttgccggggcggatgacatattggacgtattcaaagtggtcagaaaaaatagtttggaggatgttctttttacacataaaaacattttacaataaaaagatacaaagagaacccccaaaatcccctcatgagtgaggggagggcactgaaaaagtagataataccgcctgtgtttgctataatgtatatatcaaatataggcggtgtttttatgatcgaacaacagcagagattggtgttaagtccatacatggaaatatatgaattagtaatcccgaaagataatcttcttcgacagataaaagaattggttgattttagctttatttacgatgaactacttgataaatattgtctgaataacggacgaaatgcagttccgcctatccgaatgtttaaatatctgcttttaaaatcaatttatgatttatctgatgttgatgttgtagagcgttctaaatatgatatgtctttaaatattttctggacatggcgccagaagatgaggtcataaaccccagttcattgactaagtttcgcaagctacgcttaaaagatatgaatcttttagatatgctgattgctaaaacggttcagattgcattggataaaggaatcataagatcaaaatctattattgtggatgccactcatacaaaatcaagatataaccaaaaaacaccgcgtcaggcacttcaggatcagtctaagaaactgcgatgtaccatctatgaaatagatgaaacaatgaaagataaattccccaataaaaacaccgaagattctttagaaaaagaattagaatactgtaaacagcttatctcagtcataaaaggaaatgaagaattatgcagttatccgaaagtgcaggaaaaattaaatctattagaggaatcggtcagtgatgatatggaatatttggaaacttcaaaggatggagatgcaaaaatcggtcataaaacagccgatacttctttctttggatataagacccatatcgccatgacagaagaacggatcattacggctgcaactgttaccagcggagaaaaaacagacggaaaagaattaccggcgctgattcagaaaagccgggaggcagggatggaaattgaaaccgtaattggagacaaagcgtattcaagcaaagaaaatatagatgcagctaaagatggagattatgaactcgtatccagattaaacagtattgttacccaagggaaccgtacaaagccagatgagtttgagtttaataaggatgcaggtatgtaccaatgcaaggcaggacatctggcaatacgaaaagcaaaagacagcaggaaatcagagggcaaaaatccaagagtcgtatattttttcgatgttgagaaatgtaaaagatgtccgtatcgggagggttgctataaagaaggtgcgaaatcaaagcaatatacggaaacccttatctgtgacagccatagtgaacaggcaaaagagcgatataaaatagaagccaagaatagcgaattaaaacatagacatggttatgacgttgcgtcatcgtcaggtcttattggcatggaaatgcagggagctatggctatatttgcggtaaaccttaaaagaatcataaagttaatgggagaaaaataatcaggtttagcatataaattcaatcaaatagaatccagaattcagaaaatccgccagaactcaatctgagactagtacagcattgccaaaataataatgaatagacgttgcttttttattgtagtcggtgcataataattctatcactaaagaatggatgtgttattatgcgaaggaaaacaattgatactatcccggttttatctgatgccatgaaaaacatattatctgctttttcaaaaagccgctcccttccgtcaggactggtcaaaagagccagcattgtcctgcttgcgtcacagggggaactcaaccagaatattgcaccacaggtcgggcttcattataataatgttgccacctggcgcagtcggttcctcgcggcgctcccagccttgcggaggattgaaatggacgacccgaaaaagcttgaagatgagatacgggcagtcctgtccgataaaaaacgccccgatgccccgtctgtttttacgccggaccagatcaggcggatcatcggccttgcctgcagcagcccaaatgattttgggtacgaagtaagccagtggagcctcccgctgttagtggcagaaattaaaaagcaggggatcgctgaacagatttctgagaaatctgtcagccgtttttttaaaatgaggtagatttacatccccacaaaatccgttactggcttcattcttcggaaaagacggaagccccggaatcttttgcgcggaaagtaaacgaaatctgcggcctgtaccagagtgcccaggaacaaagccgggaaggtgcacacattgtttccacggatgaaatgaccggggtacaagcgctggaacataaatatcctgacaagctcccattacccggccagtgcgccaaaatggagtttgagtatatccgccatggcacgaccagcctcatcgggttctttgatgttgcaacgggccgtatggaaatgccgtatttaaactccacacgcacagaagaggattttgtggaagccgtgaaagcattggtaaggacagacccgcaagccccatggacatttatatgcgatggcctaaacacccataagtcggaagcccttgtccgctatgtggcagaagcctgtgcccttggcgtggaactgggcaaaaaagggaaaacagggatccttaaaagtatggaaagccgggcggatttcctgcatgacccttcccaccggatccgctttgtctatactccgaaacacagttcctggatgaaccagattgagatatggtttggcatcattaaccggaagctgctgaagcggaaaagctacctatcaatagaagaactggaagcaagcatcctgcgctttattgaacaatacaatcttacagcacacccatttaagtggacatatgccgggataccattagtaatttaatcactgatatttaagcaatgctgtactagtggatttcttatgtccttaaaaataaaatttgaaagacctgtgtttttcagtgccctcgagtgaggggctaggggagttgaggtgccgaaggcactttcttgtattatagggtgcgcccagctaagggcttgaaatttagtgggtgagagtcccacggtgtaaggtacaagctataccgcatcaagcgagtcttgggtggacagcagcgatgttgcctgctaagcgtagacagcgggattgcagggcatagccgtatatagcttcgatattaaaatgaaattgggaaggcagaagtgctcctatacactgaaagcaacacagctgtagtcgttaagagcgagaatgcagctgcttccccggggttttaaggctggtcatgtaatcaaggattttaagtcaactggggaggtctgccaggctccgggcaggttgcgtaagcccggtatacggaacaacggtagaaaggagaaccgtaaatggccggcagaagtcggatggccgaatagtacacagcaaaaaaaagcggtggaagtcgagagagacctgtcctcgcaggtcagccatgcaaagtcatatcaaagaggaaacataatctgtacgcagagacaggagaaattatggaaacgaaattggcgagaatatcacagttgtcaagcgaacatccggaaatggtatttacgtccatagggcatctgattaataaagagttactgaaagaatgccacaaggagatggatggaaagaaagcggtaggaattgatggaattaccaaagaggactacgaagtaaatttggaagaaaacttagatgaattaatcaggaaaatgaagaagaaggcatacaagcccaaaccggcaaaacgggtggaaataccaaaagaaaatggaaagacccgcccgctcagtatatcctgctatgaggataagttagtacaggaagcgctaaggcgaatactggaagcagtgttcgagccccatttctacgaagaaatgatgggattccgcccaggaaggaactgccacatggcattaaggagactgaatgggatgctggaaagggaaaagacgaattgggtgctggacgcagacattaaagggtttttcgaccatttagaccatgaatggatagtaaagttcatagaatcgcggataaaagacccgaccattatcagactggtaagacggatgctgaaagcgggaatcatgagagatttcagatatgaggagacagaagaaggggcaggccaaggctcggactgctccccggtcatagccaatatatatatgcactatgtgctgatatggtggttcagggagaaagtacagccagtgatgagaggatatgcggggctggtagtctatgcggatgattttgtgggatgcttccaatataaatcagatgcagaaatattttatgaacacttaaagcgcagaatgaagtactttggactagaattggaggaaagcaagacaaggttgattgaatttggccgattcgcagaaagtaaccggaaagaccggggaaaagggaggccggagacgttcacattcctgggattcacgcattactgttcgcatggcaggacgggaaagttcagagtaaagaggaaaaccagtaagaaaaagcttgcaaagaaaagcagggaaataaacgccatgataagagacatgaggtttctggagataaacaggatagtaaagaaactaaatgaagtactgactggttattatcattattacggaattactgacaattcaagaagcctgaactcattcaataatgtggtatggtttaggttattctactggctgaacagaagaagtcagagaaggagctatacgaaggaaggatataaggaactaatgagacagttcccgcttgtgcggccacgtatttatgtcagtatatacggataactgtagatgtattagctttgcagggagccggatgcgggaaagctgcatgtccggttctgagaggggtaagccctgtaaggggcttacctacttaccaaagtccttgctgaaataaagttatgtaaactaatgattctgccaaaggagggtatagaaaacagacggtgatttagaacaggtcgatatagaacccttcttcccatccatcatcgtcgaggtcgtcatcttcagttaaaaagtaatgcatatccaataaatcagaatcggtcatatttctgaccagtttgggtgtcattccttctggaggatttttgatgtatttttgtctgagttcatccacatatctttgattcatttgcaactgcctcccatctgtaataaatgtagtatgaagcagatgggagagaaagtcaagcagagcgggaccggggataaaggccatgccttatccttgtccttttgtataattcatccagaggaacccgttcatgtttatggtacagctctagaaagaccatttcatgtctgcagtttgggcattgcagggggtcgtaccccatggtaagaaggaaaagcttacgccaggtgttgaaatcgaggagaatcctgtgtttggattttgggactgctttatggagctgattgtcaatctcccggtgtctggcataaagcccatagtaccgggtcatcttgaagtttttttcaggtatatgcagaatgagcagcttaatgaaatcaatggcgggaagagtcttttttacaaaagagttgtcttcatgcttattgtaatggaaagtcaccatctccccatcgtaggaatcaatcctggaaagagcaatgacagggcggccaagataacggctgacatatttaataatggattctgggtcgcaaagattgggcttggcataaacgtagaatccatttctgtccctatggtaaacggcggctttcatctttttaaaagagggaccgatgcgtttttccagtttatttaacaaaacagtctgaaaggatttacggaggtaggaataattgaaatatgtgaccttgcgccagacaccatcatcagaaaacccgccttcggtaaggagacagtggatgtgtggattccaaccgagagggcgaccgaaggtatgaaggacacagataaacccagggacaaagtttttggatttgttcagggagaaaaaatattctttgatgacatcagaaacagcctcgaaaaggcagttaagcagagtgcggtcttcgaggaaaaagcggcggagggattcgtcaatggtgaagacgagatggcgatgggtacactgtattaatttaaaagacatagcggtagacctgtcattggaatacttagcgccgcaggaggggcaaaacttggagtggcagcggaaaggaacgaacttgaggttaccgcaatggggacagccatacatggcgccaccataagaaggatccccgcagttaatgaccttatcaatgttttccatgacgacaggtctgggttttatatcgtattcaatgatttcgtaatagtctctgagcatcttctgaatcacattcatgagattattatggaataaaatgacgcaaaaaacaagccctaattcccctcatgaatgaggggctaggggagttgaggtgccgaaggcactttcttgtattatagggtgcgcccagctaagggcttgaaatttagtgggtgagagtcccacggtgtaaggtacaagctataccgcatcaagcgagtcttgggtggacagcagcgatgttgcctgctaagcgtagacagcgggattgcagggcatagccgtatatagcttcgatattaaaatgaaattgggaaggcagaagtgctcctatacactgaaagcaacacagctgtagtcgttaagagcgagaatgcagctgcttccccggggttttaaggctggtcatgtaatcaaggattttaagtcaactggggaggtctgccaggctccgggcaggttgcgtaagcccggtatacggaacaacggtagaaaggagaaccgtaaatggccggcagaagtcggatggccgaatagtacacagcaaaaaaaagcggtggaagtcgagagagacctgtcctcgcaggtcagccatgcaaagtcatatcaaagaggaaacataatctgtacgcagagacaggagaaattatggaaacgaaattggcgagaatatcacagttgtcaagcgaacatccggaaatggtatttacgtccatagggcatctgattaataaagagttactgaaagaatgccacaaggagatggatggaaagaaagcggtaggaattgatggaattaccaaagaggactacgaagtaaatttggaagaaaacttagatgaattaatcaggaaaatgaagaagaaggcatacaagcccaaaccggcaaaacgggtggaaataccaaaagaaaatggaaagacccgcccgctcagtatatcctgctatgaggataagttagtacaggaagcgctaaggcgaatactggaagcagtgttcgagccccatttctacgaagaaatgatgggattccgcccaggaaggaactgccacatggcattaaggagactgaatgggatgctggaaagggaaaagacgaattgggtgctggacgcagacattaaagggtttttcgaccatttagaccatgaatggatagtaaagttcatagaatcgcggataaaagacccgaccattatcagactggtaagacggatgctgaaagcgggaatcatgagagatttcagatatgaggagacagaagaaggggcaggccaaggctcggactgctccccggtcatagccaatatatatatgcactatgtgctgatatggtggttcagggagaaagtacagccagtgatgagaggatatgcggggctggtagtctatgcggatgattttgtgggatgcttccaatataaatcagatgcagaaatattttatgaacacttaaagcgcagaatgaagtactttggactagaattggaggaaagcaagacaaggttgattgaatttggccgattcgcagaaagtaaccggaaagaccggggaaaagggaggccggagacgttcacattcctgggattcacgcattactgttcgcatggcaggacgggaaagttcagagtaaagaggaaaaccagtaagaaaaagcttgcaaagaaaagcagggaaataaacgccatgataagagacatgaggtttctggagataaacaggatagtaaagaaactaaatgaagtactgactggttattatcattattacggaattactgacaattcaagaagcctgaactcattcaataatgtggtatggtttaggttattctactggctgaacagaagaagtcagagaaggagctatacgaaggaaggatataaggaactaatgagacagttcccgcttgtgcggccacgtatttatgtcagtatatacggataactgtagatgtattagctttgcagggagccggatgcgggaaagctgcatgtccggttctgagaggggtaagccctgtaaggggcttacctacttaccaaaatacttttataccagcctgcgttgatcctgtcggttataaagaaacctcctcacttccatgttcggggaaacctcatcatcatcaatcactacataatagattataaaattatcaacatagatgcggtaataggcatatttccgctcccggatggaatgatatggctcaaaggattctgccaccggaagccgatccagtagggctttctcaactttatccaacaggtcactggcagctttggggttcttcagcttttcagcgatatacgttatcttttcgtcaagatcctcataaaaaagcggcaggtaacgtaatctgtatttcttatcatacatttattttcctccggaggctcccaaacacttcctcatgggtcattcttctgctgttctctgcggctgcccggtctgcctcgtccagtgccgcctctacgccatctgtaagctgggaatacatgtccaggctgaggaccaccatagcgccatatccgttttttgtaaggtatactggctccccttcattcacaagcctttcaatgtccggaaatttatttctaaggtctgaaacaggtctgatctgtatcatacatcactcctccttatcttaattctatcataattttatcatttcttttattctacctgattatacatcaaaatgcaatgaaaacaggatattttgttttgcaaaaggtctggcacgaaattggcacagttctgctctttccacgtaaatagggatatgttacactaaatatgcttaaaactgcacccaaaagcaatccgggctggcatggcacctttccaaagaggtgctttttttgcgcctcttaccgcagatccggcttttcaccgcctgccagcccaaagaaagaagaccgtgcccctctctgtggcatggtcttttctttccacaaccaaatcttatttaaaggaggtccacaaattgagactgaaaaacaaactgcagacgcctgccccggcaggtaagaagctccgccacaggttctcccctgcaaaggcagcctactatgccttcctgagttttataatgttcttaatgactacccagccagtctatgccacagatgtatggacgaaagccgcgcatggctgaagcgcatctgcatcacctgggcgatcttaaacggcctggggttcatcatggcctgcatcaccccgttctttgcggatggcaagtggagtggctgacgccggaaaggagtgatcgtttatgggtattttagacggcattgtggagtggatcgccgaacaggtgatgaatggccttgaccttataaccacttcggtcctgggggcgctgggctgtgacatgaccgtgttcctccgctacttccccgctgccgagatcatgtataaggtctttgtggcgctggctatcggcatcatccttttaaactgggtatggcagctgttcaaaaactttggcctgggggccggcattgaggcagaggacccggtgcgcctgagcatccgttccgtcctcttcatcctgctggcctatttcacggacgggatcgtggatactgtcttaaaaataggtggcaccccctaccactggatcatggactccgacctgcccgctttaagtttcgcggactttaattcggtgatgctggccatcatcggtgtatgcgccaacggtgcggtggcactgattgcgctgatcgttgtgctggtactggcatggaactacctgaagctcctttttgaagcggcagaacggtatgtccttttaggggtactggtctacacggcacccgtggccttttccatgggggcttcccagtccaccgggggcatttttaagtcctggtgccggatgttcggcgggcaggtgttcctcctgctcatgaacgcctggtgcctgcggctgttcacaagcatggtcggggcgttcatcgcaaacccgctctcactgtgagaaaaatagaaaggaatgacaataaccatgaaaaaatataaaaaggtacttactgcggcctttctgatggtgctccttctctgcctgtcctgccagacggcctttgcattttcggagagtgatgcccaggtgaatgcggcaggacgggaggcggtatcgggcaacgtcctggtctggttcctgtgcgccatctcattcctgaaagtgtcgcaaaaaattgattccttcatgtccagcctgggcgtgaacgtggggcatacgggcggctccatgattgcggaggctatgatcgccgcaaggggcgtgggcgctgtccgcaacttttcccgccagcatttcggcggcggccacagcagcagctcttcccatgtaaacaccggctccggctcacccggaagccccggcagtccgggcgggtttatggcaggcggccttgcgggggtggtcagccggcaggtcacaaacagcgccatccgcacagccacctcccacacggaaacaagccggcagggcggaaaggctcccggcggcagtatcggcgggtttgcgtccgccgtatctgccggcatcggagggaacatgtatgcttcttccgttgcaaagggcggcgattttgccaacagcgtcattggcacggtggcagccggaaacattgtctccgtaggttccatgaccggggaaaaggctgcccaggccctccactcctacatgggctatgccgccctggaggaaggagcacagcatgtaccgtcctttaccaacgtggagatcgggggcgggcgcattaccggcacggagatctcggaggaacacccggagggcatttccttcggcatgtaccatgcggaccagtacaccgcgccggaaggggcttatgctaccgtgtaggccgtggacggcacttcctggtacaagcagtacgcacagtacgccgtggaaaaatccccttacatggcggcggacggctccatcgcctataaggaatccattgtgaaaaaaatgcccccgacgcctctgcggcacaccttgccaggggcgccgtaaaagcagggaaggcggtgtccggagccgcaaagggcgccgccgtgggcgggccctacggcgcagcggcgggggcgttatgggaaggccgcaaatctatcggaaaggtcctggtggcagccgctgtcctgttactgctcccggtgctttttgtgctgatgctccccggcctgatctttgacgggttttccgctgctttctcccccgctgaccctgggacgcccatcctgaacagcgaaaccgccattgtggagaacgccaacaccataaccttcaccatcagcagcatcctgggtgaaggcatggaagatgtcatggaacggatcggacgggattttgccgcctcggacggagatgaaatggaggtcatcaacccctatgaaacaagccccgtatacaatgccaacctttttgtctcccaatactgcgcggcaaaggacagggaatttgcggatatctccattacggacatggcggctgtcatgcgccgtgggaaatcgcacctttactcctataggcggaccgaggagatccgtgaaaagacggtggaggacccggagaccggggaagagaccaccgtatcagagaaatggatggtctataccatttcctacaacggggaagattattttttcggccaggtattctcactcacggaagaacaaagggagcttgccgccgattacgcacagaacctgagcctttttctgggggacgggctggtccagaacctggaaaactgggaagggaacagcatcccctccctgggtgatgtacgctttacggacggcagcacagaagttgtctatttcaaccagctggatgaacgctatgccgggaagccttacggcaccgaccatatcggcggctacggctgcgggcctgcttccatggcaatggtggtgtcttccctggccggcgagaccgttgacccggcacggatggcacagtgggcttatgaaaacggctactggtgcaaaggcagcggatcctaccatgcgctgatccccggcgccgcagaaaactgggggcttgccgtttccggctgtaccccttcggaaccccagcggctgctggacgcactggcagactggaagctggtggtggccatcatgtcaaaaggacacttcacaagcggcggccattttatcgtgctgcggggagtgaaggacgggaagatcctggtggcggaccccgccagctacaaacggagcggacggctctgggagctttccatcatattgaacgaagccagccggcgcgcaggcgcaggcggcccattctggatcatcgggtgagacacatgcccgtatccggctgaaacgggcaaggaatgtgatcgaggccggcatcctggccgccgtgaccgggctgccggtatttctgttcctgcccttcagtctgaccgcacggattatcgtgctgtgcctgactaccctgccccttgtcctgtttgccctgatcggcatatcgggggaaagcctgtcctccttccttgtcatcttcttaaaatacatgaagaaccgccgtatcgtgggcggcggtgaaagccaggaagcaatgcaggcggccacatctgcgaaaaagagcaggaaaagcggcagcaggaaaagtcctgtttccagcgaaaacgcagcatccaccagcaccagtcaggacatgaaaacggacagaaataaccataaacccggcaaaaatgaaaagatcggcggcatatccggctggcggcgcagaggggaggaagatttccccgcagagtttgaccaggtaaaaggatatgagatccgccagaagctccgccccagccaggcgcagaaaaaacagaaggccggaacgcagcgaaagaaatctgcaggggaaagagacggagtccacaacaggattccagaaaaaaggccgctggaaaatcaggaagaccggatcacagaaacagccggcagaaaaagaaccattcccccagaaagcctctgcacacgccggaaccgcagtttacccacttgaacccggtggcggactacctgcccatcagcaggatagaaaacggcatcatctacacgaaggaccaccggtatgtgaaggtggtggaggtgatccccatcaacttcctgctccgcagcgccagggaacagaggagcatcatctattcctttgtttcctatttaaagataagcccggtaaagctccagttcaaggtgctgacccgccgcgcggatatcgggcgccacatggacacggtgcgccgggagatggcccaggagaccaacgaacagtgccggctcatgcaggaggattacctgcagttcatccagtagatctgttcccgcgaggcagtcacgcgccggttcttcctggtctttgaatacgagccctggagcaacgcaaggcgcacggacgaggaaggggaagccatcggctccctgcagtccgccgtccacacggcagtgggttacctgcgccagtgcgggaatgaagtggtgctgccggacaacgaggacgaattcaccatagacgtgctctataacctcctgtgccggaatgagagcgccgcaaagcccctccccgtccgggcaaaagaggtggtggcgcagtacctggcaaacgggagggaggcggagatcggccatatccctgccggggagttcatcgcccccacaagcattgactttacccacgggcggtacatctgcattgacgggctttattacgcctacctgctgatcccctcggacggctataagacccatgtgccggccggctggctcagcctgatggtcaacgccggggacgggatcgacctggacatgtttctctcccgccagcccaaggagcgcatcatccagaaggtgggccagcagctccgcatcaaccgctcccggatcaaggacgccagcgataccaacacggattttgacgatatcgacagcgccatccgcagcggctacttcctgaaggaagggcttgccaacaacgaagatttttattttatgaacctgttagttaccattacggcccccaatgaagaggacctggaatggaaggtcagcgagatgaaaaactcctgctctcccaggacatgcgggtttccacctgccacttccgggaagaacaggcattccagaccgccctgcccctggtgtccgtggaaaaagggctgtacgagcgcagcaagcgcaacctccttaccgggggcgccgcaagctgctatcccttcaccagctatgagatgtgcgatgacaacggcatccttttaggcgtgaacagatacaacagttccctgattattgtggatatcttcaactccgctgtctacaaaaacgcaaacatggcgatcctgggcacttccggcgcgggcaagaccttcaccatgcagctcatggccctgcggatgcggcgcaagggaatccccattttcatcattgccccgttaaaggggcatgagttccaccgggcctgcgccaacgtgggcggcgagttcatccaggtctccccggcaagcccccactgtatcaacgtgatggagatccggcaggtggaccgcaccgtgaacgaactgctggacggccccggcatccagctctcggaactggcggagaagatccagcggctccatatctttttcagcctgctgatcccggatatgaaccatgaggagcgccagcttttggacgaggccctgatccacacctacaacaagaagggcatcacccatgacaacgcttccctggcagccccccaaaacccggaacgataccgggaattgccggtactgggcgacctctacgagattttaaagaaatcggcggccaccaggcggctggcaaatatcctgaagcgcctggtgaacggctccgccagcaccttcaaccagcagaccaacgtgtccctggataacaaatataccgtgctggatatatcttccctgaccggggacctgctgaccgtgggcatgttcgttgccctggatgtgcgctttgtttcttattaatctccatagaaatatggaacaaagcaagacagatttcttaaaggtaaaagagtatgcggaacaaggatacacccatgcggcagcattggacttgtcgaaatactttgatagcctgaatcatgagaagctcttaaatatcctgcgcagagacgtgaaggatgaaagggtcatccagtagattaagagatacttaaagagcggcgttatggagaacggagtagtcatggaaacggaggcggagactggaacaaagattccgggactatggactggaactgaatctggaaaagacaaggattgtatactgcgaagttgatgaccgcagaggaagtcatgagaatacatctattgattttcttggatatacattccgccccagacatgcgaagaacagatatgggtagttctttacgaactttctgccggcaatcagtgaaaaggcaaagaaatccatccgcaaagaagtatgggggtggaaactgcagctaaagccggataaagacctctatcatatagcaaatatgttcaaccgaaagatacagggatggattaactattacactcatttttacaaatcagagatatatgttgtgctaaggtacatcaacgggtgtttggtaaagtgggtgcgcagaaagtacaagaaacgtggagcaagaagaaaagcagaacattggcttggagaggttgcgaaacgtgacagaaacttgttactccccgcaaaacggtatcatcctgctggtgatggcgtttcttatcagcccttacggtctgccgatggcagcgttttggctactgggcaaggtgcaggacctgaaatttgcgattcaaggcagggtgtatggaaaatcaattaaccccaaacagttccatgattctggaaatccgggaactgatggaaaacgccagaaagaatattgcccaacaggtcaacacccggctgctaacaacctactggaatattggccggattatcgtggaatatgaacaaaaaaaccagatccgtgcagattatggaaaacaaacattaaaggaactttccaaagaactgacacaggaatttggcaaaggtttttcgtggtccaacttgcaaaatatgcgggcattttatcttgcttatgaaaaatgccagacggtgtctggcaaattgtcctggtcccattactgtgagcttttaagcatttccgacgataacaagcgcagcttttatgagaaagagtccattaattccggctggtctgttcgggaactgaaacggcagctcgacagctcactgtatgaacggctgcttttatcaaacggagacgtcaacaaggaaaaggtcctctctctggcacagaaagggattgagatcagccagccagctgacatcatccgtgactcctatttgtttgagtttttgggtgtgccggaatataagcccatgttggaaagcgatttggaaaaagcccttgtcgcgcaaattgaaaagtttcttttggagcttgggcgcggttttatgtttgtcggaacccatcagcgtgtgaccctgaacaatacccgctactatgtggacatggtgttttacaacaaaattctccgcgcttatgtgctgattgaactgaaaacgaaaaaacttacgccagaagccgccggtcagctcaatatgtacctgaattattacgcggcggaagtcaacgatccggacgataaccctcctatcggcattatcctctgtaccgacaaagacagtatcgcggcagaatatgccctgggcggtctgtccaacaatatttttgcatcccgctatgttctctatatgccagacaaggaacagttgattgctcaggtggaggctgtcttgaaaaactggcatgaaaagaaagacaatggccatgaatgaaaaagaactgattgggaaagtacattcggcagtttatcaccaatgccagcggcgcggctatgcggctcccgtggatgtgctgatggaggttggcgttcttccaaagcagaaatatgaggactggcggttcgggcgggtagattatctggaacgggtctgtaccgtcaatctgcgcaagctctcgttcatcatgcaccagatgcggatgtgcgctcagaaaagtggattgaagccctctttctgctattataaacagtggggcgtaaaaaagaaaaatggtcagggccataagccggtggttccgctgcggttcagcaaaagcgggaaccctgaaattgaaaaatggtatgcaactcattttgtggacaccaaacgggttgcagttctaaaagcacagcagcatattgaaaatccagattgaccaaaggacagctctcacgcagctgtccttttctttttgggaaaggaggaactcactatggcaaccaaacgcatcatgccgctgcacatcggcaagggccgcaccgagagccaagctgtcagcgacaccatatacatcgagaacggcttatccattgtggagaatcccaagccccacggaaaaagctacaacaagtggctgggcgatcaggccaagccctcccgccgggagcggctgcgggtgatgattgaccgggcgctggagcaaaagcccgcagactttgatgagctgctgaaactgctttccgagatgggctgcgaagtatcccggcgcgggaaagcgacccggctcaaggcccccgtctggaaaaacattgcccgttttacgggtggcggcgactgccaaaggtggtaatggctgtaccgaggatgatggataacacagttcttgggggaaaggttaaggataattcctgtacagcgcggcaagccggcttcttcagctgcttcataataaaacgtcctgtaaatgggttataaaaccggttaggggcggtacgggaatcccggggattccgggccgtctgttatgttgcagtaccagtatatctcatgcaccccggggggctgtcaagcggggacttcacagaccgttatcagtttggtttttccgtgctggaattcacgattctgcccttgctgtctgtcttgtagtactgtatgggtatattccactggaccgggaatagaatggaataagaatgccatgaaacaggcggagaaacatgctgaattatctatgggcaggaatgacactgacgggaatactctggggggcgcttcacggtcagatgacggctgtgaccgatggtgcaatccaggcatcaaaggaggcggtgacgctgtgcgtcaccatgctgggcgtcatgactctgtggaccggggtactggagatcgggcaccgctccgggttggtagaccagctggcaggaagaatggggccaatactcaccttcctttttccaaggctggacccggacggagaggcaaggaagcagataagcgtcaatatgattgccaacatactgggactggggtgggccgccacgccggccggcttaaaggccatggaggagctgaaaaaggtggaggaggagcgcagaaagggaggcgcggccgggcggaaagatacgccaggacaagaagatacggccgggcggaaagatacgccaggacaagaagagacagccgggcagagagctgcggccagacaggcggggactgccagcaatgagatgtgtacatttctcattatcaacatatcctccctgcagcttatacccatgaacatgattgcgtaccggagccagtacggaagcgtgaatcctactgccattgtaggtccggccctggcggctacctttatcagcacagtggttgcggtgatattctgtagggtcatggaccggtaggtgcgggcggtgcattgaaggatgacgaaagagacgctatactggatacaacagatgaagggaggctgtgggaacggctctatgcgaagacatatcccacagcctgatttaataatgtataacgttgtccgaattctgaattgccgcaattattttctgtgcttctgctgaagtaaagtaattccaggttgtatccggaactttcaaacagcatgtataatccagatttttatccaaagtaattccttctttttccagtagcacttttacctgttttatcccccgatggtcatttggataaatctgtgaaatcacaaatcccataatctattgctcctttaagaaatacaaaaagtatgtaaaggtcagcaggtccgcgcttcctccgggcgaaaaattttactgataaatgccctgtcaagaatctccagcatatcttcctccggataaggatttctttccagaatttcttttatttcttctgtcacctgaagctgagtttcccgattgcttcgcgcaatcagatttgtatctaccgtagataccatcaatgccaacaaagctgcgcaccctgcttgttccagagataaaccttttttcagtcctctttccagagccggtaatccagcctccataactgcgggaacccctttttccgcttgaccgcggattcctgtgattccatattttacatacagtttttctcctgttgttccggcattctcttctgtcactccccgaaaatcatgttcaacaattccttttgtcatcgctgcacattctcccaatacaacttttacatttttcccggggaagacgaccaagagcaccataaagtattccaatagaaaacaacgcacctttatgtgtatttacaccatttgtagcctgattcatatcataaccagcaatttttcctgtccagcgcagtctgcgaaaggtttcttttggaggttcctgggctgtttccattcccatctgtgcacacttcatacaacaggcttctgcaagccagttccgcaatcctccggctatcctgctcctgaaattccttcagcaggagttcctttgtggtctgcttaagctctgcaacagaatgggttctgcttctggcacattccttcgccgggttaccacagagcagacaggttctcggactttcgccgatttccatacgctctatatgattgccattttcatcaagaacatccatatcaaagagacgcccaaccgacagattattttctatttccactgttattttttttatctccacagcattgccttttacacaataataacatacatttcccgtattttcgcaataacattcctgatgcagacattctattccggcactgacaagctgatgtcttaaaatatcacagccatattcaaacgcccggtatattaacctgtcattttgtcgtcttctttttcacattgtttccggtttcttatttgtgcagagggtccgataggaggacggaccactctgctttttataacagatacgatttaaattattctgcaaattcaaatggtttgatctggcgaaccacatccataattgtgccgtcacgtgcttcaattatacctactacacggtctgcgaactgaaccttttccggttctccgacaatagaatatgcgatgtcgcgcaattcttggatcgtctttaacggaatacaatctgctgccttcaacgcttccagaaggtccggtctgcgcggattaacagccacaccataatctgtaaccacaatatcaatgctttctcccggtgttgtaacagtggtaacatcagaacagattgccgggattcttccctgcagaagcggagcaagtacaatcgtacattttgctccggcagctgtatccggatgtcctccctgtgctcctgtaatcacaccgtcagaccctactactacattacagttaaagtttacatccacttccagtgccgccagaattacataatccagtttattaacaaaagaacctttgttgaacggatttgcatacgctcccgcactgattctgaaatgattcggattcttcacatttttgatcgcatccaggtcgaaatcctgtgtatccagcagacagcggaccataccgcgttccagaagatcacacataggttttgtcagaccgcctacaccaaagcccatcttgattccacgatcttccattattttggtaagagaaatcgtagaagcaatcgaagcaccgcctacacctgtctgataggaaaaaccatctttaaaataaggagtattggcaactacctgtgtacagtattccgccatcagaagctttctctgatctgttgtcggttttgccgcccctgttgcaatttttgcaggatcaccgatttcatcaacaacacatacataatccactctctgcatcggtatatgtgccggataattcggaaacggcacaagacagtccgtaatcgcaactactttatctgcatggtttccatcaacatgagaataagaaagaacaccacagtctgctttaccgccgataccacgacagtttccataatcgtcgcaggtcggtgtaccgataaatgcaatatcaatgtgcgcttcacctgtaattatggctcttacacgaccgccatgagaacgcatgatagcaagacctttcagttttccctgtgagatagcttcgccgatcgcaccacgcacacctgatgattcaatattggtaaccgttccgtcttcaatcatcggaacaagcggagcgtgcgcttttccaagagagctcgcacaaatagtaatgtctttcagtcccattttatgaatttcttccattaccatatttacaactttatctccatctctgaaatgatgatggaagctgactgtcattccatcatgtgctccacattttacaagaacatcatgaatggaatctgccagtttactctcggtgttattcataatcggttttacattagaacctacttttttaaattccacaccatctttataatgattgccctggaatacttcttttccggtaattttcagaatttgttccggaatgtctcttcctactgcattaatcattttactgcacctccttatacacgccggatgccttagccagctccagtgtacgttttgcaccatcataaaatgcaatatcgatcatcttgccgtctacggcaaataccccgatgccctgtgccttcttggtttcaatttcattaacaaccttctgtgcaaaggttatgtctttctgagatggtgtaaaaatttcatgtacaatattgatctgacgtggattaataatagattttccatcaaaccccattaagtgaattccttctacatctttacggaaaccttccatattatccagatctgtgtaaacagtgtcaaagcactgtacgccggcagctctcgcggaaatcaccatctgagaacgggctcccatcagctcaattccggtacctgtaatgttggtctgaagatcttttgtataatctccgccggaaagcgcaataccaaacaatctttcagaagcagtacagatatcataggatttcagaacaccttttgcggattcaatagcagccatgatcaaaacgcttccttccggacgatcaaattccttttcagcggctacaatcgccttttccactgctgccacatcttccggacattcagttttcggaatacgaatggaatcacagccacctgccactgcacagcggatatcctctctccagagatctgtatcgagaccgttaatacggacaactctttcacatccatgatagtccagtgttttcagcgcatggtacagggaaaatcttgctgcgtctttctgattttctgctactgcatcttccagatccagcataatggaatccggtttataaatatacgggtctttaatcagacctggtttctgagcatttaagaacatcatggttcttctcagacgttttttatttggacaattcatctgatcgcacctccccatggcaaatccttaaactgctgcatagaacgatatacagcaccctcaatacgggctttgatggtacagtctaatgcacccttgtccacaattttgattttcacactgtcaatatcaagattttttaatgtttccattgtaacttttttaatctgatttccatactggttcagcacagaactttccagttcaaactcgatactgccgtttccagcctctacagtaacctgacagtcactggattccaatgttccggctattgccggcctgataatttccatgataaaatctccttttcttaataaaacagtccgcccagattaaagaggccaagagctgataaaacaacattcagcaatacgtttccaactgaaagaagaaacagctgtttaaacattttgttcagctcgtcatttgttgtttcttttgctgcagaataggaagacatgataatcgcaccgcctgttgataatgggctgattgctgctgcaaaggaagtcgctacaattgcggaaatcaattccacatagtttacactgcctgcaaaagaggctgctacatctgctgcgatcgggaacaatgccggcataaccacacctgttgtagaacttacccaggataaaataccggaagttgcagaaaggatcggagttgctgttttttcattcatcattcctgtcaggaaatttgaaatcagttcgataccgccaagtgtgttgattacattgatcagtgtacctacgccacagataaataccagtgttccccatggaatgctcttaatggctttcttttcatctgcacatcccagaagaatcagtactgcagctacaacaaaggcaaaaagacctgtatctaatttaaatccgatacagcaaactaccataacaataatgccgataatggtatatctctgttcacgattaaatttaggaatttcagaaagcttcagagggttgtctgcttttactttataacctttaaatgccacatataaaatcaaagtaaagataaaaccggaaatcagtgtactcagaaacaggtgcaggccaaatccggaatatcctaacggatcagaaagactttttgcaagaacaccagtcaaagacaacggtgatgcacatcctgcattcgcacccagttttgcatacaacgcagtagcaattggattgattttcatttcaaatgcaagatacattgcaaatgtagtcattaggattccggctgcaatatgtcccggtccgattgcggaaataaaagcggacagtacaaacataaggattggaatcaatacggtattttttcctacaagcgctacaattttctttgaaaacagttccagcgttccattattcgacgccataccaaacaaaaaggtgacaccaacaagtgttacaaacatagaactgctgaaaccattagagatttcttttgcactcatatcacctatggtacctaaaataaatgctacccctaaagaaagaaaacccagattaacttttttaataaatccaatagcaacaaccatcaccaatacgatcaaactaataattgcaagattcatgatgaactccccctatttaatatgtgcggttccgtccatcagcaggtttgctgtacggaatccaaatgtatctgctacaaccggctctgcgccgttttcctcataatctacgccacactccagaacaccgctgggatgtccgatacggataaactgtgtatccacattttcagaaagcacctgattaacaacacttcccggaacaaccgcagcagctgctgtacacatggcccccgtcatggcatagcttggatgtgctttctgcatagacatcattcgtgaaagcagatcaacgttttctttggaaatagaaacaccttctgctgtcacataatctgctgcctcagcaacaaatgtcattttcggaatccctggagtttcccaggcggaacgggtgtaatcttcaatcagaccaatcatcacagctgcaagtcctcttactgtttccagtaaagcaagcttatccgcatctgcatttacttcttccggaagttcaagacctgtcatccccagatccttcgcttttacaaatacaagcggattggctgcatctacgattgatacctctacttttccaaaattgggaacctccagaatatccactacatttcctgtgggaagaagtccgtttccaagagttcctgccggttcaacaaacttcagtttgatcggagccgctgtgcccggaacaccggcaatggcaaaatcaccatcatacaccaccctgcctttttctgtctgaacatctgcaataatgactttattggtatttgtgttaaaaattcttaccggagttgttccctcttttgtctgaataagacctttttcaatggcaaatggtcccacaccggaagaaatatttccacagtttcctttataacttaccaggtccttatctaccgaaacctgtgcaaatgtgtaatccacatccgcatcctctcttgaggatttttttacaattgcaactttgctggtaacggactgcgcaccgccaagtccgtcaatctgttttttatcagggcttcccatcatgctaagaagcagggaatcccattggctcttatcttccggaaggtcttcttccagaaggtaaacacctttacttgttcctccgcgaataatcatagccggaagaaggaatctgtttttatcttcattgtacatttttcttccctcccatgtctatgctttatgagctttgttataattgatcagagaaccacattgaatgatttctttttcttcatctgtcaaaggtgcaattgcaagggaaagcttctttatttcttttccgattacatatgccggaatatcactcatgtcaccatccagtgcttttttaatatccgggacaaagatataatcgtcgtcttcaaagtcaggatttccattcatgataaacggaatcatgccccagttgatcagattggaacgatatcttttagttgcatattccacggtaatatttgctccgccaagaagaactctctgacaggaagcagcctgttctctggcacttccatcgccaggctttacagcataaatcgtactggaaagatcaattttttcttcctgaatttcttcaaatccggaaatatttcgaatcctggaaataatatctgcaacttctgccggacaatttcctgcttttcttgccttttcattttccattaccgcttttgcttttcccacatattccggaacacggcgactgagtgtaaattctgcaagtcccatcggattggaacggaaagaacctgtttcaccggaagggatcaattcatccgtagttgtaaccggatctgtaatatatgcacatactttcagaagcatatggtcgtttaattccggaagttccggccagtctttaatgttcggtccacagataacggtttcttctgaacaccctttgcccacaccctggaacacacgatgctgatatgcttttggatcataacgatattccggacattcaaactcataaccagcttcatccgctgccataatccgtcctccatttgctgaagaaactgcaatggaacgtgcatccatcaatgcaacacttgccagctgtccattacctggtttagaaccttctctgttcgggaaatttctggtggtatgtctgatagaaagtccgttatgtgctggtgtatcacctgctccaaagcatgggccacagaatgctgtccgaatggttgctcctgcttcaatcagatccgccagtgctccatttcgtgtcaattccagcataacggcctgactgcttggataaattccaagtgcatattcatccgttccggtactcttgcctttcagaatatgtgccgcttccataatgttgctgtatgtacctccggcacatcctgcaatagttccctgatcagcataaagcgctccgtttcgcaccttatctctgagattcagccccaggttcggatttttaatcagtttagaagcattttcttcaacttcatgaagaatatcatccatattttcatttaattcacgtatttcatacccatttgacggatggaagggaagagcgatcatgctgtgaatagtggatagatctatgtaaatacatccgtcataatgggcagtttgtgccggatcaagctgtctgtaatcttccgggcggccatgtttgtccagatacgcttttgtatcttcatccgttcgccagatactggataaacaggttgtttccgttgtcataacatcgataccgttacgataatctgttgacatggaagaaactccaggtcctacaaattccataactttattttttacatagccgtttttaaatacggcacttacaacggcaattgcaatatcctggggtccgatacccggatttggttttccatccagatatacggcgataacttccggatattctgcatcccaggtctgttccaacagctgcttaaccagctcaccgccgccttcaccgactgccatcgttcccaatgcaccatagcgagtgtgactgtccgaaccaagaatcatttttccgcatccagccatgctttcgcgcatgtactgatgaataactcccatatgcggcggcagataaattccgccatattttttacatgcagaaagaccgaataagtggtcatcctcattaattgttcctccaactgcacaaagactgttatgacagcaggtcagtacatatggaagcgggaatttttcaagaccggaagctttcgctgtctgtataattcccacataagtcaggtcatgactggttatagaatcaaatttgatttttaactgttcttcatttccactgacgttatgagcctgtaagatactgtaagaaatagttcctttatgagcatcttctttttttctcatcaattcaggagctgcctgagattccggaaccaatgtattgccgttcaaaagatagacgccttcatcataaagcttaatcatggtttttctcctttactgtacgtttatccgggaagtgcacaattccctgactgcaaaggtaccttgcctatgaatccatcataacaaaacaatatttgataatcaaattcatagtattcataaaaatcattcattttaatcatttattatgtggaaaacttacaaatatatctctatttttttatgtaaaacttacaaaaaatgcgtttttatatcagaattccttggttttttattcaagtcctgcgctttcgctaatattcatattttttatatttttcattcataaaaggaatatttattgaattccgtttttaggtatgctatactttttaaaaggaggtttttctatggaatttcgggaatttcaatatgtcatcgcaattgccaaatatcagaatataacaaaagctgccgaatctctgtatatcggacagcctacattaagcaagtttctcaagaatctggaagacgaacttggcgtcagcctttttcgcaaagccggtcataaatatcacctgacctatgtgggagaacgatatctggaaaaagcagagcagatcctgcagttaaaatccgatctggatgcggaactggctgatatcgttaaaagaaatgtaggcgtattacgtcttggttttcccaccatgcgctgtacctatatgctgccagccattcttcccgcatttcaggagatgtttcccaatgtaaaaacccagattgtggaaggaccttccgctgagcttgacaaaaaactgttaaacatggaagtggatcttgctttttataaccagcgttttggagacaccaatccattaatccagacagaaattctcggagaagaagaacttctgatctgtgtaaaaaaaggccaccctatggaacgttttgcccagccaaatcctgccagcaaatatcccagacttgatgttcgcctgctgcaaaatgaaaccattctgctaatgctgaaaaaccaacgaacccgccagattatcgaccagtatcttcaccagcagggcgttgttcttgaaaatatcctgcataccagtaacattcctgcaatcatggaacttatttctgttggatatggtgtcagctttttatttgaacctcatatattacatcataattttagaaatcccatctcatgcttcagcttcggagaaccgcggactacctccgcattagtcgttgcaacccgcaaaaacagttatctcccatcttttgccaatgattttattgaactggccaaacgcctttatatcaatatatagcctgccgccaacagttttctattttttagccggcgcagggaattaatgcttgacaaatccctgcggcggtcatataatcctagaaaacctagtgattaactatgaataaaaagaaaggccctgcacgcctgtgagggaacggtggaagctatgtctaagatttataagggagccattgaactggtaggcaacaccccattggtagaggtgaccaatatcgagaagaaggagcggctgaaagcgcgtcttctggtgaagctggaatacttcaatccggccgggagcgttaaggacagagtgggaaaagccatgattgaggatgcggaacgcaccggcaggctgaaaccgggttctgtcatcattgagcccacgtcaggcaatacaggcattggcctggctgctgtgtctgcggtcaagggctataggatgatactgaccatgcccgataccatgagcgtggagcgccgcaatatactgaaggcatacggggccgaaatagttctgacacccggtgagaagggaatgagcggggctattgaaaaggcggaggagctggcaagggagataccggacagcttcataccggggcagtttgataatccggtgaacccaagggcgcatatggagagcacggggccggaaatctggcatgacacggacgggcaggtagatatatttgtggcgtccgtgggaacaggaggaacccttacaggtaccggaacatatttgaaggaaaagaatccccgcatcaaggttatagccgtggagccatccacatcaccggttctttccggaggaagcgccggcccccataagatccagggaatcggagccggtttcattcccaaggtgctggacacccatatatatgatgaaatcataaccgtggacaatgaagcgccctttgccactgcgaagatgttagccaggacagagggacttctgaccggaatttcatcgggagcagccctgtacgcagccattgaggttgccagacggcctgagaatgagggcaagaccattgtcgtgctgcttcctgacagcggggacaggtattattccacagcgctgtttgtggagtaatcaggattagatattaataagaatcacacggtttgcggatgcgccggacgctgtgacggctccggcgcccaaggataaggtggtccaagcgggcagtcttttcccgtcatgaaacaagcatcaatggaataagatgtaataaacaaacggacctggaactgatatatgaaattcctgatttttttgtcagaggcaatggtccctctgatgattttttatattgtgggctttggccttttgtccgggcgtccggtgctggacgatttcatcgacggggcaaaggacggcatgaagacagtagccggtatcctgccaaccctggtgggacttatggtgtcggtgggagtcctcagggcatccggttttctggattttctgggagagctgcttaagatgcctgcggcccttttacatatacctccccaaatcgtacctgtggtcctggtgcgtctggtatccaactcagcggccacagggctggtgctggacatatttaaggagtacggtacagactcctctctgggacttattgcatccgtgctcatgagcagtacggagacagtgctgtactgtctgagcgtatattttggcagtgtaggcattaccaggaccaggtacacattggccggggggatgattgccacggcggcgggagtggcggccagcgtggtactggccggtgcggttagataaagctgcggccgttgctgtccggagcataaaaaaacattgcaatatcaagggttattgactataatagccatagaaaaagggaatccgttgtatgtgcgccctgtatatgattatatcagggccttagggtgtgcctgcgggcagctggaatggacattccggctggacgatccggacatatgctagcgtacagcgggtttatgctgtggagagaagaggaataaggaatgaaacagtatctgagcctgcgggagcagtatccccgctttgcttacagaggatatgagatagaggaaaatgaaagctgtctgaggatcacataccggtttgagacagtgggactgtctgagtttgcgccggtttgggtgtttccgaaggcagagggggactgtcacagatggtcaaaagacaggctcatgcaggacatgatattttccctgggaatggtggagctggtgagctactggaaaattgcctgcccgcccacagtggcagtggaggccggatggctgaaccaggaccagattgactggtggaaggatctgtattttaacggattgggtgaatttttctatgtaaatggcatagaggaagcggaacccaatcattttatgaatatccggtgtgcaggccaatgtaaagagcggcatgcagcatggggtgcggagatagatgggaatgggaaagcggcgggcatcagcgccgtaaacagtgattccctggcatccggcggggtcctggttcccattggcggaggaaaggattccgtggtgacgctggagcttctgcgcttggcgggaaagaccatctacgcctatatcatcaatcccaggggagctaccatacacaccaccgaggcggcgggcctggacgaggcccatgtcataagtgcaaagcgtaccctggaccccaatatgctggagcttaaccggcagggatatctgaacgggcatacgccgttttccgcgctggtggcattttccggcatcatagctgccaggatgcacggcctgtccatggtggccctgtccaatgaatccagtgccaacgagagcacggtccagggaagcacggtaaaccatcagtattccaagagctttaagtttgaggaggatttccattattatcagaacacatatctgaggggtagcgcgtactattttagtctgctgcgccctttgagtgaattccagattgccaggtattttgcggggcagaagcagtaccatggcatattccggagctgtaatgccggaagcaggactgactcctggtgcggacactgccccaagtgcctgtttgtgtacctgattttgtcgccctttcttacgccgcaggaggtcatggatatttttggccggaacatgctggacgactgggacatgaaggaaaccctggaccagctcattgggatagagaaagagaaaccgtttgagtgtgtgggcagccgcgatgaaataaatacagccatagtgcttacgatcaaagagctggaggaagcgggcgaagcgctgccccgtcttctttcctattataaaaccacggatttgtaccggacctatgaggccaaaggggaccagtactcatcctattatgacgggaataacctggttccggatgacctggcgcggctggtgaggaaatactgtgcagacggcttataaggagaaagaacgtgattgagaagatagaaccctggattaaggggaagcgcatactgcttctgggctatggcagggaagggcagtccacatggaatgtcctcaggcggctgggaacatatgaggtcctggatatagcggatttaaaggctccggctgccgtgccggaggacggtacggtgtggcataccggcccggattaccagaagtgtatggatgactatgatgttgtatttaaaagtcccggaattgtcctggaacggcccgaaaaagaatacaagtgcagtatattgtcccagacagaggtgtttttccagtgctttcgggatcagattatcggaatcacgggaaccaagggcaagagtacggtcacgaccctcctgtatcacctgcttaagcaggcgggcatggatgcccttctggtggggaatataggcataccggccctggaccacatggaggaagtgaagccggacacaaggattgtgtttgagctttcctgccatcagctggaatatatgacggtctcgccccatataggaattctggtgaacatccacgaggaacatctggaccattacggaaccatggaaaagtatgtggaggcaaaacaccacatttttaagaaccagcgcccggacgatatcctgatctgcaacgtgcagtgcctgccggaggagggaacctgcccctccgggctgataagggcgggcatggacggcagcggcaaagagctggatgtggttcaggaacaggacggcacctggattcatttccggggaaggaaattctgcatacccacggatgagattaagctgctgggacagcataattattttgacatcggcgtggcctatggggtgtgcagcatactgggaatcgatgaccgggtttttgcccgggggcttaagacgtatgaaccccttccccaccggcttcagtatattggggaacgggagggcgtgaaatattatgacgactccatctccacgatttgcgataccaccattcaggcccttaagacgctgaaggatacggatacagtactcataggcggcatggacaggggaatcgactacagggaactgattgagtatctgtcggaatgtccggtgccgcatattatcctgatggaggccacgggcaagaggatataccaggaaatacataaatattatccagaatttaagaacagggccaggcttatactggcggagcatctggaggacggggtcaagcgggcgcgtcagataacgaggcccggtacaagctgcgtgctgtctccggccgctgccagctatggcatcttccggaattttgaggaacggggagaaacattttcgcgtcttgtatttaaaaagtaaatctggataagaatgtaaatgaaacaaaaaaatcacaaccttttaagaattttataaggatttagggggttgtgtgaacacttaaaatactgtacaatcagtaagaagcttttgaagcagaaagtgaaagggagaaacgtgggagcttacgagacgctgaatgaagttttggttagcctgttccgcgatgtcaatgatatagagcagaaggcaattatcatctcggaatttagtgatattaccaataacgatatgcatgtcatagacgccatcggcatagacaggccaaagaacatgtcatccattgcccgggaactgtcggtcacggtgggaacattgactatatccgtgaacagcctggtgaaaaagggctatgtagtccgtaaccgcagcagtgaggaccgcagggtcgtattcatatccctttcagaaaaaggagttaaggcttattatcatcataagaagttccacgaacagatgatagacagcgtggtaaaagaactgacagaggaggagctggaggccctggtaaaggcgctgacaaagctcaatacctggttcagaagcttttaagaggattatttaaggaggctttacaattatgaaaaaatggttgattggtgtcatgaccgtcctgatggcagtatccctggcagcctgtacacctaccactgaaaaacagaaaaaagaaaccaccgctgctacagcagctaaatcccaggaggatatggtgccgccaagcacaggcggagccagcgataaagttccggaccccaacgttatgccggtagctgtgatttccgtatatcacggcggcgagggaagtctggtgcaggatatggactcccttgatacggaagggctggacgcacagcttctggtagacaagctgattgaatacggcgtgctgactgacggtacgaaggtcctcagttttgacgttgagggcaaggatgagaacgcggtcggaaccctggacttaagtcaggctgagagcgcagagggatgttccgacaagatgttcctcactgagattggcaataccttcacggagaactttgagctgtccaagcttaagcttaaggtgaacggcgccaattatgaaggcgatgacattaaacagggagatagtgactatctcacctataatgcggactatgagtctgttgaataaataagtgaaagaggcggctgcccgtaagtggagactccacttgagggcagccgtctctgatcttctgtccttataaggcatttacagctccaggcggtaaatacggctgggacgtcccttcatcagggacttttttcacctacaatctgggcaaagccattctgctgaagggcgttgagaaaacggttggtgtgttggccgccgtgatctgtaaggtgcagtcaaactcctgggtcgtgatctccctggctccaatcagttccagggcagaccgtgaaatgttcggtaatccgttcaagcacctgctgtgtggtatggatttcaaatccctgcaatgttttctttaacaggataccggtggtattctcccggctaaagtccaggaggaacttcttctatatccaggctgccgccgcattggtgatgattgtctcatctgtatccagcagttcatccagagtcatgttctgcaatatagaggcatacattttttcgtgctggatttctttctccagataccggttggcggacttgaaatacatattgggaatgcagaaggagtagtcgaacatgacgcgggtcaggtccgtatcacggttctcattgctcagcgtcagcagctcccggcaggtttccgtggatttttgggaaatggtaaatatctgcttctgccggcattacctccagcatgcccacccttcttaccagcaggatattcggaaacagggattacagccttatctatggaatggcggtttccgtgaaccggtttggcggcgtggcgggaacactgctggtatccctgatctatgacattacgaaaaactacagtattatctggcctgtctgtgcggtatccatggcatttacattggtggcagccctgggatgcataaagctgtcacggaataagatggctcaggagatggggcgggagcagccgtcttaagctttgttgatatgtgatgtgaagttaaaaaagccatgcctctttccggttggggataggggcatggctttttttaatataagatttcccatgataaaatatcattattaagtatgccggtaataagcaggccggtaataagcagcactgatattagaatttagccatggctgcttcatctgcaacaacgatcacatcgttgtggagctggagtacagatgcaggaacatgaggagttacagggccgctgagcacatcatggaggatctgagccttgtcagagccgctgacaaccagaagaatttttttagccttcataatggttccgatacccatggtataagcctgcttcggaacctcgtcaatggaagcaaagaaacgcttattggcctcgatggtgctctgggtcagattcacacagtgagtggtcttggcaaactcttcgtccggctcgttaaaaccgatatggccattatgtcccagacccagaagctgcaggtcaataccgcccaggctcttaatcacgtcctcatagcgggagcattccttatcgctgtcagactgggtgccgtcgggaacattggtacaatccatgttgatgttaatgtgcttgaaaagattgttatacatgaagtagtagtagctctggtcattatccctggtaagacctctgtattcatccaggttcacgctctttacactggagaaatccaaatcgcctttgttgtaccattcaatcagctgcttgtaagtgccgattggggtggaaccggttgccagaccaagaacacagtcaggcttcatcagtacctgggaagcgatgatgctggctgccttgcggcttaattcttcgtaatcttttgctttgtagattttcataataattgccacctttccatacattattagtagttgcggtgccccggatttccagagggtcactgctttggaaaaaatttttattaatctttaaatacaggataacattttcctaacatactttcaaggggtaaatgcataaaatatttataaaagcagataggccgtgttcagggcagctgcagattatgggtgcgaggagtgaaagtatgaccaattatcggagattgatatcttatatctacgcctatgaaggtgaggtaaagggaaagaatatcgggtttgccaagctggaatcccggaatgggcaatgcaaactcagcgtaaatgtaaagaaggtttacgttggaagcagcgacctgggggtttatctgctggcttcgggaaaggagattttcctgggcagtatatttatccgcagcggatgcggtgagttccgcgccgtggtaaatgtggaaaatgccgctgattccggctgcagcatggaccagtgctacggtctgaccatacacgaacagggggatacatggcgggcatatacaaccatctgggaggatgcggtggcccatgcagcggaagtggagctggcggatgtgacctccagtaagctgggagatgcagaggcgcagatacatagaaaaatggaagaactgaatcaggagctgcggtccggggaaaaggcagcggaaggcggggacggtcctgtgctcagcagttctccggcagaggtccgtcagatgcgcgttgcgggaaaacagaacggtacacaggaatcctctttaaaacgtgccgcggagactgtggaggccgtacaggaggcagaggtatcggccggaatgtcagaggaagtattccaggcggaggatgaggccaaccagacagcagaatccagtcaaaggacagaagtattggaacaggcagcggaaaaaacagtcggggcagaagaaattgtatcggagtcagtagaggcagagccggccgaaatgtccgaaaatcagaatgagcagggcggcagcgtccagcaaaacaatcaggagtcagaggaagctgtaaagcagatggagacttttggtaccccggatgccggaggcgatttggcgctggaaccggagctgttgcctgatgcagaagacagtatggagctggagccggaatccctgccggatgaaatgccggatggaatacaggaggcacaggaatcaggagacatcccggattcccgattagagtgccaatcggagaaggaggcagagccggagaaaacagtggttttacgaaatagaggtccggcgggaatcatgccaatagaagatgtggaacagacgaatggcatgatgacgccaaatgcgggtagagagcaggaatcagaccgtggggcctggaaagacaaatggaattttggggagcggcaaaagcctcagcacagctgtgatgaaaagaatgtgacatctataagagaacagctttttcaggaaaatgaaagaatgccccgtgagcctcagaccgtccaagacccgctgaatatgggagcgcccaggcaggaagaaatggttcctgatacccgtattcctctgcagcctgatagtatgccggaaaacaggacggttcccagaccaaacataatgaccaggcccgggatgccacgcaggcatatgcctgcgggaacagtgcatacgggttcttccggaggccagttggagaaggaacggctgatggaacagtatccggtgaatcagcagccatcacagggaatgggaccaatgaatcagcagccaatgcggagccgtcagtctatgccggggcagcagccaatgccgggtcagcagccaatgccgggtcagcagccaatgccgggtcagcatccaatgccggggcagcagccaacgtcgaatcaacagtcgagggcaccccgccagctgatgccgagcagtcagataatgccgtcacgtcaacaaacgccggggcagagttcgatgagccagcagccggtaccaaatcggcagccaatgcaaacccgtcagccagtaccaaaccagcagccgatgccaaaccagcagccgatgccaaaccagcagccgatgtcaaaccagcagccgatgtcaaaccaacagcccgcaccaaatcaacggccacagaaccagcagcccatgccatcccggcgcccggtaaaccaacaggtataccagggcaggaagcccttcatgcggccggccgggccggagaccggtgacagcggcgaaacagttgggcaggctgaggaaagagtgcccgttgttgatgcaggcgaggaaaccatgatactgggaaatttccaggagttagaacggctggagcaggaagaacagcaatctgatttcccgggcaggctgtgggatggcttgcgcaagcggtatcccaagatacaggcatttgacagcgccaatgggtgtgagattctgacaattaagcctcaggatatcggactgctgccacgggagaactggaattatggcaataacagctttctgctgcacggatactataattaccgttatctgatattagcccgtatcggagatgagacaaaggggcggacccgatacatacttggggtccccggcaattattacagcaatgaaaaatacatggcatccatgttcggctttccacatttcgtgctggcaagaaaacagccgtcacaggacggccgctttggatactggtatacggatgtgcggttagaaaaccaggattaaataattcgtccctttcggtacggtctgactttgccggaaggggcgaaacatggatgcaattaacttaaatgccatacaaaatttatcacataacccttattcgggttagtaatcaattccccgcagggaaacctgccccacataggggcgtaccaaatcagcaaacgccgtcatttcatcctttgtaaaatctgaatagactccggggacaagtacttctccggattccgtgaaacactgcaggtagtattcaggacaacccttaatccacggtccaatctgcctgaaatcatccgatgtgtgaagaccgcggacaacggtggtccgaaattcgtagggaacgctgcctgacagcagaaattcgatactctcatctatccgttccatggaaagaccggataccccggctgcctcttcatagtggttccgtccggctttaatgtccattgcaacgcaatccaaaagctctttggcacacaaatctttcagtattccgggcatgtagccattggtatccagcttcacagccagtcccaggcttcgcaccttccgtatgaactcctccaggtccggctgtagggtaggctcacctcctgtgatgcagactccttccagtacccgcttgcgtttttccaggaacgccaggatatcctcctgggtttcatattcttctgcgtctgagcccagaagtccgctgttatggcagaagggacaccggaaattacaccctcctgtaaatatagttgcggccaccctgcccggaaagtccagcagcgtagtcttttgcagtccgcatattttcatagcctcttaacctgtcccttttcaatttttgatttattctttataataaaaaagtataacacacatgaagccttaaaaaaagaggaatcaaatcatggcaaaagggccaattgatataggagaggaaaatatggcattaaatcaggaagatatggcatcgaaccaggaacccacagaaccaaaccgccaaccccgcgacagaaaggcagcagaaacagaagcagcccgtctaaaggggcaggaaacacggcgcaggaattatgaaaagagaatggagaagcggcgtcttgcggcccttgcggcagaggagcagcgtttgaagcagagaaagcgggatgaagggtttatgagggaggcgcttcgccaggctaaaaaggcggccgccatcggggacgtgcccatcggatgcgtgattgtctgcggggacaggatcatagccaggggatataaccggcgtaacgcggataagagtgtgctgtcccatgctgaaattatttccattaaaaaggcatgcaaaaagatgggagactggcgtttggaggattgcaccatgtatgtgacactggaaccatgccccatgtgtgccggagcgattgtgcaggcgcgtatacccaggattgcggtgggatgcatgaatcccaaggccggctgcgcggggtccgtactggatatgctccatgtgccgggatttaatcatcaggcagaggtggcggagggggtgctggaacaggaatgttcaaagctgatgtcggatttcttccagaacctgcgtgaacgcaaaaaataattttcttattgtaacggtgcaggacggcatatcttcttgaacgaaaaatccggttaagaagcaccgtcctgaacgattaccgtttattctgtgatttttttcattgcctgacttgctgcgatgaggattggatcataaacaggagctgcgggaggggcgtaaactaagtctaattcatttatctcttctacagtcatgccacaagtaattgcagttgcgagtacattaattcttcctgggatactttcacttccaatgccctgagcacccagaaggaggccggtttttttatccactatcaggcagatgtgattgtcgcggccgccaggataataggaagcgcggtctgctttcgtgatgctgaccgatatcgcgtcaaatccctctctgactgcttgctcttgtgataggccagttgcggcaataaaaagctcaaacacttttgtcaccatggaacccaatactcccttaaaggtgtcatgtccgccggccacgttaccacccgcaatacgtccttgcttgttagcggttgtacctagaggaacgtaagctggttttcctgtaatcctgtttttcatctgtacgcagtctccacaggcccagatatccttgtggcttgtgcgcatctcatcatccacaataattcctccattcaggcccagtgcaagtccggctttctcggccagagcactggccggttttacgccagccgatacaaggattatgtctgatggttcgttctctccataggctgtccgaatacctttggcttctccgttttcacaaaggatttcagatatctgtgtgcccgtgtgtacttttatgccgcgcttcataagagtatcctccagcgctttagaaaatgcgttgtctaaaaatggaaggagtcgtgggaattgctcatataaggatacagaaagcccggctttgctcagctcctcggcggtctcaagtccgatagctccgccgccgatgatacagactctcccattttcctttgctgcagcttttagacggatgccatcttccatgtttctcagatagtatactccatttgagtgaattccgggaataggcggtactactggtattgctccagtggcaatcaccagtttatcataaggatgtatactgactctgtctgtatctaaattttttacagaaacctcctttttttccgggtcaatgagaatcacctcatggtgtatccaggcggatatattccgcttgctttttaacgattctgcgttaattgccaccaactcattgatatcatgaatgattccccctacaaaatagggaagaccgcatgctccataactgacaaatccggatttttcaaagacttggatctccatgtcaggtttctctttacgtgctcgggatgccgcgcttaggccagcagcagtacctcctataacaatcaatttctctgccatgttgaacctccggttttcaattctttactccatatttgtcaatgacacccatctcacccatcaaattttcaagctctttcagtttgttaccggcataatcctgataaggctttctcaggtgtcctcccggaaggccaagaatatttaaagcagctttaatgacaactggattagagaaagtgtacagttcctgaagaagaggaaaccatttaaaataattctctctgcattcctcaataattttcatatccgtccaggggcgggaatacaatgccgcttcctctggaatgatattaccgccaatatttgctgttccggttccgcctacagctagggttggaagtacaatagaatatttcgggaaatcacagcacataatcttaactttaccttgacagagacgctgtacctgaaccagttgttctacatttggaagagcttccttgtcgactacaaaattcggatgtgcatcggatagttttttaattgtttccggcataacctgaactccaagcctggagggattgttatagataccacatggtatgcttacagaactcatacaagtatccatatgaataaaagtggctgtctggttaatcaaaacgtatggtggaactgtaaaaatgaccccgtcagctccctccttttcacaatattgggcgaaatctgtgcttgcctgtgtggtcatagatgctgcactgaaaaacacaggaattcttccgtttacaattttaatcacttcatgtacgatggcttttttctcttccaatgtaagcagggtcacctcccctgccgaaccaagaatgaaaatttgtgaagtcccatactttatttgacggtcaatcagggtttcaaaaccattaaaatcaattttattattctctgtaaatggggtaggcattgctacccatgaaccgtgtaattggatcattgtttatctcctttttcattattcaaaatcgaccccaaagaaatctaaagcaataccagcaagtgtaagtatacctgtggtgagagcttttcggtcacagtaaaagtgagggctatggagccccccataaggccccccttcacttcgtgaaccaaatctaacgaaaacaccaggtgccttctgcattacaaacgcaaaatcttcggctcccatactgggatgttccagctcgattacattttcatgaccaagaagtttgctgccgcagcgctttacccgatcaacccattggctgtcattaattagcggaggagggcccagtttgatgctcacttctgcatcaccccgtccagctgcagccacacctttacaaatttcgggaattctttttaatatatgctcccggactcttgaatccagagcgcggatagtgccctttaatacaacggagtcggggataatattaaatgcgtttccgccctggatggagcagagggagacaacgccagattggtctgccgcaagctcacgggataccagcatctgcagtgcctgtacaatttgggaagctaacaggatgggatcgataactgtgtccggatgggcgccatgcccgccttttccttttactgtaatagtaagctcgtctgagcttcccagaattgcgccatagcgcactccaattttgccagcacataagtcaggtgttacatgcaaggcagccacgccgtcaatggtatggaagtcaattttggggctttcagcaaacagttttccaccttgtaacgtttcctctgacggttgaaaaaagaatagaatggatccggcaatctggtttctgtaatgctcaagaactctcactgctcccaataaaatggacgtgtgtacatcatgtccacaggcatgcattatgccgtctgtcctgcttctcagtttatggttctcatcttcttttatagggagggcatccatgtctcctcgaagtgcgatgcagtgagcaatgcccggtttcgttccctttatttccaccagaagtccggtttcgccgatatgctcaattctgtcaacatgagtttttgctcgcaattctttttctatgagagcgcttgtattgtattctttaagtccgagctcaggattttcgtggatttgttcgcggattgtattaatttcaggttcaagtgaagcgactaattcatgtattgtcatgttatcctccttcttgctacattggtatcttaagtatctaaagtccggtccaacctatgctctgaagaaacattagtgtaaaaaacgccagaattatctgaacaagaataagaggcattgccttctttaagtatttcccataagaaatacctgcaaaacctagacctcccatcaaagtaccgatggtaggaatgacacagtttgtaaatccatctccgaactggaatgcctgtacagcaacctgtcttgtaatgcccgtcaaatctgcaattggaaccataattggcataactgctgctgcctgaccggaaccggaagaaatgaaaaaattaataagagcattagcaaggaacatgaatcctgcccctaagacagcacccatgtggctgattggttttgccagccagtatacaattgtatccagaatcatgccattactcattagtacagtcaggcaatttgcaaagcccacgatgaatgcagcgcttactgtacttgcgcagcctttaatgaaacggtcaaaacctacatttatatccttgcagcttacacatcctattaagagacaaacgaccagaaatgttgcggatattttgtcagcgccccatttaaaattcaatgcgccgattactaccgcagccagacctgtcgccatacacagcatagacagtacctgaacttttgttacgggggaatcacctaattcaccgtcctgatatcccatgatatcatttactttcaagccttgctcatagttcaggcttctgaaagggtccttttttatctgatggagataaaagataacaaacgcataacttaatgtaaagtttacgatatggaaaatcactctggcactgaaaccggaaaacagtggtacctctgctattgactgcgccacccccaatactcccgcattagcccagccgacattaaaaccggcaaactgtccgaagaaaatcataaagaatccaagagtcttatcaaatcccattgcctgtgacaggaagatcccaatgggaattaaaacaagggttgcatttccgaatacaccagtggctccgcccagggacatgaaaaacataacacagaaaatagctatttcttctctgccctttacagcttttgccaatttcataaaaattgtgtcaattgcttttgtttctgtaatcatgtaaactgctgcgcctacaaacaaaatcatgtatatcaggctggactgatttttaaaacctgttaccaatgcctgaaaaatttcccaaggtccctgaggattcggactaatcacatggtaagtgccagccacaacctttgttacattatcttctgtcacacgttcataatttccagcagggacaatccatgtcaaaatggctgatacaattgctaataaaaacaagattgtgtatacgttagggaaccatgactttttattgcgttctttcataccgtttcctcctattaactaatttttgaaattattaatcctacccacctttctgtcaaataattattaagataagtctagcatatttttagtaatgttactgcttcctaatttacaatgaaaaaacatataaaatacatctttttgtacattaatttaaaaacagtttaaacaaaaaagactcatgataaagtccatgagtccttggatatataatttaatataattttacatttactatacaaaatatttataaaagttcgacagtttctgctattccatcaccttattgtatgcagcagcattaatctgcgtattgcgatttaaaatccggataaaatcctcattacataattcctttatggttttgcttattgtgattctggaactaccgataattgcgctcaattcctgttgcgtataatgaacctttagattataccacttgttttccaatagataggacgtatcagctgtggaacagaataagcgttttaagcgatccttacaggaattaaaagccaagctctcaatttcatggcgcataattaacattttttttgagtaactctcaagaatggcttcgcggaaaaccttatttgtatcaagcagtatctcataatcctgatagggaatgatgcgaacacgagtttccacttctgcctgagaaaataatcctgttgattcccgaagtgacaacggtgtttcgccataaaaccacccatcagaaagagtatatagaatcttttcagttccgtctgtccctatcatgtagtggcgtgttctgcctgtgattatataatataccccctgaagcttttgacctggtgtcagaaaaatcttccttgcaggatatacacatgtttccccatgacattcaatgagtcgttctaataccgcatttcttttatttggcagagtaaaactagaattatctaactgcatctccactcactccaagtataataatggcatatcctttattgaagctataattaatatttttttgtttaactaattgctgtagattatagcacaagcttcattcacctgtaaaggggggttcttttttgagtcattgcgcacaaaagggccaattgatataggagaggaaaatatggcataccctgccagaggtaaaggaggcactgcatttctacaaagacctgtttaaaaacacctgcccaactgactccattgcgtggggattctcagagatggtccagggctttgtgggcggcaccacagccatgctgattcaggatccggaagtaatcgccacctgttccgccgacatgcaggatgaccagtgggcactggttccgttccccaagggaccgtccggccaggcggtattccccaacggatttgcgggctggggcatgacatcctttacagagcatccggatgagaccgcggatttcctgctgtacttatctaattccgagaataatacctactttgcaaagaactactccacaatcccgattcacaacaacgctgccgagaaggatacatatttctccgagggacgtttcgcgatgtatatggatatggcaaaggaaccggatgtataccgccatgcggcatacccgcagatgtacgaggcatttgcaacctacaagacagaggttgataccatgtatcagaaatacctgaccgatgaaattacggatgatgagctgttacagtggttagatgagttctggacccaggcttacaaggatgagggccagaagtggtaaggacggattgaccgaagaacgtatgaaacacaatcagtaaggaccggagggcgccgggagcgggggacctgctcccggcacttccggatatagagctgtgcgcgccgtgccggggaagccggcacacgcagccggcaaggaggtgatggcatgaaacaaacgtcgaaattaaaaatgaggagagcccggttcatctttatcatggttcttcctgccatactgtttcccatgatatttacctactatccgatgataaaggggtccctgatggcatttcagagctacaacctgatgaatgtcaagaatatcaagtgggtgggtctggataatttcagcaagctgtttgcccacaacaccagcaataccttctattccaccatgctcaacacggttaaatgggtgggaatctccctatttgtccagtttacggtgggattcgccatggcgttgcttctgaagaagaaatttaagggctccggcctttaccagggtctgattttcttcccctgggctgtatcgggatttattatcggcattatgtggcgctggatgttcaacggaacctcaggcgtcatcaatgacctgcttataaggatacatttaatcggccagcccgtgggatggctggccagcaagaacacggccctttactcctgcatcatagccaatatatggtacgggataccatttttcaccattatgataacggctgccttaaggggagtgtcggaagacctgtacgaagccgcggatgtggacggcgccagcccgtatcagaagtttaccagcatcacagtgccctgtattcgttccgtgctgcttttgacggttctgctgcgggttatctggatattcaatttcccggatttaatttactccatgacccagggcgggcctgcggggtcctccaacatcattacgtcctacatgatgcagctggtccagagtctggattacggtctggcgtcagcggtgggcgtgctgtgtatcctgttcctcattgtatttgcagccatttatctggttgccgccaagtatacggacgaagaggcatgatatcatgacaatgaaaaataagagaaggcttaaaagcctgttaaaatattttgtactggcatgtttccttgtactgaccatgtttccctttgtgtggatgcttctcacatccttaaaggggtcccagggggaaatctatgcgtttccggtccggtatctgcccaatccggcatccgctgtcaactatgtggccatgctgtggaagggcaatttcggccggtatatgctgaattcctttttctcctcagcggtggcagccacctgtgcggtgtttattgccatactggccagctatgtcataagcaggttccacttccggtttaagaacgtacttctgctgtttttcctggtaacgcagatgattcccatgttcatcatgctggcgccgttataccagctcctggcaaaggcgaagatgctaaacgacctgcgcagcctggccatgctctacacaaatatgatgattcccttctccgtggtgacattgtgcggcttttttgacagcgtgccaaaatccctggaggaggctgcctggatagacggatgcggctatttcaaggcattgtttaaggtggtggtgccggtcatcatgcccggcatagcggctacatttatatttgcatttatcaactcatggaatgaacttttcatggcagtcatgtttatagatgtggataagttcaagaccataccagtgggacttaacggcctgattcttaaatatgatattaaatggggcgagatggcggcaggaaccgtcatgtcactggtacctaccatgtgtctatttgcctttgcccagaaatatatgatagaagggcttacggcaggttcggttaaaggttaagcgtgctgtcccgcacaggaagcggccggggccggcggacagatatttaatttgtccgccggccttagtggtaaaataaggacatagatgatttgggccgggataaggaggaagaggatgagcatattatttgaactggaacggatggagcgtctgacggttgatctggaccagcttcgcaggccggtgaggattccggtcagctgttataagcggatggaaggaaaggaaaatggaccccccgcggctggacggggcccatgtggaattcctgatcaccacgggaagggaaggacagtgggatgccaccaatccccaaatgcttttttatctgaacggaaaaattgtccagggagtggatgtaaaccacagggaaattttaatgagtcccagggccaatgcaggggagcagtacgaaattgccatcctggcctacagcggcagcgtgcccggggacctgataatccgcacggagcttgttcaggtggatgatgctgtggaaaaggcttactacgattttctggtgccagtccaggctgcccggcttttgaaaaagccggatgaggagaattacagacggattctggtaaagcttgggcctgcggccgacgccctggatttgagggagccatattcatcacggttctaccggtccatagaggagatggagagaatcgtgaaaaaggaattctacgaaaatgtgaacacctcctcttcggtggtaagcgcaatcggccatacccatattgacattgtgtggctgtggaccgtggaccagaccagggagaaggccgtgcggagcttttccactgtattggagctgatggaccggtacctggattataagttcatgtccagccagcccattttgtaccagtttgtaaaggagcaggaaccggaactctatgagcgcatccggaatcgggtgagggaaggccgctgggaaacagacggcgccatgtggctggagtcggactgcaacctgcccgcgggggaatccctggtgcgtcaaatcatcaagggcgagcagttcttccgggaggaattcggcatttccaacaggtgtctgtggctgccggatgtattcggttattccgccgccataccgcagatactgaaaaagtgcggcattccctatttcctgacaactaagattgcctggaaccagtttaaccagctgcccaacgatacctttatgtggaagggaatcgacggcagcagggtatttgtattcatgcctactgcctgtgactttgataagaccctggggttaaatgtgtcatttaccgacaccaggaacaccaccacatacacgggtattgtcaatcccaatatgacgctgggaaccttcaaacggttccagaacagggacctgacagaggacacgttaatgctctttggatatggcgacggaggaggcggtcccacaaaggagatgttagaggaggcaaagcgtctcaggtacggccttccgggcattcccagactggttcaggaaaatgaagggaacttttttgaccggatttatcacgatattgcgtccaaaccaggcatgccggtatgggatgggaaactttattttgagtaccacaggggaacgctgacctctatgggaaaaaacaaacgctataaccggaaaagccagcagatgtacgaacagctggagacgctgggagtcatggcagagcttaagggtctggcatatccggccggcatcataaaaaagggatgggacatcatcctgttaaaccagttccatgacattattccgggaagcgccattgggcctgtctatgaccagacagaccgggaatatgaggagatactgaaatccggcgcagagacagcccttcatctggcagaggacctgggtgacaggatctgcggtcagggtaaggataccggcagggaaaagccgggagaccggaaggttattgtaatcaacacacagggatatgagcgggaggataccgtaacggtgtccggcgtggcccggggggaggcggcttttgcctgcgactgcctgggacacaggttcccggtccagtatacaggggaggacacacttatattccacgcaaagggaattccttcctgcgggtgtgccgtgtacagcctcatgggggcagaggatagtggaacgtcagggcctgccgcagaacattccggatttgccgcagaacactccggatttgccgcagaatgccccgggccatggtccggcttctttgaaaatgactggtacagagctgagtttaatgataagatggagctcgtctcgctggttgagaaggggacggggggacagctgttaaaagaagggcgtgtggggaaccagctcctgacctttgaggaccgccccatgaactgggacaattgggatgtggacatgtattatcagagaaagccataccatgccgaacttgtgacggcgccggttttaaaggaatggggaccggttcggactgttgtttccatctctcaccggtttgcgggctcccttgtggagcaggatattgtgttctaccccaatctgcccagaatcgattttgtgacccgggctgactggagagaccatcatgttctgctgagggtttattttccggcccagattaacgctgccaaggccacctatgagatacagttcggcaatgtggagagggagactaccagcaaccacagctgggatacggccaaatttgaagtatgtgcccataaatgggcggatctgtcggaaaacggcctgggactcagccttcttaacgactgtaagtatggacacagcatcagggacggggaaatgggactgacccttattaagtccgggacctatcccaatgagaacgcggatataggcattcatgaatttacctattccatctatccgcacaagggacggtggcaggaagcaaggaccgtggaaatggcctatggcctgaattcgcccctggtatccgcactggcgcccgccaaaggaccgggcggattctggagcatggtatccgtggaccagccgtgctgttttgtggaaatgatgaaaaaggcggaggatgggaacggatatatcctgcgtatctatgaaaaccgcaatacaaggacgtccatgacggtaaaccttggatttaaaatttcccatgtggaggaatgtgatttgctggaaaggaccctgaggcccattgagacagatggacataggtttaaggatttcataaaaccttatgagattaagacataccgcgtcagccccgccggcgtgtaagttccggctcatcaagaatcggaatataagggaggatttacatggaagaacagagggcatggtggaaagaatgcgtggtggatgacaatggttatgatatcagcgattataaggctgtcatggatgtgttcggcgccatggaggactttgacaggcttctggcagagatacatcaaaaaggaatgaagctggtgatggacctggttgtaaaccatacatcggatgaacatgcctggttcgtggagagccgccgttctcctgacaatccctacagggatcactatatatggaaggatacgacatgatggcctggtggcgagacaagggcattgacggtttcaggatggatgtgatatccatgctgtccaaggagcagcgctttcccgacggggtgttaaaagaaggaaaaccctatggtgacggcctgccctattatgccaacggccccaggatacatgagttcttgcgggatatgagtcccaaaggcagttccatctgtacaacgataaaatcagttatatcatgacatgtcttccgaacgggcagatgggacagctctactatggaaagcggatacggcacagggaaagctttggccatttgctggagtttgcgcacagggatatggcgccctgtgtctatgaggatgacaccacattttcactggaacatatcaagcaggaatacccaggctttggaaccggggatatgcggtatccggcttatggaatcagaagggaaaatggaagcagggtcagttcttttgtatacaaaaaccacatcatacaaaggggaaaaccggaattgccgggcctgccagccacttatgtggagcaggatgaggaggcgtggaccctgaagctgtatctggatgacccagtggcaggtatggaactggtgcttttttatacaatctatgaaaagatgcctgtgcttacccgcagcgcacggtttgtctgccgtggtccggagccggtctgcctggagcgggccatgagcctgagcctggatctgccggatccgcgttaccagatggttgatttgaccggggcctggtgcagggaacgctatgtggactgccacggacttcaccagggagttcagagcatacacagcatgaggggacacagcagccaccagttcaatccgttcatctgtctgaaacggcctgatgccggggaggacagcggtgaggtaatcggcatcagccttgtatacagcggcaattttctggcccaggcagaggtggataccatggacacggtccgggtgaccatgggaatccatcccgaaggatttgactggcccctatgtccgggagagaaattccagacgccggaggcagtgatggtatattcgggggacggcttaaacggtatgagtcaggtgttccaccagctctaccggaccaggcttgccagggggtattggagggacagggagaggcccatcctgattaataactgggaagccacattcatggattttgacgaggacaagattctctccattgcggacaaggcaagggagctgggcatagagctgttcgtactggatgacgggtggtttggaaagcgggacgatgataccacttccctgggggattggtatccggacctgcataagctgcccgatggaattacagggctggcaggaaaaatcagggatatgggaatgaagttcggcctgtggttcgagcctgagatggtcagcagggacagccgtctttaccgcgcccacccggattggatgttagggagtacggaccggccggtgtgtacagggagacaccagtatgtgctggatttttcaaaggaccaggtggtggaatacataggggacagaatggaggagatactgggagacggcggtgtgtcttatgtgaagtgggatatgaacaggagtatttccgacctgttttcagcgggccgggatgcgcagtaccagggaaccgtgtaccacagacagatactgggagtatataagctgtatgaccggctcaccaggagctttcctcatgttctgtttgaatcctgcgccagcggcggcgccagatttgacccgggcattctgtattacgcgcctcagggctgggtttccgatgacaccgacggagtggagcgtgtgaaaatccagtacggcaccagcctggtatatccgctcagctccatgggaagccatgtgtccgccatacccaaccatcagacacagaggaatgttccgctggccgccagggcggcggcagcctgtttcggaacctttgggtatgaactggatctgaatctgcttgcagaggaggaacaataccaggtaaaggaacagatacggtttatgaaggagcacaggaagctgattcagcagggaaggttctaccggcttataagtccctttgagggaaatgaggctgcctggattgttgtatcggaagacgcagacaaggcaattgcggcttacttccggttcctccagcccgtgaatgccggttttaaacggctggtactcaaggggctgaatccggggatcatgtaccgggtcagcggggtagactataccgcgtatggggacgaacttatgagcgcgggcctgattctttcagacggtgccagcggtgtgcggaccagcccggtgccccagggagattatctgtccaggttatttttggtggaggcacagccttgacaaaagcgtctcggcaggttatacttaacaggcagttttcaacaactgccccaagccggcatttgttgacacatctgcgtatgtacggccaaatatgtcataaagtttccacgcagccggggagatagcggtgccctgtacctgcaatccgctccagcaggggtgataccttgcctcgggctgtttgctgcgaagctgccttgtgtaagtggcgttgacgtctgggtcttacgcaacgggaatctgtgaactgtgtcagggcaggaatgcagcagcactaagcagaacctcccgtgtgccgtgaggcagcctggattgagttaactgcatgagtaacgttcgtggcagcagcacaaagcaaggtgcgtggaattaaaaatgggatataaatctgaggatacgttactgtatcaccggatttatgtcccatttgtatttccgcatggcgtgcttccctgggaccggccggttatccggattttgcggccggccggttgtccgaatttatacttgccccgataacacctttgcgttataattacaaaatgggtataatagaaccattcccaggaaacataacagaaagtgaagaaactctataaggaggaagtgcaatatgagaagaattggaatgctgaccagcggcggagactgccaggcactgaatgccaccatgagaggtgtggcaaagtccttatataacatgtttgacgacgtggaaataattggatttgaagacggatataaaggactcatgtatgcggactatcaaatcatgaaatcgtcagatttctcaggaattctcacccagggcggtaccattctcgggacttcccgccagcctttcaagctcatgcgcactcctgatgagaatggactggataaggtggaggccatgaagcacacctacaaaaagctgaagctcagctgtcttgtggtgctgggcgggaacggcagccagaaaacagccaacatgctcagcgaagaaggactcaacgtggtatcgcttcccaagacaattgacaatgacctgtggggcacggatatgacatttgggttccagagcgcggtggatgttgccaccaatgccattgactgcattcataccacggccgcgtcccacgggcgtgtattcatcgtggaggttatgggacataaggtgggctggctgaccctgtatgctggtcttgcaggcggggcggacattatacttcttccggagataccatatgatatcaatattgtgtgcgacgccctgaccaagcggtccaaggcaggcaaacgcttctctatcctggcagtggccgaaggcgccatttccagggaagatgccaagatgagcaagaaggaactgaaggaaaagaagaaaagcggagtggtatatccgtcggtggcctatgaaatcggggccaagatacaggaagtcatcggcagcgaggtaagggttacggttccgggccatatgcagcgcggcggcgagccatgcgcttatgaccgcgtgctggcaaccaggctgggcgctgcggcagccaggctgatagccgaggagcggtatggctacatggtggcagtgaagaacaacgatatcacccaggtgcctctctccgaggttgcgggaaggcttaagaccgtggacccggagtgttccatgattaaggaagccaagatggtgggcatcagctttggcgatgaataactgcatgatgatgaaaatgagcgttaatttgaaaataaatttatatgaacaagatagaataataggagttgcctaatatgtcatatacggcgttataccgcaaatggcgtcctgtttcctttgaggatgtaaaaggccaggacccgattgtgcagacactgaaaaaccaaataacgtcggagcgtatcggccatgcatacctgttctgcggtaccaggggaacgggtaagaccagtatagccaagatatttgccagggcggtgaactgcgaacatccggtggatggcagtccctgtaacgagtgtcccacctgcaggtccattcagtcgggttcctccatgaatgtggtggaaattgatgccgcctccaacaacggtgtggagaacatacgtgatataagggaacaggtgcagtatcctcccacagagggacggtacagggtctatatcattgacgaggtccatatgctttctattggagcctttaacgctctgttaaagacactggaggaacccccgtcctatgtgattttcatattggctaccaccgaagtgcacaagattccaattacgattctctcccgctgccagcgctatgattttaagcgcatatccttagagaccatagcggaccgcctgagggagctgactcaggccgagcagatacaggtggaggacaaggcgcttctctatgtggcaaaggcggctgacggctccctcagggatgccttaagccttttggaccagtgtgtggcctttcattacggaagggtgctgacctatgacaatgccctggaggttctgggggcagtggattccagcgtgttcagccagatgttcggcgccattgtggagggcaggacaagggactgtatatgcagcctggaggaaattgtgattcagggccgggagctgggccagtttgtcactgattttatatggtatatgagaaacctgcttttaatccggagcgcggacgacgcagagggcctggtggatatgtcggaggagaatttaaagcagctgagaagcgatgcgggcaaggcggacggaaccacgctgatgcggtatatccgtatcttttccgaattgtccaaccagctgcgctatgccagccagaagcgggtgctggtggaggtggcgcttatcaagctgacacgtccatccatggagcccaacctggatgccattttgcagcggttaggagatctggaagcgcagatggaggatttggaggcaggccgcatggccattcccatgacagctgcttatcaggccgcaggcagccctcctgccggacaggtgccgcaggcgggggccggcccggggcaggatgggggaacagcaccccagacagcggcgccttatgctccggggcttcaggcagagccgggggttatgccggaaaaggtggcccttccccgggcccagctggaagacttgaagctggtgagaaacgaatgggccaagatagtccgcagcatgggaggcggtgccaggtcatatctgcgggacaccgtggtggagcctggcggagaaggctgcctgaccattgtgtttatggatcccatgaactacgatatggggaagcggcccactgttataggggaactggagcgctatgtggaagctaatttcagcagatccatttactttaagacaaggctggccggccggggcgagcgccttaatacgatttatgtgacccaggaagaattggaagaaaagattcatatggatattacatatgaagatgaataatataaagatgattaatcggaaataataggaggataatacaccatggcaaaacgtggcggatttccaggcggaatgcctggcaacatgaataatcttatgaagcaggcgcagcgtatgcagcgtcagatggaggagactaccagggagcttgaaaataaagaatacacggctgcttccggcggcggtgcggtcagcgtgaccgtgtcaggcaaaaaggaagtggtatccgttaagctgtcacctgatgtggtggacccggacgatattgagatgttagaggacctgattgtggcagctgccaatgaggcgttccgccagatggaggctgagagcagcgaggccatgtctaagctgacaggcggcttaggcggagcactgggcggaggtttccccttctaatggattactacagcagtcagattaccaagttaatagaggaactgtctaagctccccggagttggggccaagtcggcccagcgcctggcattccatatcatcaacatgccgaaggagcaggtggaggagctggcaggtgccatgacaagcgccaggaataacgtgcgctattgtaaggaatgcttcaccttgacggataaggaactgtgccctatctgcagcagtgacaggcggaatcataagaccattatggtggtggagaataccagggatttggctgcttatgagaaaactggcaaatacgatggggtttatcatgtgctgcatggcgccatttctcccatgctggggattggcccgggggatataaagctgaaggaattgatgcagagactccagtcggatgtagaggaagtcatcattgcgaccaattccagcctggaaggcgagaccacagctatgtacataagcaagctgataaagcctacagggattaaagtgaccagaattgccagcggagtacccgttggcggagatttggaatacatagacgaagtaacacttcttcgggcattggaaggcaggacggaactttagacagcagatttccataccgggaactagcgatagggagatgcaaaagatggataaatacgagtttaacataaaagttgagcagattaagaagatggtaagccgcggggactatgaaacggccatgaagatagccgataccatagactggcgcagagtgcggaatgtaaacatcctgtccatggtggcaaccatctatgagaagaacgaagagtaccaggaggccaaggatattctgctgctggcatttgaacgggcgcccataggaaagcgcctgctgttcaagctggcggagctggctatcaaggagggcagctttcaggaggcagaggattactacagggagttctgcgacctggcgccggacgatcccaggcagtatatcctgcgctacctgattctgggggcaaagggagcgcccgcagagcagctgattcataccctggagcagtactgcaacattgagctggatgaaaaatggctctatgagctggcagagctgtatgcggaggccggtatgggagaactctgcatcatggcctgcgacaagattatgcttatgttcggtctaggaaagtatgtagagaaggccatggagcttaagatacagtttgcgcctctcacaaagtatcagatggatctggtggaaaacagggataagtatgaggcacgtctcaaggcagtggagcaggagtaccgcgccggaaaacggcctgcggactatgagcccatgcctgagaggaaaacggaagtctctccccagtcctacatggcccgccaggaggccgcttttgccgtggagccggaagcagagtacccggaggacgggtatgcgcaagccggacatcgggagggcggatacgcggaggacgattatgcgcaaaccggatatcaggaagctggatatgcggaagaagaatatccggaggacgattattcagaaggtgattatcaaaaaaacggatatcaggcagaggtatatcaggaagatacctatacggatgaagatgattctgaggaggcatatggacggcggggctattacggaaatgaatatccggaccagaatccgcaggacgacacagaagacggcgccaaagccgggtacccggaggaacactgcgggaatgccgccggggctgagaaatcatatgagaatgagggcgcacacgcccaggttaccatagagcctgaggattcggaggaagaagaggaatctgcagaggaaacacagtcccgatggatgccggataagccccggattctgtcggatgaagcagtgcgggccagaatgcatgaggcggaggttcaggcaaatctggccaaggagatgtccaggatatcagacggacgtcacaggccggagacaacgtctgcccagacacgggtgttgaccgacatcaaggatttggggagagagtcatctgtccaggaatcgcatcatttcatgatagaagccgagtattccagttcgggtctggaccaggccattgaacttcttaagaagattcataaggagacaggggctaagaaccaggctgccaagataacaggggaaaagcttaacagtaaaggcgtatttgccattgcggacaaattgacaggcaaggacctgattattgaacaggccggcgccatggaggaatccaccctccaggagctgaaccagctgatggccagggatgagacaggcatgaatgtagtccttatagatgtggcgggtaatctggcccgtatccataaggtatatccgggattggccaaacggtttgaatatgtagggaagatggggccggaagaggttgcttatgtggcgccggaaggagatgaccgccccgtgcgccctgtgcagctccggaaggcagaggagccggctgtgtccaggaaggtccagagccggaaagaagaaccggctgttagtaaggttcagccggtaccggaaccagctgcccccaggagcctgccaaaaccagagccagagcagaagccggacacggatcgtaaagcagaaacagagcagaaaccaaagccggtgcgcaggaaaatggaagagagccgcccggagccggttgcccgcagggaagaacataaagaagtcccccttaaggcggcggaaaaccctccggtcctgcctcagccggatgaatcggattatgatgaccagcaggagatggatattgatgaatttgctcagtatgcatgccaatatgccagcgacattgactgcagtatttcaggaaagagcatgctggccctctatgagcggattgaaattatggaggaagacggcgtaccccttacaaaggtaaatgctgaggacttgatagaggaagctgctgataaagcggagaatccatccttctttaagcggattacaggaatattctcgtccaagtatgacagggacggtcttctgatattgaaagaggagcattttatatgatgaccataggtttgattgcactggatcttgatggtactctgctggacagccagaaaaacctgtcagagcgcaaccgcagggcgctggagcgctgcgcccgtatgggcatacagattgtgccgaccacgggcagggcggtggatggtatcacgcaggcagtacggtccctgccgggggtcaactacgccataaccaccaacggcggaacggtggcagaccttattaagggagtcagtctgaagcggtgtacactgtccaacgcaaaggcgttggaagtcatggatatcgtgaaaaagtacagggcaatgtatgatccgtatatagatggaagagggatttcgcagcctgagttcatcgaacatatggaagactacggcctgagtcctgtgattcagaaaatggtactctccaccagggatgttgtgccaaatatcctgcattacgtgacagattgtaagaaggatgtggagaaggtcaacgtatatctggctgatgtgaatgatgcaatgccgctgcgcagggagctttcagccgtacaaggtattgtcatcagctcatctctgtataataatctggaaatcaatgcactgggagccacaaagggtgttgcgcttatgtggctggcagattatcttgggattgcccccgaggccaccatggcatttggtgatggggaaaatgatatctccatgctggaggcggccggagtgggcattgccatgggaaatggactggacatagctaaaaacgcggcagataggattacgctgacaaatgacgaggatggggttgcggacgctatagaacgcctgatattcaactaaaagaaagactgaaattatatggacatgatattagaacattggctgtctgccggtgcaggtgtttttctcattggcatggtactgtatggacattacaggggggcgctgaagcagtgtgtatccctgggagcgctgatacttaccatcatattggtaaaggttgccactccgtatatgacgggttttatcaaggataatccctccatacgccagagcgcggcagaggccatactgaatgcagccggctgggaggaaccgttagcggaaaacacggagcttccggcggcgcagcgcattgctattgagaaccttaatctgccccaatccgtaaaggaaacgctgcttgaaaacaataacagcgagttttatcatatgctgggagtggaacagtttgcggaatacgtcagcacatatctggctgacattcttatcaacgcagtcagctccatcatcctgtttgcagtcgtctatatcctgatacatctggtggtgcggtggctggatctcatagcgcggcttcccatactgtatggattgaatcatatagcaggtgccgtcctgggattgatccagggactgttgtttctgtggattggctgttttttggtaggaatctttgcagccacacctctgggaatgacattggaggaacagattaacgcaagtacctggcttcggtttttatatcagtataatctgattaatattgtactgggcggcatcatccggggcattctatagaataaaaagatataattgttcctttaatatatataattaaaacaaatcgctgggaggggatggaaacatctgtaaacagcgatttttttattaaccacaaaatatagagaaatacagaaaaaataagcacatttagtggtgcggaaataaagttgaaaattgtataaaaaaatggcacaaattcccttgacaagttgagaaagtagtgatatattaaaggtccaccgcggaaaacggtgggacaactctgaaaaatgagttgaaaaagttgttgacaagcagtaacatatatggtaatatataaaagttgctgctgagacagacaacaaaaaagaaataaaaaagttgttgacaaacggttgcaaatatgataaactactaaagttattgctgagacagataaacaacaacaaagaaccttgataattgaagattagacagtatgtaaaaccctgaaaattctaaaagcaaaaggtctggtttaggcctttgaatttgagaaaattcagaacaaaaccaagtaatgaaggttaaagataactagccaagctaagtagtctgaaaacctggaatcaacttttgaacatgagagtttgatcctggctcaggatgaacgctggcggcgtgcctaacacatgcaagtcgaacgaagcaattaagatgaagttttcggatggaatcttgattgactgagtggcggacgggtgagtaacgcgtggataacctgcctcacactgggggataacagttagaaatgactgctaataccgcataagcgcacagtgccgcatggcagtgtgtgaaaaactccggtggtgtgagatggatccgcgtctgattagccagttggcggggtaacggcccaccaaagcgacgatcagtagccgacctgagagggtgaccggccacattgggactgagacacggcccaaactcctacgggaggcagcagtggggaatattgcacaatgggcgaaagcctgatgcagcgacgccgcgtgagtgaagaagtatttcggtatgtaaagctctatcagcagggaagaaaatgacggtacctgactaagaagccccggctaactacgtgccagcagccgcggtaatacgtagggggcaagcgttatccggatttactgggtgtaaagggagcgtagacggcgaagcaagtctgaagtgaaaacccagggctcaaccctgggactgctttggaaactgttttgctagagtgtcggagaggtaagtggaattcctagtgtagcggtgaaatgcgtagatattaggaggaacaccagtggcgaaggcggcttactggacgataactgacgttgaggctcgaaagcgtggggagcaaacaggattagataccctggtagtccacgccgtaaacgatgaatgctaggtgttggggggcaaagcccttcggtgccgccgcaaacgcagtaagcattccacctggggagtacgttcgcaagaatgaaactcaaaggaattgacggggacccgcacaagcggtggagcatgtggtttaattcgaagcaacgcgaagaaccttaccaagtcttgacatccccctgacgggccggtaacgcggcctttccttcgggacaggggagacaggtggtgcatggttgtcgtcagctcgtgtcgtgagatgttgggttaagtcccgcaacgagcgcaacccttatccttagtagccagcaggtagagctgggcactctagggagactgccagggataacctggaggaaggtggggatgacgtcaaatcatcatgccccttatgatttgggctacacacgtgctacaatggcgtaaacaaagggaagcgagacagtgatgtggagcaaatcccaaaaataacgtcccagttcggactgtagtctgcaacccgactacacgaagctggaatcgctagtaatcgcgaatcagaatgtcgcggtgaatacgttcccgggtcttgtacacaccgcccgtcacaccatgggagtcagcaacgcccgaagtcagtgacccaaccgaaaggagggagctgccgaaggcggggcaggtaactggggtgaagtcgtaacaaggtagccgtatcggaaggtgcggctggatcacctcctttctaaggaagaagaagtaagggttttagatactgtctagtgttcaatgaaaaggacacagagaaattccggtggcgatgcgcttaggggaaacacccgtacccattccgaacacgatggttaagacttaagcggccgatggtactatgctggagacggcatgggagagcaggtggctgccggatttaaaccgggcttatagctcagccggttagagcgcacgcctgataagcgtgaggtcggtggttcgagtccacttaagcccactggtctgtgttggacagacatcataatttaatagggattgcctctgtaaatagagggaagacccacatcctatgggggtgtagctcagttgggagagcacctgccttgcaagcagggggtcaagagttcgaatctctccatctccatttgctgaagtgactgtgaggaagaaggctggtcctgaaaccttgaaagtgacggaagcataccatacgtaccttgaaaaccgcatattggataaaaatgaattgaatattcaaaatcagaatatcaagacatccgaggccatacaagagattgtatggaagaaacaaacttgtaaatgcgaaagcgtttataaacaaacctagaaccaaagcgtccaacgctatggacgtgagaggaaccgcagcaacccgccgcggggaatcattttggttaagctataaagagcgcagggtggatgccttggcactaagagccgatgaaagacgtgataagctgcgaaaagcttcggggaggagcaaatatcctttgatccggagatatctgaatggggaaacccggctgagcaaacctcagtcactgcatggtgaatccatagccgtgcagggggaacccggtgaactgaaacatctaagtagccggaggaagagaaagaaacatcgattcccaaagtagcggcgagcgaaatgggaagagcccaaaccagcgtgcgtgcatgctggggttaaggactgcgtacgtgaaccgaattgttagtggaactgtctgggaagtcaggccggagagggtgaaagccccgtacacgaaagcaataggaagcagcaggatccagagtaccacgagacacgagaaaccttgtgggaagtaggagggaccaccctccaaggctaaatactccttagtgaccgatagcgcatagtactgtgaaggaaaggtgaaaaggaccccgggaggggagtgaaaaagaacctgaaaccctgtgtttacaagctgtggaagcacgttaaggtgcgaccgcgtactttttgtagaacggtccggcgagttgccggtactggcaaggttaagagcttaaggctcggagccgaagggaaaccaagtctcaaatgggcgtcaagtcagtacaggcagacccgaaaccgggtgacctatccatgtccaggttgaagcggaagtaaaattccgtggaggaccggatccacatccgttgaaaagggtgggaatgaggtgtggataggggagaaattccaatcgaacccggagatagctggttctcctcgaaatagctttagggctagcctcatattagtttagcggaggtagagcactgaattcctaagggggcgtcaaagcttaccaagggatatcaaactccgaatgccgcgtaaatgatgtatgggagtcagactgcacgagataagttgggcagtcaaaagggaaagagcccagacctacagctaaggtcccaaagtgtgtgttaagtggaaaaggatgtgggatttcaaagacaactaggatgttggctcagaagcagccacacattcaaagagtgcgtaatagctcactagtcgagaggtcctgcgccgaaaatgtccggggctgaaacacaacaccgaagcttaggaatgtcgtaagacattggtagaggagcattctcaggacggagaagcggtaccggtaaggagccgtggagtgctgagaagagagaatgccggaatgagtagcgagatggaggtgggaatcctccaggccgaatatccaaggtttccagagtaaagctgatctgctctgggtaagtcggggcctaaggcgaggctgagaggcgtagtcgatggacaacaggttgaaattcctgtaccgtgtatcatcagaactgtggggacacagaaggacagcacatcccgggaatgggaataccggggcaagcgtggtaggagtacggctggaaaaaccgccgtgcaatccgaatacgtgacgcggagcgaacaaaagtagcgaagtgtgtgattccggctgtcaagaaaagccgctatcgtgtgatacatgcccgtaccgtaaaccgacacaggtagatgaggagagaatcctaaggccggcgggagaagcattgttaaggaactcggcaaaatgaccccgtaacttcgggagaaggggtgccgcagagatgtggccgcagagaataggctcaagcaactgtttagcaaaaacacaggtctatgcaaaaccgtaaggtgaggtatatgggctgacgcctgcccggtgctggaaggttaagaggagaggttagcgcaagcgaagctttgaatttaagccccagtaaacggcggccgtaactataacggtcctaaggtagcgaaattccttgtcgggtaagttccgacccgcacgaaaggcgtaatgatttgagcgctgtctcaacaatgcacccggtgaaattgaaataccagtgaagatgctggttacctgcgccaggacggaaagaccccatggagctttactccagtttgatactgggattcggtattgcatgtacaggataggtgggaggctgagaagcatggacgccagtctgtgtggagccaatgttgggataccacccttgcgatattgggtttctaacctgcgcccgtgagccgggcgggggacaatgtcaggcggggagtttgactggggcggtcgcctccgaaagggtatcggaggcgctcaaaggttccctcaggatggttggaaaccatccagagagtgcaaaggcataagggagcttgactgcgagaccgacgggtcgggcaggtacgaaagtaggacttagtgatccggtggtatgaaagtgggattgccatcgctcaacggataaaagctaccctggggataacaggcttatcactcccaagagttcacatcgacggagtggtttggcacctcgatgtcggctcatcgcatcctggggctgtagcaggtcccaagggttgggctgttcgcccattaaagcggtacgcgagctgggttcagaacgtcgtgagacagttcggtccctatccggcgcgggcgcaggatatctgagaggagctgtccttagtacgagaggaccgggatggacagaccgctggtgtatctgttggcctaccaaggccatggcagggtagccaagtctggacgggataaacgctgaaggcatctaagcgtgaagcccccctcaagatgagatatcccatcgcgaaagcgagtaagaccccttgaagacgacgaggtagataggttagaggtggaagtgcagtaatgtacgtagctgactaatactaatcggtcgagggcttatccaaaaggttaagggaaaaagttggtttgtgaagcaatcggaattcaatatgcggttttgaaggtatgtattacctgcataaataatgcaggtttttcatataatatcttcaaaaggtacttgatgaattttttattatcatgtataataaggaatcggagagcatcagcctattcctcgatagctcagtcggtagagcacgcggctgttaaccgcgctgtcgtaggttcaagtcctactcggggagttttttaatttatatatgcaaggccccatggtcaagcggttaagacatcgccctttcacggcggtaacaggggtccgaatccccttggggtcatttataagttaatatggcgacgtagccaagcggtaaggcacgggtctgcaacaccctcatcaccggtccgattccggtcgtcgcctctaaaaaagaatcacggatatgtggttctttttattttatcggctctttgtcaatagttggggcgggattttaacaaatcccgccccagttctatggcaagggcactttttatatatggttccaagttttcctgattttgggtatgccaaataagcctccgcatgaccggccattttatcctatgatgtacagtggagtatccgggtccgaaaacatgtgctatatagtttgtgaccaatcgtctgctaaaaggaattccgctggagttttccattcccgacttaggctgttccaccttcagcgcacagacagaggatggggatcgcatattcggccggaattttgacctgacgtattctccggcccttttcgtggtaacagagccagacaacggttaccgttccatgtcaacagtcaacctggcatttctggggtttggagaagataagctgccggatacattgaaacgcaaaatcataaccctggcagtgccctatgcccctctggacggtgtgaatgaaaaggggctggcagtgaagaaatttaattttggaaacggacaggaccgttatgagaaattgcacggaccttacagccagtgtgattaccgggaggcagtatgacaagcctgcccatgaattcaggcttatatagtaattgattctttagcggagagcagtcccatgactgtctttccgctattgtttttcggaaggttttcatggaatacaatatccctgggaatttcccaggattccagataatcattcagttcttttttaatgatgcggcgcagggcagctgcgtcctggcctgagggagtgggcaccgggaggacaacatgggcccgcagagcattgttttcaaagatgacagcggcctcctgtacctgaggcagggagttcagtgcattttctatttttacggctgaaactttattgccgtgaatattgtatacattgtctttgcgtccattaaagtacagataaccgtcacggtccatatagccggtatcgccaacgctgtaaggccctgtgattcctatggcggaatagggggtatccacatagatttcgccgttacaaagggttacgtctacgcctgggaagggtttgccgatacaggccggattatcattcatttcctggtctgtcagccaggtgacatagctcaattcactggctccataatagaggaaacagcagctgtccggataggctgctttcaaaaggaccatatccccgcggccaaggctctgggaaccggccaggatggtcttgatatcagggctggaatgggaagcgtattttgccaggagccggagcttggaggggatgagatagagggcatccacatgatgaagctctatttccctgcaccagacagaaggatttacaggggaagcggtgatgatggatgctcctagtgacagaagggacagatacagattcagattgccggtaaatgccaggctgccctgagcaaaaagccgtgtttgggcagtcattccaaagattgtattttggataggaaagaaggaggcccagctatccagggtccggaaccatagttttggctgtcccgtagaaccggaggtaagcacacccatacaggccccggcaggaatttcctctgttataagggattcgggaacatatttcatgtctgcgggcacaatgacgggaacacgggatgtaccgctaaatgccagaaaccgtaccagctggccgtgcacagaggccgccttgatccatgccacggaaggcgcagccggttccggggacagggaacggatgcggcaggcttccatgacaagcgtgccgtatgtataaaaccggccgtcctcaatcagggctgtcctgtgagccggaatggactgaatcagagagagataatccatagaatgtttcatgggtgactccttttggcgtatgatatttggggagatgatgctgtttactgttccagaagaatggcgcttccgataccgcctgcggcagccgcgcagcagatgccacggctgctttctgacagttccatggacttcatcagatggagaagaataatggcgccggaagccccatagggatgcccgtaggccagggcgccgcccagctgattataacgggaggcttgatccggataagcccggttcattagaacatcaatagcggcaaacgcctcattgcactcaatggctcctatgtcattcatggagagtccgctgcgttccaaaagacctttgacagcaggaagcacggaggcagggctcataagtgggtcagccccaaccgtacaggcatttgcaaggcggaaacgggcagagagtttgtgctttttcagatacggttctgaacagagaagaagaaaggcagccccgtcattcatggtacaggcattggcggcattgagataccggccatccctcaggacacagggcagccggtccagcaggcgctggttcaggcggggccggattccctcatcatggtcaagtccgtatacagggacagttatgctgtcaagaaggccttcacgggcagctttgtacgcccgcctgtggctttccagcacccaggcgtccatttctccggggcttatatggtaatggcatattgtcttttccgcaccctgcagcattacgtcctcacggtgcgggccgggaataaatttggcggtgctgtacgtcagggaaagccccgttctgcggacatcgctattgtcagccggactgccgtcatgtatgtcagccggattgccggaaggattatcagtatgggaggagacatatggatggttagggttatagctgcgcaggggctgagtggaactgctttcaaaacctccggcaatcaccagatcagccagaccgctctgtatcctggccgcggctgttatgacggcttccagggaggaagcgcactgaaggtccactgtaacggaaggaatggattccgaaagtcctgcctccagggccatgagacgggtaatgttgccccctcctcccacacagttgccgcagataatcatatcaatttttgacggctgataccgggcggtcagctcctttaacacggcggcgcccagatgctcggcgggtacatggcggtatgcgctgtttcttacgccgatatagctgcgcagccctccaagtatgaataccttgtccatgaaagcctcctaacgggtccgctgggcgtttgacagacttatctgcaccggcttcgcaatcagggcggcggcaaagcatttaaaaatatcaaggggaatgaatgggattacggcggctgtgaaggtggctgtccagtccattccggttatgaatttcatataggcacttcctatcagataaatcacaggcattccaaccagaatggtcaccagacaataccgcttaaagctgtaattttttccctttaaccatgacatgagcatgacagccggaatccatgacatgatatagccgcctgttgggccgaacagctttccgggaccgcccatgccgccggagaatataggcagaccggtcagacccagaagaatatacacgaccatggtaaaaactgcctgcctgggagtcaggagcagtgcaatgagattgacaaccagggtctgggccgtaagactggccggcgtgaatggaagagggatgacaatgtaagcggaaacacatattaatgcggtcagcagggccattttggtgagttctacagtattaaatttctgattcatgattacctccgtttttaagtttgatctggtgagtggatggtcatggtaaaacaggtggtactgcccacggttcctgttaccatgttgttattttgtatcaggcggacagagcctcctgtatggacggggtgcaggaatcgtatggaaagggtctcggcagggctgtgggagccgtacaattcctccagccggctgagtatccacaggccgggaacgactgcatttggtccatagtgaatcgggttggtatccccggaagcagacaggaagctcttaaggtcttccggaagaaaggtcatggtcagttgtcccggcatacacctggcccccttgacatttccggtattccggagaacattaatgtccaccaggcatatttcaagagaccggcagggcagacggcctgcatcatatgcagtggtttccaacaggacatatccgggagcagcctttttcgggatggattcacaggatgcgggttccgaccggctgtggagacagtaccgggcctttccaatcacccacccgtcaaaatccttctgtccccattggcaggcggcttgtatgagtttcatcatattgggctcctctctgaaatttaccattacattttacttattatagatagtgtacggcaaattgtcaacataaaagcaaattttggttaacatttaaaaatgcaatgggaaggcagcaaccggaaggcgctaaccgtcatatattacgtcggcggcatgaggtgaaaatagagcgtaggatacagatgcagaattggcaatactgggaatcaatgacatagaaagcccctttccatattctttccgatatggtaagataggtaggtaaattgagattgtatagtgacaggatgaaaagatgaattacattgtttttgatttggaatggaaccagagtcccaatggaaaggaagattcggtggagcatcttccttttgaaatcatagaaatcggagcagtaaagctgaacgggaattttgaagagacaggaacgtttcacaagctgatccggcccaaggtttataaaaagatgcattttaagatatcggaagtgacacacatggatatggcaaagctgcgccaggagggagaaccctttgatgtggttatgaaccgtttccttgcatggtgcggtgaggaggagtattgcttctgtacctggggctccatggatttgacggagcttcagaggaatatggcttatcataagcttcccaacccgtttcccaggccccttctttatctggatattcagaagctttactgcctccagtacggggacggaaaaaacaaggtatcccttgatatggcggtacagcttcaggaaatggaagaggagaggccgtttcaccgggcgctggatgatgcctattataccggccgtatcctttcggctctggacatggagacttatggtacctacgtgtcggtggattattacggacttcccaggaataaggccgaggaataccggctgtattttccggaatactccaagtatgtgtccagagaatttgactccagggaagacatccttaaagataaggatataacagatatgaaatgcgtgaaatgcaacaggatgctgcgcaagaagctcagatggtttccttacggacagagattttatttctgcctggccgtatgcccggagcatggggttgtgaaggggaaaatcagggtaaaaaagtcagaggatgaccgcttttatgctgtgaagacggcaaaaatggcggatgcccaggatgtggagcttttggtccagaggaaggaggacagccggaaaaagcgcagtgccaaggcccatcacaaggaggctttaaagcccctgaaggggagaagcaaacagaatcaatcggataaggtttcataagaagaaacggagcaggtgattaaccacagtctcccggtccctctggtttgagaggccgggttttttgattatgccagatgtttcacactggagcgttccaccagctttcccgtaatctgggttttcatgggcatgaaccggggatcctctatcagctgcatcagctgggtgactgactgctttcccattatcttcctctgcacatggatggtggtcagtgtgggggagctgatagaggaataggggatatcgtcaaagccaatcagggatacgttattgggaattttataccctttttccttcagggctttcatggcgcccagggcaatggtgtcgttttccgcaaaaaagcaggagggaagcaccgggttctgatccagtattctgaaaaaatcgtcatgggcccccaacatggtaggttttacacgaaactcatttttagggttaaactgaaaattcaattcttttacatatctgagaaaggctacgtgccgttcattaaagttttctgctcctgtggtactgcccaggtagcccagttcggtatgtccgcattctttacagtactggagggcaatgtagacattttcggcattgttcatgcatacactgctacagtaatggttggggactgtgttgtccaccaccacaaatgggatgggaatggaatcaagggctgagaattcatcccgcatcacctcggttgcaatgaggaacatcccgcagtatttgctgtaatcaatggaatcaagggctgactttaagccggttttgaccacggtcatggtcatgcccagctgctccgcgcggagctgttcctcgatggaatcaatgatcatggaaatgaatccctgattttcctccaccagcataccgcttttatagtattttaccaggagtacgttcttgccgcttttgggcttgcgggcaggaggcgtgtactggcaggcttttactgcgtccaacaccttctttcgcgtatcctcactgactccctttttcccgtttaacacaatagaaatggttgcgggcgaaacgccaatctgcttggccagctctctgacggtcatatgaaatctctctttccggattgcagaggtcaaattaaacatcattgaacaatccatgtgatttactaatcatactatagtttgaattataacacagggttgaaaccgggtcaattcaatataaaaaattgaatgtttactaaacaaaaacaaatacaggaaggataaaaaacggctgtttattgattggtacaattaaaatgcacaataaaaataatattaaacgaaaaataataacaaaaataccaataatatattgacattgaagaaaaaacgttgtactatttagttaacacaaaaaacgaggtacacatattgtttagtaaacaatatcaataacaaaaaaggaggaaagagtacaatgaaaaaaatgaaaaaagtggtcagtgtaattgcggcggcagctatggcagcatccttgctggcaggctgcggcggctcgggaggttcatccaccacggcagcagagactgaggcggcagaaaccaccgctgcggcggctgcggagaccacggcagcagaggcagcggcagacaccacggcggcgccggctgcagcagagaacccggtggcaggtaagaaagtggcctatatcatgcttctgccatccgcaaccatctttcagatgtggaaagattcctgtgcatctctttgcgatgccctggatgtaaagtttgatttcttcttctgtgacggtgacttcaacaagtggcaggataccatccgtacctgcgcatccgcaggttatgacggactgctggtcagccacggcaaccaggacggctcttatgtattccttaaggaaatcacagagcagtatccggatatgaagattgttgcctttgacacacagttctactccgacggagcgtatcagaagcttccgggcgttacccagatgttccagcaggataagtccttggtaaccgtacttctggaccagatgattgaaaagtacggcgagggcgtccgcctgattaaggtttggagaggtcctaactacaacagcccgtttgaccgccgcgaggttggctggcaggagtatgaggctgccggtaagattgttaccgtaggcgaggtacagcctcttcaggattccgttgactcggctaacacagtgactgctgcatatctgcagggcgtaaacagggcggatgtggacggcatcatcgcatactatgacctgtacggccagggcgtttacaacgcaattgctgagaatgacaactttaacggcaagaacggcgacgctcttcccatggcatctgttgatattgacccggttgacgtaaccaacatgcagacccgtcctgacatctggaccgcagcaggaacaaccgactggaccatgaacggcgagattggcatgcgtatcctgatgctggagctggcagaccagtatgataagatttttgaccctgcaaccggcgagagcggcgtggatgtagttgaggttcccggcaccgcaatcaaggcagatgcacttaagtcagattccaccgttgagaacctgggcaatattgccggcgaaacttacggaaatctggattatctgtctgccgcagactggatgccaaaggatttgattcacaaataagcggccagtaaaaaacgaggttttcttttgaacacaaaaccacaggcaatcgtttttgggggaagcgcgggttttggcctgcgtttctcttttttaagaagattgtatcgctgaaaagagggactccatggataggattagattagaaacgaaacatgtttccattgaatttccgggcgtcaaagcacttgacgacattaactttgaagtgtccaccggtgaaatccgggcagtcgtgggtgccaacggcgcagggaaatcaactttgatgaaggtgctggcaggggcaaactccacgtataccggagaagttttgctgaatggaaaaaaggtggaggtaaggacgccggtggatgccaagaaactgggaatccagattgtgtatcaggaagtggatatggctctgtatcctaccttatcagttgcggagaacattttacagaacgatatggtcatgggaaagagcggctatatcgtaaattggaaaaaagtatataagcaggggcgcgaggccctggaccggctgcatatcggccgcgatcaggtggatgagcatgaactggtgcagaacctgtccctggcccagaagcagatggtgctcatagccaaggccattcggtcggaatgtaatttcctgattcttgacgagccgaccgcgcctttaagcaataccgagacagaggagctgttccggattgtcaagcatttacatgaaacggaaaatattgcgattctttttatttcccaccggttaaatgaaatcctggaggtctgcgagaattacacggtaatgcgaaacggcaggatgattgacaccactccggttacaggggagactaccacaaaagaaatcgtggagaagatgctgggacgcaagttcgaggagaacttcccaaaggaagcctgccagattggcgaggtgctgtttcggacagaaaacctgtccggcgcaggcggcaaggtaaaggacgtgtccatacaggtgaaaaagggcgaggtggtaggaatagccggcctggtgggagccgggaaatccgagctttgcaagaccgtcttcggcgcatataaaaagacaggcggaaaggttctcctgaaaaacaaggaattaaagatagcaaatccttccggggcagtaaagaaccggatggccctggtgccggaggaacggcgtaaggagggggtcctggtaaatgagaatgtaagctttaatttatcggcggcatgtctttccaggttctgtacaggcccctttatccgcaggcggaaagtggacgacaatgcgaagcggtttgtaaaggaccttggaatttccacgcccagcgtgaggcagcaggtcaagaatctttccggcggcaaccagcagaaggtggcggtgggaaaatggcttgcggcggactgcgatgtatacatatttgacgagcccacaaagggagtggatgtgggggcaaagcaggacattttccatttgatcaatgaaattgcgaaacagggaaactgtgttatctatgcttcctgtgaaaactcggagctgctgtctctcacggaccgcatgtatgtcatgtacaacggtacggtcatggcagagctggaaaccgctaagaccacggaggacgaaatcatgttctactcagttggcgggaaagacaataagaacgggaaataatagacaggagggatacggtagcgatgaaaagtcgtacaaatattaagaggtttttagtggattgggctgcggtcctggcattgcttgtttgctttattgcgtttacagcctataagggcaattcctttatgtcaacaagcaacatggtaaatattctcagggcaatggctattaatacggtgtttggtatagcggccaccatcaccatggcgccggatggttttgatatgtcagccggaacactggccagctgttctgcttatgtgtttgtgtctgcgtatctctggctgggacagtcgttgggaatgtcaattcttatctgtattctggctactctggttatgtaccagctgaccatgttcctgattcttgtctgcaagattccggatatgcttgccacctgcgccctgatgtttgtccatcagggaatcggccagtggtatataggcggaggcgctgtctccaccggcatgaagacttcctggggagcggcacctgcacgtaccgcgctttcagaatcattttcagccattggacgcgctccgtggatcattatcatcatgctgggttgtgtgcttgtggcctatcttttcctcaactttaccaagcacggacggtatctctacgctatgggcggcaataaggaagctgcaaagctgtccggtatcgatgtaaagaaataccgctatctggccggtatgattacagccgtgttcatcgccgtcggcggtatcctggtggcatccaggggaagctctgcacaggttatgtgctgcgataactatttgatgccgtcactggcagctgttttcgtcggacgtaccgtgggcggcgctgagaagcctaatgcactgggaaccatgataggagccatgctggtttccacactggagaacggccttaccatctgtgcggttccgttctatgttctgccggcagtgaagggctctgtcctggcacttgcgcttattgcagcttatgcatctaagaaagaagattaatcaggaggttactacatatgtcaagatttgatcattattttcagatgaacgtgggggatgtcattgagtatacgctggagaaagccacggaaattccatgggaccgcgattctatggaggcagtggttcctccttcccatggcaacctgaactatgtgtatcgtgtatgggacggcaagggacattccatctacatcaaacaggccggatccgaggccaggatatccaaggacataaaaccatccagggacagaaaccgcctggagtccgaaatactcatgctggaggaccagtatgcgccgggaatggtacctcatgtgtatttctttgacaccgtcatgtgcgcctgcggcatggaggactgctctgattatgcggtcatgcgcgacgccatgttaaagcatgagaccttcccaagattcgctgaggacgtatccacctttatggtgaacacccttcttttgagcagcgatgtggttatggaccacaaggagaagaaagagctggtaaaaaagttcatttctccggacctctgtgatatcacggaaaaacttgtgctcatggagccatatatggatttgtatgacaggaacaatgtgtatgcgcccaaccgggattttgtgaagaaggagctctatgaggacgaggcgctccgcctggaggtgagcaagcttaaattccggtttatgacagatgcccaggcgcttctgcacggcgatcttcacacgggatccatctttatccgccaggattcaacaaagatatttgactgtgaattcggaacctatgcgcctatgggctatgatgtgggcaatgtggtggccaacctgatattcgcatatgacaacggactttccgcggacgacggaccattctgcgactggtgccttaagaccattgaggagacagtggatctctttattgaaaagttcagcaggaagtatgacgaggcagtgacagagccaatggctaaggtaaagggctttaaggagtggtattttggcggaatccttaaggataccgccggttatgcaggcacggagctgcaccgcaggaccgtgggcatggccaatgtagtggatgtgaccgccattcaggatgaaacgaaacgcctccttgcggagcgcatcaatatactggcaggcaaggattatattatgaaccagggctcctttaggaccggggctgattacgctgcggcagtgttaagggcaaaggaagcagcccaaaagacgctttaaggccggttgggacatgagggattacacaggttaagtagagaaggaggcataaaaaccatgacggttgaggaattttttgaccaggtgattacggtcagaatgagagaggacagaagctcgctggacatcatagaccagacgcttcttccgggcaccattaagcgtatcaatctgaatacaaaagaggaaatatgggaggcaatcaagaagctgagagtccgcggagcccctgcaatcggcgctgcggctgcctatggaatagccctgctggcatccggcattgccggggaccagtacgacgcgttttacagccggtttaaggaattgaaggattatctggcatcgtccaggccaacggctgtcaatctgttttgggcgctgaaccgtatggaggcggctgttacggccaataaggaaagggacgtgaccgcaatcaaggagctgctctttgaggaggcggataagattcgggaggaggatatccaaatcagccgcggtatcggagaaattggctttgggctgctgaaggagctcaaaaaggagggcagggaaataggtatcctgacccactgcaatgcaggcacactggccacggccaagtatgggacagctacggctcccatgtatattgccctggaaaagggatggcccggaacagccatgcatgtttactgtgatgagacaaggccccttctccagggcgcccgcctcacctcctttgaactctataatgcgggtatcaccaccaccctgcagtgcgacaatatggcgtccatactgatgaaatcaggaaagattgacattatctttgtgggctgcgaccgggtggccagaaacggcgatgccgccaataaaataggaaccagcggcgtggccattctggcaaagcactatggaatccccttctatgtgtgcgcgcccacctccaccattgatatggatacattgacaggcgatcagattcccattgagatgcgaagccctgatgaggtgacagagatgtggtataaggagcgcatggctccggaaggaatcaatgtatataatccggcctttgatgtgaccgaccactccctgattacaggcatcatcacggagaagggaatgtgccacgcgccatatgacaaggcgtttgagtccttgggaatagggaggtaagcatatgctgagtggagtacctgcaagcatatcgcctgagctgttgaaggtcctgcatgagatgggacacggagacaccctggttatcggggatgctaattttccggctgcatccatcgcggcagagaagaatcatattaacatccggtgcgacgggcaccgggccacagatatgctggacgccatcctgcaattgatgcccctggacggctttgtggagaaacccgtcacaatcatggataaaatggaaatgcaccgtgacctggagtgcccggtttgggacgagtttacggatattgtggcaaaacatgacgaacgcggcgctgatgcggttggttttttggaccggttcgcgttctatgatgcggcaaaggatgcctatgcggtggtgtccacctcagagacggcattttacgcctgcatcatgatacaaaaaggctgcctgtagaggcagagcggagggattttacatgcttgagacattaaaggagcaggtggttgcagtggcaaaggaggcggagcgcctcggcatgtgcaggcacaaatcaggcaatttcagcatatttgacccggagacagggtatgtggtgattacgcccagcggcgtggccagggatgtactgggaacggaacatgtctgtgtcatggacctttggggtaaggtaatcgagagggcggcggaggtcaagccgtccagcgaggccatgatgcacctgtatatttataaggaaagaaaagatatccgggcaatcgtgcacacccacgcccgttattcaacggcgttttccatcatgaacaagcctattatgcccattgtttatgagtgcgcctacctgggtaagacgggaacggtccccgtggctccttatggaagggcaggaaccgtggacctggcccggaaggtggctgaggtgatgaaggagtatgactgctgcctcatggagagccacggagccattgcagcagacaaggacatggacgcggcatttttaaaggcccagtacgtggaggaaattgcggagatgtattacatcaccctggccgccggaaacggggccgaaccacatgccctgcctgtggaggagctgcagaagtgggcttatccaaaagaaatcattctttaggaggacagaacaatgaaaaaaattatcaatgccccggaacactatacagacgacatgctgctcggaatctacgctgcccacccggacatggtgaaatatgtggaggatgacctccgctgctactgtacggcaaagaagaaacagggaaaggtggctatcattaccggcggaggcaccgggcatctgccgctgtttcttggatatgtgggggagaacctgctggacggctgtggcgttggcggtgtgttccagtcgccgtcctcggagcagatttacaatgtggccaaggaagcggaagccggtgcaggagtcctgttcctctatgggaattatacaggggacattatgaactttgatatggcggcagagatgctggacatggatgatatcaggactgccagcattgtgggggcggacgatgtgctctccaataaggacgcccaggtgcgccgcggagtagccggaattttctttatgtataagtgcgccggagccagggcagcccggatgggaacgctggaggaggtgctggccgcggcagaaaaggcaaaggaaaataccagaaccgcgggctttgccctgacgccctgcgttatcccggaaatcggccattccaactttaccctggcagaggacgagatggcctttggcatgggaatccacggtgagcccggcgtgtggaacggaccggttaagacagcggatgagctggcagaggaatcagtgggagagatcctggaagatatgcccctgaatccgggtgaggaggtctgcgtgctgattaacggcctgggagccaccagccaggaggagctctacattctgtcgggaagtgtgcaccgccttctggaagaaaagggaatcagggtgtaccgaacctttgtaggggagtatgccaccagtatggagatggccggagcctccatatccatctgccgcatggcggaccaggagatgaagcagtggattgacatgcctgtccatacgccgttttatacccaggtttaaccgggaatatttaactggttggttaaggaggaaaaagaatggatcggattacatgccatgaacttccggagctctttcagggcgcggcggatatctttggggagaaaaaggaagagctctgcgagatggatgccagaatgggggacggggacctgggcctgaccatgcagaaaggttttggggccctgccccagctgatacgggataatgaggcggaaggagatattggaaaaacgctcatgaaggcaggcatgaaaatggctggtctggttccgtccactatggggaccctgatgtccagcggaatcatggaaggcggaaaggccattggcaaaaaaggagaaatggggccaaaagagctggcggatttcctcgctggttttgccagagggattgcacaccgcggaaaatgccatctgggggaccgtaccatcctggatgcggtggatgccggggcaaagaaggcccaggaagcctgcgcagagggtgctgatatgggggccatgctccgaagggcggcagagggcgcaaaggaaggcgtaaaagcaaccgaggatatgcttcctaagtatggaaaggcagctgtgttttcagccaaagccaagggcgttccggatcagggcgctgtggcgggacagtattttctggaaggattgggcagatattttctagggaatctgaaatagaaaaaggaccgctccggcggtccttttttgaacgtctttttattcggcgctattcctcgcgcatccggtagccgaccccgatttctgtaaatatgtactggggctcagccggattttcctccagcttccttctgatatgggccatgttcacacgcagaatctggttgtcgctgtccgcgaacggtccccatattttggaaattatgctctcataggtcatgacccttccggcgttctgggccagcagggaaaccagcttatattcaatctgggtcaaatggacatcctgcccctttacctttaccaggcggcgttcaaagtcaatgagaagattccctacttcatatttaaggctctgtgtgccggccgctctctggctgtgccgcagcgctgtgcggatgcgggccagcaattcagccgtgccaaagggcttggtgaggtagtcatctgctcccaggtccagggcagccaccttgctgcgctccagagtcctggcggaaatcacgataatgggcagggtactggtggacctgacctcttgtatgagttccaggccgtccatgtccggcagacccagatccaggagtaccacatctggcttaagggactcgatgagcttcagcccgtctgttccggtataggcgctggtaacctggtagccctggggggacaggacggtctctatgaagttgcagatgttcttctcgtcttcgatgatgatgatgttggctttggtattcatgttttagtattccctccaatctggtaaggtaaatgtaaactgggcgccccgcgggtgattgccggcgtggatttcgcctccgtgggcattgatgatggttttgcagatgctaagaccgattcccattcctttgtgtccgtctcctgtgtggttttccgacgtgcctccgccgtcaaaaatcgtatccagcagatcgggggcaatccctttgccgtaatctttaatggagacagagagtccgcttttttcggcggcggccaccagatcaatgggttcattggtgccggaatggaacagggcgttttccagaaggttattgattacctgttctatcagggtcgcatccatgggtattatgatgacggaatctggaatgctgacccgcacctggacatccgggaaccgtttcctgaaccgccgcacggaatctgatatgacctcttccagggattcgtctgccttggccactgaggctacgcctttttcgtcctggatcctggtgactgaaagcaggttttccaccatgttgagaagccattgggcatcttcttctatgttcctgaccagcttccgtttttcttcaggggacatatattcctcctgactcaggtacgtggagctggaaccaatgatgctggtcaggggagtgcgcaggtcgtgggacatggcccgcatcaggttggccctcatggtttccttttccgcattgagcagcatgcggtctttttcctgaagctggacattctgcttggtaatcatgatgcagatgctgctggacaggctggatatgagggccatgcccaggaaggtgatggggtaaccggacatggtgaaattcagtgtcaggtaagggtaggtaaaggcaaaatttacccagaacacaccaaaaagagaggccaggatgccggcgccgtagcagctggtagcacgggcaatcatgatgatggccagggtgtatatgatggatatatttgtcacattgttgctgaagtgaaaaaatatggtggaaattaaagtggccgcagccatatattcgatggtaatgggcagattccttaccagatttatggcagcagccttaaggtcggttttatttatatggaatgatttcattacatattcccctgttggcattggatgcattccggctgcatagataaattaacaattttcattatagcgtatgccagggggaagttcaacggaaaaaggattttttgcgcctccgtcccctgcctttttttcctttttctcccagaggagaggaggagatgcggcgctgggccaccagcttttcaaaatcggtggaggaaaagccgatgtcttccaggcgttccagccttcgctggcgtctgaggtataaatcttcttcttccttcttgcgcacatgaatcttcacagccgccacaacagcaatgatgacagccagagaaaatgcaatccccaggatggccagggtgttggcgggaatccggatgctggcggcggttccttcctttgaggtgatatcctggcggggggcagggcctggggacggctgctgcccgtggggagcttctgcgtgagacggtgcttccggcccatcctggagaccggaagcgtctccgggacctgaggaatccaaaggggcaggaacatctgtctccccgttctggtccatggaaacagcagaagccccggaggcatcctgggacgtcagggagactgcgcttcccttcaatccgggagaacacaggtacacggaacccaccggcctgtcattgtacgtatagcggatacaggcaatggctgtctggggatggctgccgtccaaatcataggtaagagcggactgggtgtccgtgaagtcggcgtccctgggtatcaccacgcggccgccccggtccagctccagggatatgctgtcgcctgaggtcatgcccgctatggtcatgtcattttccagggacttgtacctggtctcgtaatcaacagtccgcagggactggaaattgcggaatccaaagtcaaagagagtcttggtatctgaataatgagactggtggccgttgagcaccactgcaatcagggtcatgtcattttttttggcacaggtgaccagggtgttgcctgccagggaggtgtagcctgttttgcccgcaaaggcgccgggatagtatacggcttcgtttttatttaacatcttgtgatggttggccacatagccgccttccggggtgcgtttggtgggggccagctggtagctgcgggtgccgttgatggtaaggaattccgggttctggatggcggcactggcaatcagggccatgtcgtgggccgtggtgtagtggttctcgtcattcaggccgctgggattgttaaaatggcttcccgtgcagcccaagctttgcgccttctcgttcatcagctgggcaaatgcctccctggagccgcttacatgacaggccagggcgttggcgctctcattggcagaggccagcatcagggcgtagaggcagtcccgcactgtcaggacatctccctcgtcaatgccggcgctgctgcttccggcctccacattgtatacatcgtcatgggaaaatgtgaccatctcgttcaggtcgcactgttccagcacaatcagggctgtcagtatcttggtgatactggcaggataatagggctggtccatgttctttccatagagcactgtcccggtgtcggagtccatgacaatgcctgcgtcggcctggatggacacatcggagggccattggggggctgccgctgctgtcatggggaaaagtccggcgcacaggcatagacatataaacaacataaggaatcgcttcatccaaatattctccattcacttctttgctaagatacagtataaaggatttacggcttcaagtaaaggctggagaggggcgttatttttgaagctgtgtccactcaaccttctttcctgcggtttctcacggtgaggagcaggcagactccaaagaggaccagggacagggaaccaaacagcagggcaatgcgggcagccgtatccataaagaagccttccggaacaatgttgatgagcatatccgtggcagggtccagaatccacaggtcgttggtgaagaagatgtggtggaacagaatgaagtatttggtgaaatcagtggatatgatgagcccgaggactgtaatcagcccaaaaaacagtcctgtccccatgcacagggaaggcggaaggatccgccccatcctggctctggtggcagccatgaggatgaggagaccggcgccaaggcccagacatgctctgcggatggacagggccttcaggaaaaggacctgcacgtcctccatgtgggcaatctcacgttcattgaagaattccctctgttccccgcccatggtcgtggtgacgtgaaggtcatccctgtctcctctgagataatccatcatctcatccgtcacatggagaaggtcgttcatggtcatggacggcaggctgtccagcacgttgtatttggcgtattccttttcaaaataaccgggcgtccagtataccactgcctccacggacgtgataaaaagaataatcatcaggcaaaatgcggttatgattccggcggttcggtgtaaatatttcatgattcctcctgcatgatagtgtgggataagttttatataacaaagaaaagcccgaccccgcagctttccgtatctgcaaagtcagaccttttagtgcgccttcagggactcgaaccctggacaaatagattaagagtctactgctctaccaactgagctaaaggcgcatgtgattcatttgtttcttttagtgacacgtccactattataatgcgttttaagaaaaatgtcaataattttttcgaaaaaagttcattctataaatcatcggcttccaccgcctcctcaaaggcgtatccgcccctctgggcaatgggctggttgttttccatgatatccggcagtgtccttcccctgatttggtctgatttgatgctttcacccatgatgcgggagattttataggcagcctccttcagttcgggataaaacaggaaggttagggtcaggatatagggcagcatctgtaccagatgaggcggaacgttgacaccctgcagcccgaactggaggctttgggcaaatccgtacaccagtcctcccagagccacccacagcggcttccggttcccaaggatgaccatggacagggcagtatatcccctgccggataccatgttcttgctgaacatgttgatatccccgatggacaggtaggctccccctatggcggcaagcatgccgctggccatgacacagatactgcatttcatatcccggttgggattgattccctcggctgaattgctgataacgtacagggccgcatagcaggcgccgatggcccttaccatgctcaggaaccattcatggccgggaaattttaaacagatggaacaggtcataagctaccttatctccataaataccagcggaatcatcggggaggaggacgtgctcagtctccctgattttaaactaaaagcggacaacaaaaaagtccgaccccgcagcttccaatatctgcaaaatcagaccttttagtgcgccttcagggactcgaaccctggacaaatagattaagagtctactgctctaccaactgagctaaaggcgcatttccttattttgttttgcggctgtctcaacagcacgttcgccattatatcgcctaaaaagcaaaatgtcaacacttttcgagaaaaaattctgtggaaaaatttttcgttgggagtttcatggcttttttgatgggagcccctttcggaatccctgtgtccgcagccgcctgtacccttgggaacaggcggctggacggatatgtcctttttgggatgtcattttttgtccttatcctttttggccttggctgaaccggagcccaggagtttgcccacttccttgaaggaacggttgaaccggagggcctgtttgtttaaatccgtcttatcgctggtggcctggaggagctttttggtgattcccggagggagtgccatgttgtccgcctcctgatggtatcctttacctgtattctatgcagggtcctggccgcgggtgcctgtccgccgggcaatgagcttgcagataggcttgccctcggaggcgaacttcatctcatactctgtcatcacattgccttctgccatggtgctgttgtgaagatcaaaggtatgctctgtaatctcccagccggcagagggtatggattccagggaatattcaaagagtccgcggttatcggtcttgaattcaacgactccccggggagccagaattttgtcgtacacagacataaagacaggagatgtaagcctgcgcttggcatgacggtcctttggccatgggtctgaaaagttcagataaatccggtccacttcgccgggggcaaagatttccgccatgtccttggcgtcgatgcgcataaagtaaatgttttcaaggtccatttcgctgcgtttctgtagtccccgcagcaggacgctggaatagcgttcgattcctatataattgatatccgggttagcggatgctttttccatgatgaaacggcctttccccattcccacctcgatttcaagggggctgctgctgccgaatacctggttccatgtgccgcggtgctgttttggttcctgaatgacaaatgggctggaggcaatggtttcctcggcaccctggatgtggcgtaatcgcatatgtttcatcctttcgtgatgtagttgctgcaggccttattttaacattcaaaagatgcatttgcaacaaaatttacttttttcttatttttctgattttttataattaatagtgcaaaattagcaaaaatctagtatactatacataataggcggatatctgcgatactaaggaggaaggcttatgtcgaatgtggagcggacgaccagctggcagcagattcagcagggcgttaaggaagcagagcgattgattgcgcgcaaagaatataatcttgtgatggtcagggccagacaggtcctggaatatatggtaaggtgcatggctgagagagcgtgtgtggtggaaggggatttgtccgataccatagaccagctgtacgaaggccagtggattaacaaggctaccaaggataattaccataccatccgtatactgggaaataaggcggtacatgagggggatgacacggcatatgatgccaatcaggccttccggctgctgacccaggaagtgtatgtgtttgccaacgaatttgcaggaggtgcggggggccgtgcgtccaggccgtccccggctgcaaggaatacatcaggccgtccggctcccaggcagggttcgggcgggggcagaagcgcttccggcagaaacagccagagggtacctgccaggaatacccgcagcggcccgtcccgccagggcggtcccaggaagaagcgcaggcgtgtatcgccggcagcatacatactgagactgctgattccggtgctgcttgttatacttctgattgtggttatccgtgttttcatgccgggcaaggacagggaagcagataagaccaccacggcgcctgccgtgaccacggcgcctgtggagcccgcgcccacgctgcccccggaacctgagacagagcctgagacagagccgcccgcagagacctacaggattaagggaaacagcgtcaatgtccgcagcgagccttccaccagcggccggattctggtgcagctgagcaacggcaccgaggtggtgtatgtgaagcggtatgacaacgactgggcggttataaactacgacggccaggaggcatatgtatccagcaagtttatcgaaaaggtagaacccgtggcgtcaaccggaggggagactgagggcagcgaggcccagacagacaattaggccggtgtatttgtgaaaattgtatagaaaaaattggtaattttggatgcaaaaagaggaagaatttaaaaagttcttcctctttttggcgttttgctgtgaagaaattgtgaaaaattaattttaatactaaaatacctctggtttttttctaaaaaagtagtatcatgaaatgatatgaaaatatataaggaggagagctatggatactgtgattaaccggttatcggaaatcgaggcagcggccggagccattgtggaagaagcgaatgcgcgcaagaaggcatttgctgaggagatggatgcaaagacggctgcgtttgataagagcatggaacaggaaacggcgcgcaggattgcagagattcaggagaaaatggaggcggaaatgaacgggctccttgcaaagcagaaggcggaatcagaggccctgcttaaggaactggaagataattatatccggcaccatgaagaatatgcagaggctctgttccagaagatgataaaggggtgagattatgggcagcctgattgcttacagcggcattgccaccaaggtgaaggcaatggaacgctggcgtataaaagatgagcagttccttgagatggcggccctggaaaccgtagcggatgcagtgcagtacctgcgtgcctttccgccctaccgggagatattcggccaggtggaggataaggatctgcacaggggaaacattgagcagcatctgaatctgtcccagtacagggattttgcaaagctttaccagtttgccaatataaagcagaggcgtttcctggacctgtacttcatgcactatgagattaccattctgaagacctgtctgagaaacgcggcaggccacagggaacagaggcaggacctgtccatgttccgtgatttctttgggaggcattctgcccttgatctaatcacgctttcccagtcccagagcatggaagagttcatagggaatctaaaggggtccgcgtattacgggccattgtatcagatgctgcagaacggcagagtaacccttccggcctgtgagacagcgctggatatgctgtatttcaggtccatgtggaagattaaggacaagtacctgtccaggaacgagcagaagataatcgccaagtgcttcggcgccaggatggatatgttgaacctccagtggatttgccgttccaaaaagttttaccagctggagccgggggagatatacgccatgctgattcccatacagctccatctgaccaggaaagagattaaccggatggtggaggcggagaacctggatatactgtacggactcataagggcaagctggtacggcaggacgggtctggtccatctggacgaaaatcaggacctggaccatctggctcacgatataatagacaggatataccagaaggcaagcagaaaagacccatactccatcgccatactgaattcctatctctacttcaaggagagggaagtcgagcgtatcattactaccattgagaagatacgttatggattgggagcaagttgactaaagggggttaagacgtgattgagaagatgaagttcttaagtattaccggtccaaaggaggatatcgaccgggtggtggacacctatctgtccagatatgagatacacctggaaaatgctctgtcggagcttaagacagtaaaagacctgaggccttatattgaaacaaatccatataaggatgtgctggaaagggcctcggagctgctggaaagctatcatgacctgataacggaccagacggaccgaaagatgaagctggaagaagccgttgaggccattaacagcctggacacccagcttaaggaactgacggaccggaagaacgccctggtgcaccagcgggacgagttaaaggcgtccagggacagggtggtaccctttgcggggcttaactacaacgtgaaggagatacttaagttccggttcatgaagttccggttcggccgtatttccagggaatattacgaaaaattctcatcctatgtgtatgagaccatagacacggtcatgttcaaatgcgaggaggagggggactatgtatgggtggtctacttcgtgccggagagcctggccgacaagattgacgccatctatgcatccatgcattttgaaaggtgtttccttccggacgagtatgagggcactcctgtggaggccggacatgtgctggacgacaggataggaagccttcagaaggagatagacgaggcggacaggaaaatcgtggaggccatgagcagcaggaaggaggagtttgccgctgcctgcagacgcatcaggacattttccaccaactttgatgtgaggaagatggctgccgtcaccaagcatgacacccacaacttctatatcctgtgcggatggatgacggagaaggacgcggaaaagttccggaaggaaatcgaacgtgacagcgataccttctgcatcatcgaggacgaccacaacaacatcatgagcacgcctcccaccaagatgaagaatccgggactgtttaggccctttgagatgtatgtggagatgtacggactgccatcctataatgaactggaccccaccatactgattggtataacgtactccattttgtttggattcatgttcggggacgccgggcaggggctgtgcctgctgataggaggattcctgctgtaccggtttaagaagatacgtctggccggaatcatttcctgctgcggcgtgttctccaccatattcggactgctcttcggaagcgtctttggatttgaggatatcatggatgcggtgtggctcagaccccaggaggccatgacaaatctgcccttcataggaaggctgaacacggtattcgtggcggcggttgccatcggaatgggaatcatccttttatgtatgattctcaacgtcatcaacagcctgcgctcccatgatgtggagaaggcgtattttgacacaaacggcgtggccggattggtattttactttgccctggcatccgtgattgtactgtatatgaccggtaatccccttcccgccaccgtgattctggtaatcatgttcctgattccgcttttggtgatattctttaaggagccgctggcagccatagtggagaagaaggcggagcgtatggaaaccggactgggaatgtttatcacccagggtatatttgaactctttgaggtactgttaagctatttttccaataccctttcctttgtccgtgtgggcgcgtttgcggtgagccacgcagccatgatgcaggtggtcctgatgctggcaggggcagaggcgggaggaaataccaactgggccgtggtggttggcggcaacctgtttgtatgcggtatggagggcctgattgtgggcatccaggtactgcgtctggaatactatgagctgttcagccgattttaccgcggcagcggcagggcatttgaaccgtatggaaaggttgccggagagcagtaagcatatataatacaaaaaggagatatgagatatgagtttattagttaagattacactgagcgcagcacttattttaagcattgcagtacctttcggagcatttgcagcaggggaaaggacaaagggacgctataagacagccctggcggccaatgtgttcctgttcttcggcaccatgatatttgcggcagtggtcatgttctccggcaatgcagcggcagccgaggcgggcgcccaggcagccggttcatccgcggcaggcatggggtatctgtcagcggccctggccacaggactttcctgtctgggcggcggcatcgctgtttccgcagcagccagcgcagcactgggagctatcagcgaggacagctccatccttggtaaatcattaatcttcgtaggtcttgccgaaggtgtgtgtctctatggtctgatcatatcctttatgatcttaggaaagctgtaatcccatgaagatgtaccttatcagcgacaacatcgacaccctgaccggcatgcgtctggcaggagtcgagggggctgtggtccataagagggaagaactgaaggaagaactggataaggccctggccgacaaatccatcggaatcatcctgctgacagaaaagtttggcagggaatttccggaaatcatcgacaacgtaaagctggagcgcaggcttccgctgattgtggagattccggaccgccatggaaccggccgcaagccggactttatcacctcttatgtgaacgaggcaatcggactgaaactgtagtaatgatagaaagagggtgaatcagcttgacaacagaggaaaagctaaagcatttccaggatatctgcatgacggacgccagagagcgcagcgccaggatgctggatgactatatgaacgccctggaagctgcctttgaggagcatgcggctgacgccgggaggcgggccgacatgcaggtggaggcagagacagagaagctgggacgtgagatcaataaaaggctgtccatcggccagctggatttaaagagggaggccagccacaagcaggaggagcttaaggataagctgttcgtggaactgcgcgataaactggccaacttcatggagacacaggattaccagcggcttctggaccgccaggtaaaggctgccaaggaatttgcaggggacgaggagctgattatctacatggatccatcggatgtggataagctgcagcgcattgccatgcatcacaacgctaccatcaaggtcagcgaatattcctttaacggaggcacaagggctgtgcttccgggcaagcatatactcatagacaactcattccagactaagctggacgaggcccgccatgagtttaaatttgacttgacaggaggtaggcaaagtggctaagacaggtgtgatttacggtataaatggtcctgtcgtttccctgctgggcgactcagggttccagatgaatgagatggtgcatgtgggccaggagaagctggtgggcgaggtcatcggacttaactcagagaaaacaaccatccaggtttatgaggaaaccagcggaattaagccgggagaaaccgtgactggtacaggcgccccggtgtccgttacgctggcgccgggaatcctgagcaatatatttgacggaatcgagcgtcccttaagcgagattgccaagggaagcggatattatatcagccgcggcatatccgtgaacagtctggacacggataaaaagtgggatacccacatggtggtgaaggagggggacagaatcatgcccggcaccatcatcgcggaggtgcccgagacaagggccatcacccataaggtcatggctccgccggatgcggaaggttatgtccttacggtggtgccggatggccggtacaccatagaagagccgcttctgacccttcagctcatggacggcactgagagaaccctgaccatgacccagaaatggcccatccgcgtggccaggccgtctgccaagcgttttccggcagtaaagcccctgatcacaggccagcgtattctggacaccatgttcccgctggcaaagggcggcacggctgccattccaggcggtttcggaacaggcaagaccatgacccagcatcaggtggcaaagtggtcggatgcggatgtcattatctacattggctgcggggagcgcggcaacgagatgacccaggttctggaggagttttcagagctgatagacccaaagacaggaaatccgctgatggacagaacgaccctgattgccaatacatccaacatgccggtggctgcccgtgaagccagcctgtattccggtcttaccctggcagagtattacagggatatgggctaccatgtggctattatggctgactccacctccagatgggcagaggccctcagggagctgtcaggccgcctggaggaaatgccagccgaagagggattcccggcttacctggcatcccgcctttccgcgttctacgagagggcgggcatgatgcagaaccttaatgggaccgaaggctccgtgaccatcatcggcgcagtgtcaccccagggaggcgacttctccgagcctgtgaccatgaacaccaagcgtttcgtgcgctgcttctgggggctggataaatccctggcttacgccaggcacttccctgccatccactggcttaccagctattcggaatatataaacgacctgtcctcctggtacatggacaacgtggataagcggtttgtggacgaccggaaccgcctgatggcccttctggtacaggagagcagtctgatggaaattgtgaagctgattggagccgacgtactgccggacgaccagaagctggtgcttgaaatcgcaaaggtcatccgtctgggattcctgcagcagaacgcattccacaaggatgacacgtctgtgccattgattaagcagtttaagatgatggaagtcattctttacctgtataagaaatcacgttcccttgtatccatgggcatgcctgtgtccgtgctgaaggaggagaacatattcgacaaaattatatccatcaaatacgatgtgcccaatgaccgcctggatatgtttgatgattatatgaagatgattgacgatttttacgacagggttgtggaacggaacgcataaaggaaggaggtccatatggcgattgaatatttaggtttaagtgaaattaatggccctctggtggtcctggagggcgttcagaatgcggcttacgatgaaatcgtggaaatgaccgtggccgggagtctccacaagataggacgcatcattgagatatacggggacagggccatcattcaggtgtttgagggcacggacggcatggccctgcgcaatacccacacaaggcttacgggccatcccatggagatagaggtttccgaggagatgctgggacgtacctttaacggcatcggccagcccatcgacgggctgggcgacattatatccgatgtgaagctggatattaacggaaaacccttaaatcctgtgacccgtgagtaccccagaaactatatccgtacgggaatttcagccattgacgggctgaccaccctgattcgcggacagaagctgcccatcttttcaggaaacggtcttccccatgaccagctggctgcccagattgtgcagcaggcatccctgggagagaattcggatgaggaatttgccattgtgttcggcgccatgggtgtcaaatacgatgtggctgatttcttccgccgcacctttgaggagagcggggtatccgagcatgtggccatgtttatcaacctggctaatgaccctgtggtggaaaggcttatcacccctaaaatcgcccttaccctggccgagtatctggcctttgaaaagggaatgcacatactggttatactgacggacatgacctcttatgccgaggccatgcgtgaagtctcctcctccaagggcgagattccgtccagaaagggattcccgggctatctctacagcgacctggcttccctctacgagagagccggcatcgtggcgggacggcctggttccgtgacccagatacccattctcaccatgcccaacgacgatattacccatcccatccctgacctgacaggctacatcacagaggggcagattgttctggaccggcagctgaacgggcagaacatctatccgcccatcaatgtgctgccatccctgtccaggcttatgaaggacggcatcggagaaggctacaccagggcggaccatcaggatgtggccaaccagcttttctcctgctatgcaaaggtgggggatgccagggccctggcatcggttataggtgaggatgaactttcacccattgacaagaaatacctggagttcggcaaggcctttgaggaacgtttcataggtcaggccccccatgagaaccgcactatcctggacaccctggatattggctggaagcttctggggatgctgcccagggaggaactggaccgtatcgacaccaaggtgcttgaccagtattataaaactgtggacaccgtgaaggagtgatgtaaatggatccaaatacatttcccaccaaaggcaacctgatagctgcaaagaattcactgggcctggcctatatgggctacggactcatggataaaaagcggaatatactgattcgggagctgatggagctgattgacgaggcaaagggaatccagtctgagatcgacagcaccttccgggcggcgtatgcggccctccagaaggcaaatatcgaactgggcatcaactatgtccaggagataggagcgtctgtgcctgtggatgaccgggtgaagattaaggccagaagcatcatgggaactgagattcccctggtccagcatgaatcgcggcctttagccctgacctatggtttttataacaccacggagtccctggatgaggccagataccattttgagaaggtaaaggagctgactatcaagctttccatggtggaaaactccgcctaccggctggccaattccattaaaaagacccagaaacgggccaatgcacttaagaacatcaccatacctcattatgaggacctgagcaagtccatctccaatgcgctggaggaaaaggagagggaggaatttacccgcctcaaggtaatcaagcgcaataaagagaaggtgtaggaggtttttatgtatacatttgacgaccttgtgggaataatagcaaagctgcggtcgcctgagggctgcccctgggacagggagcagacctttgagagcctgaaaaaatgtctgtctgacgagacccaggaggtatttcaggccatagacaacaatgatatggaaaacctgtgcgaggaactgggggacgtgctgctccaggttatcctgaacagccagattgcgaaggaggaaggcaggtttactatcgacgatgtaattgacggtttatgccggaaaatggtccgaaggcacccccacgtatttggcggtgtaaaggtgaattccgtggaggaagggaccgccctctggaatcagataaaaatgcaggaaaaagccaaaaaaccttgacaaatcatagtaaaacagatataaatgattaagtacactatgacattaaaaagtaacgattccggggcctttcccggacaatatctaggaggaaaaattgatgaacaagacagaattaattgcagcagttgccgagaaggcagagctttctaagaaagacgcggagaaggcagttaaggctttcactgacgctgtatctgaggagctggtaaaaggcggaaaagtacagttagtgggcttcggaacctttgaagtatctgagagagctgcaagagagggaagaaatcccaagactggtaagacgatgaccatcgaggcttccaagactccaaagttcaaagctggcaaggcattaaaggatgaggttaataaataatccatgagattggacaagtttctgaaagtttcccgccttatcaagcgcagaaccgtagccaatgaggcatgcgacgcaggacgcgtgttggtgaatgataagccggcaaaggcgtccgtcagcgtgaaaacaggtgatatcatcgagattcagttcggagccaaggctgttaaggtggaggttctggacgtacaggaaactgtgaagaaggatgaggctaaggaactttaccgttatatttaagataagtggcatagaatggccaacctccccatatatttaacataggttagatatacggggaggttttttgcatggaagaaaagattggaagcaatcgtcagcataagcttatactgcagaaccggagcaagggaaatatcaccggcatatgcgatgtggtgtcctttgatgaaaacgcagttgtcctggatacggatatggggctgcttaccatcaaggggaaggagcttcatgtaagccgccttaccctggaaaagggagaggtggacatagagggaaccatagacagcatggtctacagttccaatgaagccctcagaaagtcgggggaatccctgttcacccggctgtttaagtaggcaggctatgagcagcaggattcagtatgaagcctggctgatggtgctcagcctggtcacaggcggttggctcatgctggcctatgacaccctcagggtgttccgcctgattatccgccacggccctttctggacgggggtggaggattttttgtattggctctatgcggggcttgtgacctttattctgctctatgagcagaatgacggcgtattcagggcctatgtcataggaggggtatttgccgggatgattctgtacgacaggtttatcagcagaattttctttaagtgcttgaaaaaagccggcaaatgccttagaatgattattagcaggcacagacagaaagctgtctgcagcccggaaaaagacggagctggtgattgagcagatgaaatcctacggtaaatcaagacgcgtaaggcgtgacaaatggaccaaccgcatggccatcatgggtattaccctggtagtcatgtttttggctgtggcagtcaatataaagggcgccgaccttaagaaatcggacctggaatacagcatccgcgaacagaacctggagcagcagaaggaagaggaagaaaagcggaccgcccagctgcaggaatacaagatttacgtcaagaccaagcagtatgcggaggaagtggccaaagaaaagctggggcttgtgaatcctgatgagattctgctgaagcctacggagtgatggcgaaaacgggcgaataatttttaaaaatccatgcatgaattgacatatatttccctcctgggtgcgtatactgaaagttacgcggattaggagggatttttgtgtttatcagagaacgggaagtaaagggaagaacagatgtaaattattatacggccaggagactgggggatatggcagagtccttaaaccagctggccagggcctttgacgacggtatagagaagaacgggcagctgacaaaggatgatggactggctgccatgcaggccagcgctgccctggtgtgcgagaactgcagcaggtgtaatctgtatgcggacagcgagaaggaggacagctattacctctactatcttctgcgggcatttgagcagaagggccatattgattttgaggacatgccccagatgttccagagcggctgccggaagaaggaggattatcttgcccaactgaaccggagcctgggaagggctaccatgaacctgtcctggaagaaccgtttcctggagagcagggacgcggttatatcccagtttagggagctgtcggtgatactggaggaattttcccgccagattgaccgcgcaagggatattacggacgagtatgaatacatactgaaaaaacatttcaggcgttaccatgttgccctgggaaaccttttgcttctggagtacgagaacgggcagaaggaagccttcctcacggtcaggaccaccaacggccgctgcatcacctccaaggatgcggcgctgatcatgggggaggtcatggatggcacgaggtggagtccggccaaggacagccgcagcattatcaccaaacagtatgaaaccgtgcgttttctggaggagggaggctaccgtatgctctatggcgcttccaggattccaaaaaagggcgagaagtattccggggataattataccttttgcgagagtcccggaaaccaggtggtcatgagtctttccgacggaatgggaagcggggaggcggcagccagggagagcaaacaggtggtggaactgacggagcagctgctggagaccggattttccccaagggcggcccttaagctggtgaacacagtgcttttgctggcaggaccggaacagcatccggccaccctggaccttagctgcattgatttgcataccggcgtgctggaggcaatgaagctgggggcggtgccaaccttcataatcggggaagagggagtggaaatcatggaagccggggaggttcccatgggaattctcaatggggtggagccggtgctcatgtcaaggaagctgtgggaaggggaccggattgtcatggtcagcgacggggtattggatgctctgccgggagatgacaaggaacaggccatgcagcagtatctggagagcgtggaggagatgggaccccaggaactggcggaccaggtgctggattttgcggtgtcctttataccggctccaagggatgatatgacggtcctggcagctggaatctggaaaagacgctcataatttacaaggacaggcttgcaaggagggacgtttgcgggtatattataagaaatagacagagataaacatgattggacacaggagagacaggtggaaggactggagcgcagggtcagagagaccgtggaacaatatcatatgctggattcgggtgaccgggtcgttgcagcagtttcaggaggggcagattccgtctgcctcttagcgttgttatgcacgtttagggaaccgtggggagtcaggatcagggcactccatgtccatcacgggctcaggggggaggaagctgaccgggacgcggattttgtcaggtcattgtgtgaagggtttcatgtcccctgtcatatcctaaaggtagatgtgcgcggcttcgcggctgaaaagggcatgtctgaggaggaggcgggccgtttcctgcgctatgaggcattggagagggaggctgcggattgggaagatgaggaccggacaggaccggatggcggttcggctgacagcagcgtccgccctgtgaaaatcgcggtggcccaccacagcggggaccaggtggaaaccatacttcacaatctgttccggggaagcggcctttccgggatgaagggtatcgtctaccggagaggcaggattatccggccgttactggacgtggaccgggactgcatccttaagtggctggcggaccatggcctgtcctatgtgcaggattccaccaacgatacccttcactacacacggaacaggatacgcaatcagctgctgccggagattgagcagtatgtaaacaggggggcggccggtaatatattgcgtctggggcatctggcggcacaggcagacgagtacctggaaaatcaggcggctgcctggattaaggcccatgtgaggaaaaactccggggcatacattccggcagaggtgtttctgggggaaccggagatactgaggtcctatgtggtgatgtcgctccttaaggagctgggaggagcttccagggacctggggcttgttcatgtgagccaggtcatggagctggccgggcggtccgttggaaaacaggtggatttgccctacgggctggcagccataagggagtatgagggaatctggttgggaagaggagacccggcggcagaagaaggatggggtgacctgcctattgtggatatggaggttttttcccggaaaaaagggatggaatttcctaaaaatgtgtatacgaaatggtttgactgtgataaaataaagggtacgcccgtggtaagaaccaggtgtccgggggattatatcgtcctggcggaccataaccacaaggcgcttaatcgttttatgattgatgagaagatacccagacagatgagggataagataccccttctggcagatggcagccatgtgatgtggattataggctaccgcatgagcgagtattacaagataggaccggatacggtccgggtgctgcaggcagaggcaggccagactcgagagagaaaagaataggtgaaacggaggataaggtaatggctgacagaattcgtgttttattgacggaagaggaagtcgataaaaggatcaacgaagtagcggcaaaaatcagcgaggattatgcaggaaagcaggtccacatgatatgcatattaaagggcggagtattctttacctgcgaactggctaagaggatgacggttccggtatccctggacttcatgtccgtgtccagctacggcggcggcactgtgtccagcggcgtggtcaggattgtgaaggacctggatgagtccctggaaggcaaggatgtactgattgtggaggacatcatagactctggccgcacactggcatatctgattgaggtgttgaaacagagaggtccaaagagcatccatctgtgtacacttcttgataagccggagcgcagggtaaagaagcaggtgaaggtggactatacctgctttacgataccggatgaatttgtagtgggatatggactggattatgaccagaaataccgtaacctgccttacatcggagtagtagaattggatgcagaataagaaggtctaaggaggcaattcggtgagacagcagcagacatttagaggatttatattcatactcctgatgctgatcttaatcgccaccgcagtgagattcccttacgcaaggcaggcggataaggttacaaatcaggattttatcaagatactggaggatggccaggcggcagacgtgaacatccaccagaatccgcagactcccacgggagaagtggtactgacccttttggacggtcaggtgaagcggctttatgtttcggatgttaaggacgcccaaaggcttctggacgcccatgacatggcttatacgaccatggatgtgccccaggagaactatctggtgaccatcatcctgcccttcatgctgtccattgtggtggtggtcatcatcatcatggtcatgaaccggagcgcgggcggcggaggcgccaacgccagaatgatgaattttggcaagagccgggctaggatgagccgggacagcaaggttaatttctccaatgtagccggtcttgtggaagaaaaggaagaactggaagaggtggtggatttccttaagaatccgcagaagtataccagtgtgggggccaggataccaaagggccttcttctggtaggccctccgggaaccggtaaaaccctgcttgccaaggcggtggccggcgaggcgggagttccgtttttctccatatcaggttctgattttgtggagatgttcgtgggcgtgggcgcttcccgtgtccgtgatttgttcgaggaggccaagaagaactctccctgtatcgtgtttattgatgagattgacgcggttgcccgccgcagaggtacaggtatgggcggcggccacgatgagagggagcagacgctgaaccagctgttggttgagatggacggctttggcgtcaatgaaggcattatcgtcatggcggccaccaaccgcgtggatatcctggacccggctatccttcgtccgggccgttttgacaggaaggtagcagtgggacgtcccgacgtgaagggacgcgaggaaatccttaaggtccattccaaggaaaagcccctcagcgaggatgtggatctgcacagggtagcccaaaccacctcaggcttcacgggagctgacctggagaacctgatgaatgaggctgccatcatatccgccagggataaccgcaggttcatcaagcagagcgatatcgaccgggcctttgtaaaggtgggaatcggcgcggagaagaaaagcaaggtaatatccgagaaggataagaagataacggcttaccatgaggcgggccacgccatcctgttccatgtgcttccggatgtgggaccagtgcataccgtgtccatcatccccacgggaatcggggcagccggctacaccatgcccctgcctgaaaaggatgagatgttcaataccaggggccgcatgatgcagaatatcatggtggatttaggcggccggattgcggaagagctgatatttgacgatatcaccaccggcgcttcccaggatatcaagcaggccacccagattgccagggccatggtgacccagtacggcatgtctgagaaggtgggaatgattcagtacggcggtgacgagaacgaggtattcatcggacgggatctggcccataccaagtcctacggcaatgaggtggctgacaccattgacagcgaggtcaagcgaatcattgacgagtgttatcagaaggcaaaggacatcatcaaacagtatgactacgttcttcatgcctgcgccgccctgctgattgagaaagagaaaatcagccagtctgagtttgagacgctgtttacaccggcacagtagcattcaggtcctgtttttagggccgggaatgatggaaaatagcatcaggaaggggagggaggctaaaaagccccctcccttgtctatattgctcataaatggcctggaaaatattgcatctttgtgcacactttttttcgttcctatgctattataataggcgtaacccccccaatacattatatagtttttgctacaccccataagaaacgaaataccttctcctgagaagcctggccaccccgccaggcttttcactttgtgagaaagccatggaaaaggtgtaatgttatcaagatttttctggtataatttttcttgtatatttgagaaaattcagatacaataaaggaacaggattgtaagtatgagcaaattaggaaaaggatataaaacgtggaagataatataaagggatgtatcaacagggatgcccttttttcctctgagacagaggattaccgcatgccaatggaaccggacgcagatgatgatgtgctgcttcgcatgcggacagcgaagggcaatgtggatcatgtatattatgtggaggataaagccgaggtggagatgaccaaggccaggtccgatgaactgtttgattattacgaatacgaaatcacagtaggcaccgatcaggtgctttatcactttaaagtagtatctgaacaggatgtctgtctttataaccgtctgggccctacacaggatggccagccatgttttgatttcaagattaccccgggatttcacacgccggaatgggcaaagggcgcggtaatgtaccagatttttgtggaccgtttctgcaatggagatgagagcaatgatgtggaatcatatgagtatgtctacatcggccgtccggttcagaaggtcacggaatgggaccggtacccggctgccatggatgtgggctacttttacggaggggatctgcagggaatatgggataagctggactacatcaagaggctgggagtggaggccatatatctgaatccggtatttgtatccccctccaaccataagtacgactgccaggattacgagcacatcgatccccattttgccagaatcgagaaggacggaggcggcctggtcaggcctgatgccacggataaccgggaggctgaccgctatgtgcagcgcagcacgggcaaggagaatctggaagccagcgatgcgttctttgcccggtttgtggaggaagtccataagcgggggatgcgggtgattcttgacggggtgttcaaccactgcggttcctttaacaagtggctggacgcagagggaatatatgagcattccggcgactatgaggcaggcgcctatgagagcaagagcagcccataccacagctttttccagttccatgacgacagcgacgaggcgtggccttacaacaggacgtacgacggctggtgggggcacgataccctgcctaagttaaattatgagaattctgaaaaattggtggaatatatattgaacgtggccaggaagtgggtatcgcccccctattccattgatggctggcgcctggacgtggctgccgatttaggacacacggcggaatacaatcacgaattctggcgcaggttccgccaggccgtaaaagaggccaatccggaggcgctgattttggcggagcactacggggatccggcttcctggctggagggggatcagtgggattccatcatgaattacgacgcgttcatggaaccggtcacatggtttctgaccggtatggagaagcacagcgacagttataacggaggcatatggggagatggtgaggctttctttaacgccatgggataccatatgagccgcatgcagaccaacacggtgatgacggccatgaaccagttgtccaaccatgaccattcccgtttccttaccaggaccaatcagatggtaggacgtatccagactgcggggccggaaaaggcgggacataacataaagccctgtgtgtttagggaggcagtggtgattcagatgacatggccgggagctcccacgctttattatggcgatgaggccggagtctgcggatggacagatccggacagcaggcgtacctatccatgggggaaagaggacttagagctcatagagttccaccgctatatgaccggtatccaccgcaagataccggtgttcagaaagggtgcgttaaagccccttctggccggataccagaagattgcctacgggcgtatgttcggtaagtatcaggccgtggcggtcatatccaacagtccggacagccagactatggacattccggtatggcagctgggcgttaccgacgacatggtgttaggcaggcccattctgaccactgagacagggtacaatgcgggggttatgctctaccgtgtaaagaacgggattttgaagctgaacatgccgccttacagcgcagccgtgttcgtttcgcggcccgatgaattttatccggtggtggattcccggtttgcggacgacgcggcagctgccatggagaagtaggcagaaagatgatataggacagacggattttggataggaaagagcaccttcctgaggcggggaggtgctcttttttgggtgcgcccggcgggcgcacgttctaacgggtgaaagtccctgacccgcccggcagtgggaagggtgcagccaatggcaagggcgtcatcgtgaggtggggtctgaaggaagccggaggcaaaccactggcctgtaaaagttgtccggataggctgtgaagcgtggatgaggttgcctaacaaactaaagtccaataactgcacggaacgccagcagtaaacggggcaggtataagtgggaaagaacgtgtgagtacccggggaggtctcacggacgtgaaagtggcgataaaacattcgctgtcacggagtaaagcttgccgtgagaagtcagcagaggtcatagtaccgggcggtcgcaaacgcaccgggaaggactgaacagtaggaggtgtcgttaccaaatggaaaccggacatggaattaagtacagacaacttcatattgaggactacctgcgagagatacctgcggaacagggaagggaaacaggagagtacgcccatgaaaggattaccgggaaccccgacaccaacacggactttcggacggacaacctgctagatacgattcttagaagcgacaatctaaatgccgcctataagaaggtcaaaacgaacaaaggcgttggtgggattgacggaatgcaggtggatgaacttctaccctacctgagagaacaccagtccgaattggtcgagcaggtgagggaaggcaaatacaagccaaacccagtccgaagggtagaaatacccaaagaggagaaaggaaaaacaaggaaactggggatacccacagtggtagacagggtaatccaacaggcaatcgcacaggaactgacgcccttatatgaagaacagttctctgacaacagcatcggattccgtcccggcagaggggcgcatgacgcactggaaagatgtaggaaatatatcaacgaaggatatgtctacgtggtcagcatggatttacaatcctactttgacacggtgaaccacagcaggctgatagaggtgctgtcgaggacggtgaaggacgggagggtaatctcgctgatacacaagtacctgaaagccggagtaatggaggacggaggatttcacgcaacgaccgagggcgtgccgcagggaggcccgctaagtcccttatgtggaaatgtcatgctgaatgagttggacaaggaactggagcgcaggggacacaagtatgtgaggtatgcggatgactgcctgattctgtgcaaaagcaggaaaagcgcagagaggacgatggaaaacattgtgccattcatcacaggaaaagtgtttctgaaagtcaatcttcagaaaacgacagtgagccacgtcagcaagataaaatacctgggctacggcttttaccggcataaagggaaatgccgcatgaggatacacccgaagtcggtggcaaaaatgaagaaccggatacgggagctgacaaccagagggaacaaatggagcaatcaggagagggaagaaaaacgccgaagctatgcaaggggatggattaactattatcgatatgcagacatgaaaaagcctgatggaacagacggatgagtggctgcgccacagaatccgagcggtgtactggaaacaatggaagaaggtacgcacaagatataaaatgttgcggcgttacatttaccagagtggaaggtgcatgagatggcgaactgccgaaagggagtgtggagagcggcgggaatgctcaactcggcactcaccaaaagaatcatagtggacagacttggttatcccgatatgactgcccactatctgaaagtccgagtaaactattgaaccgcgtagtaccgaacggtacgctacgtggtgtggaaggggaggttaaaatctcccctatccgatggtggttagccaagaatgattcataaaatgtaagcatgtaaaaatagagtgctgtaaaacaccgggaatactcaaatgcttttacaacactctatttataatgcgggtggccggacttgaaccggcacggtatcgctaccgagggattttaagtcccttgtgtctgcctattccaccacacccgcaaaagccccgcaggaacttttcaacacgtgccacagctgaaaaccaggacctttacgcgccctgcactgatgtccttaagctatattttaacggcacgctagtgggcgaaggtggattcgaaccaccgaagctattagcagcagatttacagtctgtcccctttggccactcgggaattcgcccagatattgctttgataagcagtgtttataataccacagactctgaaaaaaatcaagtattttgtgaacatttgtcagccgtatttgtcgctggatttgccatcagcatggactgcgggattagcggtcagttgatttctttacagtaaataaaaaaagtttttctgctgttgactgttatttgatagaaaaaatttctataaaagtctgaacaaatctataaaaatatatttataatataaaaaaatggaaaataccatagaaaaatgtgaagaatacaaaaatagccccctattgacagtaaaatatgtccatgttaatatgagctcatagataacgttttctatattatatttgaggggccccaatgaataagaaaacaacaattaaggacattgcaaaaaaggcaaacgtatcaatcgctactgtgtccagggtactgagacgcacggattatcctgtcagccaggatgtgaaaaaacgtgtttttgatgctgcggacgaactggaatataagcccaatttgttcagcaggatgctgcgcggtgacgtcagtattgagataggtattattgttccgtcaattaataatccgttttatgctgcacaggtggcagcgtcagaggaagaatgtttagcccgtaatttcattcccataatctgtaactccaattccaatccaggattggaaagctggtatctggagatgctggaagaaaggcaggcagcaggtatattgctgacaacaatccagaatgaggagacttttgtcaaacggattgaacggctaaccatgcccgcgcttctggtggaccagggaatcgagaattataccggagaccgggtgctgtttaacttctttaaggctggttatatggcggcagagtatctgattgaatgcggacataaggacctggcattggcgtcaggaccaattacacgacataacaggagagagatactgaggggctttaagcaggcgctgttggattatgatattgtttttaataagcgtcgaattgtgaattatgattccaactatgatatttataatattggagatgaccagggagccatccagattattgacaaaatgtttgaggaggagtatcttccggaaggtattgttgcgattaatgactcactggccattaagatgataaatgaattgcataaccgcggaatccatgttcccaatgatatttccattgtgggaatggatgatatttttgtcagtaagatggtgacgccaagacttactacgattcatgaaccggcagaagaaatgggcaaacggtctgctaaatatcttattgataaaattgagggtaagtccaggaatatagttaatatcacaatgcagcctactctggttgaaaggaattctgtaaggaaagttcatagtaaaatcaggaggtaaggagagatggcagtatatattcttgacaattccgaagaattgggagagaaggcagctgatttaattgctaaaaagttaaatgaagccatagaaaaaaggggacaggcaagaatcattctatccacaggggcatcacagtttgagacaattaagtatctggttgagaagaacgttgactgggaaaaggttaccatgtttcatttggatgagtatttggaactgcctgaaacccacaaggcaagtttcaggcgctacctgaaagagcgttttaccagcaaagtaccggttaaggtgcattttgtaaacacggaaggggatgtggaggagaatctaaaggaactgaccagagaaattcgaaaagacatcatagatataggcgttattggtattggtgaaaacggccatatcgcatttaatgacccgccggctgattttgagacacgggaagcatacagaatcgtgtctttggaagaacgctgcaggaaacagcagctgaatgaaggctggttcccaacacttgatgaagtcccgttcaaggccgtttcaatgactccttatcagattatgcagtgtgaaacaattgtatccagtgtaccgggggagagaaaggctgaggctgtcagaaatacacttaagtcggaagaggttacaaacatggttccggctaccttacttaagacacataaggactggcatttgttcctggataaagagtcatcatcgcttattgatagttagtgtagagggaggagaattgaaatgaagaaaatgatatctgttttactggcaggcattctggctgttaacttaggtgcatgttcttcggcagcgtccaaagcatctaaagaagcagaatccgctgctccggcaggaaccacggcccagcagagcggcgggaagcgtactctgcgtatagcaggtgagtcatggcaggtcacaaagctatatctgaatgaagcagctgaagcatttatgaaggaccatccggatgtaacggttgaggttcagacttatgcagatcctacggttgtgtccaattacagcatcaactggcaaaaaggagataccccttgtgacctggtggttatagatggcgcttcttttgctgaacagtttgttacaaaggaccttatatatgactttgaccaggaccttaagttttttgatacatattctaaggataagttcattccggcggcactggagatggcgaagcttcatgataaacagtatgtaatccctgtcattcaggaagtgacagctattaacataaataaggcgatgtttaaagacgcaggtcttgtggatgagaacggcggggcattggttccaaagacatgggatgatgtttatgaatttgctaagaaactaactaagacagagaatggtgttgtcacacagcagggatgtactattcagtggagcaaggatatacatgggactgtattaggaatacttcaggcatcctgcggtggactgtatcaggatgacggcattacggttaactttcagtctcaggaatttaaggatatactggcaatttggcagaaaggggttaaggatggagtgttctctaccgagacatttgctgactacgatgcaggtaagaacagttataaagccggtaaggttgccatgcttcttcagtcaggttccaactgggtagaggcgattccgaccattggagaggaaaatgcgtctgttgttcccataccagggggagaagaaaatggaacggttggatatgtaaatggcgtcattattcccaagtgttctccaagttctgatttggcagtacagtttgttcaggagcagcttctgggcgaatatacacagaccagtaccgtgaaccagtatggtaagattcctgtaattacggagtattacaataagacagaatcacctaattggcagaacattaaggggtccattgaaaaggcagtcacctatcctccttataaagatttgggggaatttgtaataaaatgtcaggagattttccaagccagccttgtggatgggacagatgtgaatacagcagctgaggagctccaaaatatggtaaataagttggataagtaatttgcaaaggtgctatgcaaatcatgtgtagcacctttcttggcaaggaggcagaaaatgaagaggacgtggagcgcaaagaaacagaaggcattttggggaatattatttgtcttgcccagttttttgattatagctgtatttgttgcatatcccctgtgctatacagcgtacctaagtatgtctgagtatgactttatgtatgacttgactccctcttttgtaggaattaagaactatgtgtcactgttttctgatcctgatttccttgtatcaatgaagaacacagctgtatttgcttctttggacttcattttgctgatggtattgtctttgattatagcattgcttattttcttctgtaaaaaaggaacaggtattttcaggactgctgtatttactcctattgtagtaccggcatcgctggcatgtatcatatttggctggctgttcagtgaaaatttcggatatatcaattatttcctggtaaagattggacttccgcagctcacccgtgcctggctgacctccagaaatacagccatgggcactaccattgcagccaacctatggtacaatataggatttataaccattctgtttttggcaggactccagtctatatcgacagatatcctggaagcagcagtggttgacggtgctacgggaataaaaaagattttttatatcgttctgccaagtttgagggaaagttttgtcattactggtatatggggaatcgttaccgctttaaaggtatttgtggagcccatggtcatgaccggaggaggtccgggcaacgccaccagaacactatatatgtatatatataacacggcttttaaatattttgatatgggctatgcgtcagccatggcgtttgtactcagtggattgattctcctgttttcactgattaatttgatggtttcgaaaggagaaaaagaatgaaggtaatgaaaaacatccccaggctgattatgtttgcagttctgaccctaattgcagtggtttttgtaattcctattttctacagtgtatttaattcttttaagagccagaaagaaattttgtctacgaccatgacatttttccccaacagcccttccctggaaaactatttatatgtattccagcacggctcacagtatttggggtattacgtaaatagcttgaaaatcacatttattggggtaatattaacagttatcctaagtgccatgagcggatatgcctttgcaaggcttccttttaaagggagcggcgcggtaatggcatttatcctgtttgtcattacctttcctttggcagcacttttgattcctatttatattatggaatataatgtggggctcttgaacacaactatgggtttagtacttccaaatgtaatgaatgtactgccgttttcgatttttattatgcgggggatttttctggggcttcctgttgaattggaggaggcggcaaggatggatgggtgcagcgtattccggacttggaaagatgttatggcgcctttggctaagaatggaatgataattgtactggtattttccttttataatatatggggggaatataccatgggaaagacactggctactcaggacagcgctatgcccattgcggtagctttgacactgttaaagggtgatagctggaattttggagtattgggtgcggttataacaatgacaatcatacctccggtaatcatatttatcatattccagagacaactggtggacggaattgccatgggggctgtaaagggataattgagagatatcaaggcctcagccacccaaaaccaggcagattccgcatcaccccaaacacaagcagcaccccaatcattacatagaaaacacaggcctgaacccgtgtaaggcgtgtgcttccggtccttacataccgtacggccatccagacagccatgaacagtcccgggggaagcagtagaaagagggctgcattggcctgaaaggcagaagcaaagtccagacggagaagggacagacacatccggcttacgccgcagcccgggcagtacagtccggtgacggtatgaaacaggcagggaatcaggggacgtcccgccagaatacagataaatgcataaaacaggccggctcccaggagcccgcctgtttttatgcatactgtccgaagacgtttatgcattagggagatatttattcagctcattctgaagcagggcgtaagccacgatgcccagtccgaacaggctgagtagcagatagaccaccggtgcgcttccccttggctcgccatgctggtcatgaagcgtttcaactgcattgcccatctggtacatccagaacaggctgtaaatcccacaggtgatcagtgagaacagaaaaaccagtcctccgcttgtaccctgcctgccggagagcgcgttggtttcgtcgttcagtacgatcatccaatagatgccgtaaattccgcaggtaaccaagctcagcaggatacatactacgatgttgcgctgtttcatacatatatcctccttggtatggtatgttcgtgtaatacagcttagattctatcataggcataaccgtttatcaacaaaaagcgttacaatgttcatctttttgctctcttttatctcctttttacacagattatgtcttgggctccggggaaattgctggcacagtactggcattgctggcaaaatctcatttttatggacgaatgagaccgaatatgttatactaactaagataggcgtattctgattttcggatacgaatggaggcagactatgagagataaaggaaggacgcgggggattttcaaggtctacctgcagtggccgctctttttgtcggtccttttaatcgtgctgactgctgttgtggcagcggtatccataaaagccggcattatagtatcggtctttaccattgtctatatagggattgccctttggctgtatttttcaagaaaaagaggcatacttgccgggctcatcgcattttcgtccgcttatgaccagagcagacagaacctgctggaagagatgctgatgccctatgcggtggcagacggctcaggacatctgttgtggatgaaccgggagtttacggcaatcctggaagaagacaagaattcatataagaatatcacggccatgtttcctgagattacaaaggaaatgctggctaccggcggggaggttgtgagccttcacagctgcctgggagacaggaagttccggattgatctaaagcaggtcatggtggacagccttgacgcggcagtgaccgcgggagggctggagggacagggctcgtctgttacggctgtttatctgctggacgagacacagacccttaagtacatgcagcagattaatgatcagaagctggtggcgggactgatttacctggataactatgacgaagccctggaaagcgtggaggaggtccggcgctcccttttgaccgccctcatagaccggaagataagcaaatatatctccggcatgaacggtatcgtaaaaaagattgagaaggataaatatttctttgccatcaagcagcagtacatggccaggatacaggaagagcgtttttccatcctggaggatgtaaagacagtgaacataggcaatgacatggctgttaccttaagtatcggtatcggtatgaacggcgacagctacagccagaattatgaatatgccaggacatccattgacatggccctgggacggggcggtgaccaggcagtggtcaaggactccgacaagattcagtattatggcggcaaggcccagcagatggagaagaccaccagggtgaaggccagggtaaaggcacacgccctcagggagctgatggagaacaaggaccggctccttatcatgggacaccgtctggcggacattgattcctttggcgcggcagtgggcatataccgcattgccatgtccatgaataagaaggccaacattgtggtcaacgaggtgacctcgtcggtgcgtcccatgatggagcgatttacgggaaatgccgaatatcctgaggacatgctgctcacaggccccaaggcagccgagctggtggaccaggggaccatgctggttatcgtggatgtgaaccggcccagcattacggatgaaccggctcttttggagatggtgaagaccattgtggttttggaccatcacaggaccagcagcgaaatcatagataacgcggttctttcctacgtggagccctatgcctcatccacctgtgagatggtggcagaggtattgcaatatatcgcagatggtattaaaatcaaatctgcagaggcggatgccatgtacgccggcattgtcatcgacacccagaactttaccaatcagacaggcgtcaggacatttgaggcagcggcatttttaaggagaagcggtgctgacatcaccagggtgcgcaagcttttcagggagaatatgaaggactaccaggcaaaggcggacgcggtcaggaaggcggaggtgtttatggatgcatttgccatcagtgagtgcccagccgaagggctggagagtcccaccatcatcggtgcccaggcagccaacgaacttctggagatccgcggcatgaaggcttcggtggtgcttacagattataacggaaccatttatttcagcgccaggtccattgacgaggttaatgttcaggtcatgatggagaagctgggcggcggcggacaccgcaccatagcaggtgcccagatgcagggcgtgaccgtggaagaagcaaaggaacagctgaaagacgtcatccgccagatgatggaggaaggcgaggtatcctgattagggatacccatagacacagaatcagaaaggaagtatgagacatgcaggtagtattactggaagacgtgaaggcattaggaaaaaaaggccagattgtgaatgtgaatgacggctatgccagaaattttattttgcccaagaagcttggggtggaagctaattccaagaatctgaatgatttaaagcttaaaaaggccaacgatgacaggattgcggcagagcagctggcggcagcaaaggagctgggagcaaagctggatgagtcctccgttaccctgaccatcaaggcgggagagggcggaagagctttcggctccgtatcctccaaggaaatcggcaaggccattggggaccagctgggaattgacattgacaagaaaaagattatgctgaacgaccccatcaagtccattggcagcttcgaggtgcctgttaagcttcataaggaagtgaccgccagactggctgtcaaggtagtggaagcataaaatcatagcgcagacacaggacccgcctcaacaggcgggtctcatagattcagatacaggagacgagtaatatggaagaagccctgattaagcgggtgcttccccacagtctggaggcggaacagtcggtcatcggttccatgctcatggacagggaggcagtgattgccgcgtcggagattgttacgggaagtgatttttaccagcagcagtacggcatcatgttcgacgccatggtggagctgttcaatgaaggcaagcccgtggacctggtaaccctccaggaccgtctgaaggaaaaggacgtgcctcctgaggtgagcagcctggattttgtgcgggacatcgttaccatggtgcctacgtccgccaatgtaaggtcctatgccgccattgtaggtgagaaggcagtactgcgcaggctgattaagaccacggaggagattgccaatacctgttacgccggaaaggagccattggagaacattctggcagacacggagaagtccgtttttaacctgctgcaaaaccgcggggggcaggattttgtgcccatcaagcaggtggccatcaatgtgctggagaagattgaggatgcctataagaaccagggaactgtcacgggaataccttccggctttattgacctggattataagctttccggcttccagccttcggactttatcctgatagcggcccgtccttccatgggtaagacggcttttgtcctgaacgtggtggactatgtggcggtgcgaaagagcctgccctgcatggtgttcagcctggagatgtccaaggagcagctggtgaaccgtatgctttccatggagtccaatgtggattcccagaagctgcggaccggctccctgacggattctgactgggatgcggtggttgagggtatcggcgtcatagggaattccaagctgataatcgatgacaccccgggtatatccatatcagagctgcgctccaagtgcaggaagatgaagctggagtatggactcagcgtcgtaatcattgactacctgcagctcatgagcggcagcaagaagggcggaggtgataaccgccagcaggaaatttccgatatctcccgttccctgaaggcccttgccagagaacttcatgcccctgtcattgccctgtcacagctgtcccgtgcctgcgagaccaggcaggatcacaggcccatgctctccgaccttcgtgagtcgggagccatcgagcaggatgccgacgtggtaatgttcctgtaccgtgatgattattataataaggatacggagcatcccaacgaggcagaggtaatcatagccaaacagcgtaacggccccatcggaaccgttacattgatatggaaaccggagtacaccaagtttgtgaacgctgccagacctcagggcggcggacaggacacataaaaatttttccagggtgtcataatatccattctcaatgcatacactaatagtaaggcaggacatgcctgttaacttgtgaaggagagaatggctatggatgaagtacattatctgatatcggatgcgtccaaaaaggtcgatgtggaggcccatgtattaaggtactgggaagaggagctggaacttgatattccccgtaacgaaatggggcaccggtactatacggatttacatatccgcctgttcaaacaggtcaagaacctgaaggagaaggggtatcagctgaaggcaatcaagcatgcgctgaaccaggtcctgaaaaaggacggcaaggctcagggagagctgtccgacgaaatcctggagcgcgacatgaacgctgcacttaaggaatttaaagaggaagacagcggaacgtccctcagcactgtgaagggcgatggcgtgtccgtggttgccatggaagagaagatggaacagtttcagcagatcatgaacctgattatcggacgtgccctggaggtgaacaatgagaagctgagccaggatatcagctgtctggtcaatgagaagatgggcaaggaactggagtttttgttccaggcttcggaccagaaggaggaggaacggttccgccagctggacgagacactcagaagctgccagaagggcggacaggcagaggcggcagcggccaaggttcccttttttaagcggcgcagattcgggcgaagcggaaaaaagctcagggacggaaagtaaatgcagatacagcaggagaatgcgcctgcaccaggggaataacaccgtggtgcaggcgcctttttccgttgtttttccttttttaataaacaggaaatggttattttatagtactttcaattttcttacgacctttatttttatatcgctattccttaagaaatgtgttagaatgaatttgatttgagctttttgacataagaagaagcaggaaggataagttcttcatgaattcaaaatacagaaaatatgttacatatacggcagccgtaggcgtgctgaccctcagcgttttcctgggcggctgcaccaaggaatcctcatcagaggcgggggatgccacgccctctgaggtcaatgtcatacaggctgtacctgagaccattgcccagctggggctggacggacaggtgctgccgggactgaatgacattaacctgccggacgcggagccggctcccgagtaccttaggattggagtgcgccatgaaatcatcaagagactgcagcagcgtctcatggatctgggattcatggacaacgatgagcctacggattatttcggagagatgactcagcaggcagtgaagcatttccagaggcagaatgagctgcctatggacggtattgtgggcaatgttacctgggatgccattatgtctccggatgccaaatactatgcggtgtccaagggaacccagggtgatgatattgagcgtatccagcagcgtctttatgagctgggatacctggcaaccgctgatttggtaacaggcaactttggcgattccacggaagcagctgtgttaaagctccaggaggtcaacggactggagcaggatggaaaggtggggcagaggaccataaacctgctgtacagcgatgagattaaacctaacttcctttcttacggtgagaagagcgatgtggtcctggcctgccaggagcgtctcaaggaattgggatatctgaccaccactccggacggggcttacggtgaggatacggtagtggcggtgaagcagttccaggccagaaatgaccaggtggttgacggatatctggggccatccaccaggattgcgcttaacagcccggatgccagggccaacggcctgatgctgggtgagcgcggtgacgcggttaccaaggtgcagcagcttcttaacaagcacggatatcttgtttccggcaatgtgaccggctattacggcgaagccacggagaacgctgtcaggaacttccagtcccgcaacggactgacttccgacggtctggtaggcgtccagaccatggccaagctgaccagcgacaatgtaaggcgcccggcggctaattccggcggttccggtaccaccacaaggccgggcagttcaggaaacagcggcaatacaggaaataacggcggatcaggcaatacgggcaagccgtcaggcaataccacaccgcctgtgagcatacctgcaggcggaggcgcatcagcccttatatcggctgcctcatccaaactggggtcaccgtatgtatggggagcgaaaggaccgaactcctttgactgttccggtttcgtatactggtgtctcaaccaggttggcgtaaaccagagctacctgacttcttccggctggaggaatgtgggccgctacactaagattacaaactttaatgacatccaggccggtgatatcgtggtggtaagaggccatgtaggtatcgcggcaggaggaggcactgtgattgacgcttcttccagtaacggacgggtggtgcacagaagcctgagccagtggtgggccaacaacttcatctgtgcatggaggattttctaacaaacataaaagcactggaatataaaaaggagggcgtttggtgatgcagaccatactggtatgtgatgatgacaagcagattgtggaggccattgatatctatttgacaggagaggggtttaaggtaatcaaagcttatgacggctatgaggccctggagtatctggataaaaatgaggtggatttattgattgtggatgtgatgatgccgggactggacggcatccgcactaccctgaaggtcagggagaacagcagcatacccatcatcatcctctccgccaagtccgaggatgcagataaaattctgggacttaacatcggggctgacgattacatcacgaagccctttaatcccctggagctggtagccagggtcaagtcccagatgcggcgttatacccagctggggaacctgaaccagcaggcggacggacagatttataagtgcggcggccttcagatcaatgatgacaacaaagaggtgaccgtggacggcgatgccatcaagctgacgcccatcgagtacaatatcctgcttcttctggtgaagaatgcgggaaaggtgttttccattgatgagatttatgagcagatatggaatgaggaggccatcggcgcggacaacacagtggccgtgcacatacgccatatccgggagaaaatagagattaacccaagggagccaaagtacctgaaggtggtatggggtgtaggatataagatagaaaagcagtaggtggttgtatgacagatgagaagaggaaattcagacggaggaagctgatcctgaccctgttccacattatctttgtggccatgtccgtattcgggatcagcgccatgtaccttaactccaattacggaaaaggtgtaaagtggatatacgaggatgcatatgaggattcagcccagtttgacaaacagctgacagaggatatcgaccgcatatttacctatgtgggctataaggatatgtttgagaccaacggaaagctggatatgcataaggttattgtaagggtcagcaatggaccgggggagcagggcacggagtggaccctggaccggattgtgcgctatatcaagaccaggggctactatctggatgagaatttccaattggctggatcgcccatttccatggacgatgaggaggaagaaataaccgttgatttccagagctataatccggattttgtggatgcggacgcaggagaggctccaaggatgaccatggaagacctggcccttgatatactggtccatctgagtgaatattacaccatatattacaattacatagaaaacgatacaaacctgagcttccgtatcgaatacaagagcgacaagggtgatataaaggtatccaccaatgtgccggataagaccatggaggagatagtgggtacggggaagtatctttacgtgccgggaaataccatccgcatggataccaacatggccacggtgcctgccaatgcggcaacactccttgagatatggaatccctataagaacgataagaactatatggtcctgtccgtggataccagctatcccaacacggatgcatactccatagaagccaaggcatataaggaggccaggaacgagttcatcatgggtatgggcagcgtcatactgggcggcctgggatgtgtggtcacactggccatgctgatgcttatgtcaggccataccacggacggaagcgcggagatacgcctgttccccattgatgatattcacacggagctctgtctgattctgtgggcggcggcaacagcggtgttcatccatataggaagatatgtgggaatccgtctgttcagcctgtttgctcccaatgaacaatggaattactggaataagatgattaaactggtcattgtgtacgggagcgttgtattgtgcggttttgatttgctgcgcaggtataaggccaggaccttatggagcaacagccttgcaaaacgggcactggaggcttccagggactatgtgggaagggtcagctacgcagtggggaccgggttctgctacctgctgtttctgggattcaacgcgggtatgctgtggggattgattttcctctttttctataagggaaataagctgagctaccagattatgttttacgtattcgtggtgctgtatctgggattggatgggtggatataccacctgttatttaagaagtcagtgcagagggatgttctggacatggcggtcagcagcatctcccagggggacaccagctatcagattgatactgcccgtctgtccggcaaggaacggcagatggcagagcatctcaacaacatcagcagcggtctggattcagccatccaggagcaggttaagagcgagcggctgaaggcaagcctgataaccaatgtgtcccatgatatcaagacccctcttacgtccattatcaattacgtggacctgctgaagcgggagaaaatacaggaccccaagattgccgcatatctggaagtgctggaccagaagtcccagaggctgaagactctgacagaggacctggtggaggcatccaaggccagttcgggcaatatgaagctggatatatcggatattgacctggtagagctggtacagcagaccaacggtgaatttgaggaacggtttgccctgcgcaggctggaactgatttccagcataccggatgaggtgcttatcatccaggctgacggacgccgcctgtggcgtgtcctggaaaatctctataccaatgcagtgaaatatgccatggaacacagccgggtctatgtggatgtgctggacgagggcggcaaggccatatttaccattaagaatgtttctgagtcatcgctgaacatcagcccggatgagctgacagagcgttttgtcaggggggatgtgtccagggccacggagggaagcggcctgggattgtccatatccaaggatttgacccggcttcagggaggcgagttccaggttgtcatagacggggatctgtttaaggccgttgtgtcattcccggtaaagagagttgagtttaaggcggaaaaaacagttggggaaccgggagacatatctcaggattttggttatgaagaagatattgtggtataagttctgtttatcggaattatgaccatgaggatttttgggaaaaaggcgccggaagatatctttcggcgcctcaggtctcacaggcggtcccattagccgtagtaacaacgaactgtgagaagtcagcagaagccttggtaggcgaaagccgtcgccttggatatgcaagcgaatccttgatgatggcacaccatcgctgccctataagcattccatggcgaaggaagggtatcagaggtaagcctcattttttcgtgggattgaccttaccacgacataggtcttttatgctgtccgccagtcttgacatggacctcatgcaatgcttgggatagtcatcccgacggcgaggaactctagaacagttgcctctcagccgtgttaagaacggttcaaaaaatttaaatgacagccatagatgtagttttagtctatggctgtcaattttttcagaaagaagccgtcgtatggcaatctcaagattaacagtatctatagaaaactcatatctgaaaattaatttgcaaatagccgggatgcagaagcgtcatcaataaacagctgccagtccggatgagtttttaagatggtggctggcacggttggatcgaccggttttgtgatagtattacaaattgcttccgcctttacatcatgtggtgcggctgtgataatatggcggcaggacataatctgttttacgcacatggtgatggcctgcttcggcacagctcctacgttttcaaaccatccttcaccgacctgctgcttccggcagcgttcatccagtgtgacaattttgtaggctgtgtttgtttcaaaatctgcaggcgggtcgttaaaagcaatatggccattttcgccgattccgattacgcctacatcaatcggattttctctcagtttcgtggtcagttcggcaatatttttttctacattgccctcaccatttacgaaataagctgcttttagcggtactctgctgacaaaacgttcttttaaatattttcgaaagcttgcaatgtggctttccggaagagctacatactcatcaagatggaacatttctattttttcccattcgacttgttcttttacgagtgcgtcgagtgtttcaaactgggaagcgccggtagaaagaactaggcgggcatagccttgggctttgatggcatcatttaataattttgcaattgctgcggcagcatgactgcccagttcctgcggggtggatgatacgtttacagtaatattcatgctaagctctccttttacaatactattgtctgattcctgcaacataaacagatgaaatgcggatgtcatcatcgaaaatcaacagatcggcatacttacctggtgcaatgcttccgtattgatcttgcttgcccagaaaaatagccgggtttagagaggccatgcgaacggcatcccaaacaggtaaaccggctttttgggtcatgacacgtaccaagcgatccgtagtagccacactgccggcgaatccgtcaaaggctggcatattggcgattccatctttgataatgacgggagttccatgtgcttttgagcccagaagcgaaggaccatccggcatattcgcaccacgcatgctatctgtaacaagacagatgtgggagtgatccttacatttgacaatcagttttaagagttctggtggtagatgaatcccatcagcaataatttctatgtttaactggtcatataagtatccggcttcgaccaggccaagtttcctgtgcccattctcccgtgtgattgtggacatggcggaatagaaatgagtaagttgtgtgtatccgtgctgaacagccagtttaacagtatcaaatttggcattactgtggcccattaaggccaggataccacgggaagctaattcatctcccaattcaagagcgccaggaagttcaggagcaatggaccactttacgaggttgccgctccctcgtttgaggatttccatatagtgttcccgcttgggacaaaccagatattccggaggttgggctcccgcctgagcaggagaaaaatagggaccttccagatggattccaagcagatgtggcatatgttcggaaacggccttcgctgcttcgtaggatttaaaaaaacggaatagctcctgatctgagcaggtaagtgttgtgggacataaggcagtagtaccgtgttttaaatgtgcccgagcagcaatgagaatatcttgtacggttccgtccatgaaatccgcaccaccacctccatggcagtgtgtatcgataaaaccgggagaaagataattgccctggcaattgataatttcggtttccctagttagattttctggaacaggttcttgatctatggatttgatcaaaccgtctatgacataaacatagtgatttttcaacacagcatccggcataatgacacgagcatttttgaaaatgatatgcttcatggatattcatctcctttgattgaattgttttcagaatagtagaaaaagataaaaaagtcaagatgtaattgtaaaaaagcacaataaatttaggatttttgtttaaaaattagagaaaatttttttcgtattgacagggtacgtaaatatattctataatcagactagagaaaacgttttcgaaaacaataaaatttagacattatgtactttttatactcttttagtgcttagtgaaaagaagtatgatgccggaatcagacgggagatgatgtattatagaagtgaagaaaataactctaaaggatatagcacaggccagtggatattctcttgtttctgtccatagggcgatgaacaacaaagagggggtcagcaaagcagtcaggcaggaaattctaaatgtggccagtgaacttgggtacacaacaaactatgtggcatcggcactgaaacgtcgtcaagtgaatttggccgtggtgctcccggaagcagaagatggagggaaatactattttcgctatgtttggaaaggatgcagagctgctgagagcgaggtatcgggctataatctgaatgtgatggattttacgttcccggtgagtgattcgaaaggaagcgaagaacaggttagtattctgaagaagttatacgatgagtggggagatcgattggatggtcttttgactatgccaaatattaatagtcctcagatgcagtgccttttgagtcaattttccgggagaggagtgtcggtggctctgattgacaatgattttaaagattgtgggcggctgtgttgtatagctcctaatgatacctatacaggacgtcttgcagccgaattgatgaatctggtactgcagggaaaaaaaggaaccattcttattgcggagggagatgaacgttcgttgtctcataaattgaattcagaaggctttcgaacatattttcaagaaaaaaatctggatatttcggtgattagtgtgccgaatttgaataataccgaggcaaaccgcgttcagatgctgaagtatttgagagaaaatacggatgtcatcggaacttattccacgagagctagaaatacaattcctatgtgcgaggccttaatccagttcgaacgatttaacgatatatttgcggttggaagtgatttgtttccggaaagtgcgcagatgctgtatgacggtgttttaaaggcgatcgtttataagaatccctatcagaaaggatatcttggtttcaaaacgctttttgagtatctgatcaagggagagaagccgaaaaatgaggcgatcagtgttcaaatttcaattattctgcagaataacattcaatttttcaaagaatttatttaaggaggaaaaataaatgaaaaaaactttagcagcattactttcatgtgcaatggtggtgtcaatgaccgcatgtgacggttctaagccggccgggacaacagcagcttccgctacaccagaaacaacagccgcagaaagggtggaagaaacaacggcagcggaagcagcaagtggagatatgggggatgaacttcacttcaagctggcagaaaatcaggcggatggaaatccgattacagaaggtatgaaaatgtttgcagatctggcaaacaagtacacagatggcacggtaaacattgatgtatatccgaatgcagctctttgtgatgaggcatcttccatcgatcaggtaatggcgggaacccttgatttttcacgtgttaatacgaattccatggcacctgtagtagatttgttcggcgcatttagtatgccgtatctgttctccaatacagaagcaaaatataaggcgctggatggagctgcaggagagatggcctttaaggaactggaaaattataatatggtaggtcttgatttttatgaggctggttccagaaatttctatacaacggataagccgattacatgcgtggccgatctgaagggcatgaagattcgtgtgcagcagacggaggtagccatttccatggtacaggcattaggtgcagaggcaactccaatggattacggtgaagtgttccagggactgcagacgggcattgtagatggagcggaaaatgacttcgtaagttattatacctctggtcattatgaagtagcaaagaactttacactggatggccacatggcacctccggcacttgttatctgcagtaagaagacatgggatcagatgtccgatgcacagaaagagggagtaaagaaggcatccagagaagctgctgaatggcagagacaggcaatgcaggattatcaggaagaatccagagcaaaatgtgaggaatcaggatgtaagattattgatgtggatgtgaaagaattccaggatactgtacagtctgtatatgacaagtatccgcagtataaggaactggtagatctgattcgctccgctgaataacaggaaatcagattttaagaaagaaaggggaagcgttccatgtcgaaggtaaaggggtctttaagatatcttgtaaagttggagcaatggatttgctgtgtgtttcttgtaatcatgttagcggtatgttttggtgcggttgtgatgcgttacgttttcagcaaacctctggtgtggtctgaagaaattatccttaccatattgatctggttcggttttctgtgtatttccatcggggcatacggagacacacatattgcgatagaaggtgtatacaacttgtttccgtctgcagtgagaagagcctgtgatattttacgtaatttactgttgactgtatttggatgtctgatggtatattttggctggcaggtttttaaaattaatctgatgaagcgtttgccggctactcatctgtctcaaggagtgcagtatttcccaattgtttttggaggaattctgacagctttgtacagtgcggttaatttattggaatatctgattagaaaccaggaaaagaatgaggaggaaagacatgaatgagatagcaataggcaccattatgttatttgcaacattagcaattctgatggtcatcagaataccgattgccttctctcttgccatttctgcattggtgacggcaacataccttgggattccgtattttaatttatttcaaaaaatgtcagtcagcttgctgagctttacttttattgcagtacccttttttatcatgatggcgcaggttatgacagatggtgagattacatcaaaacttatgtccttttgtaatattatcgtagggagaatccgtggcggtacggcgattgtcaacattttggtgagtatgctgtttggtggaatttccggttcttcggcggcagacgtatcctccattggggctatgttgattccggcgatggtgaaagaaggatatgatgaagattacagtgtggcagtaactgtaacttcatcagtggaaggtgtaattattccgccaagccagaatatgctgttttatgcgttggcttctgcaagcggaatttcaatcagcacactgttggcatgcggatatattcctggcgtaatgttaacgttaggccttatgattcccgcttatgtgatagctgtgcgaaagagatatcctctgggtgtgaagcgatccatgagggaaaacattaaaattatctgggaagcacttctgggattaggtgcaatcgtaattgtgcttgcgggaacatcctttggcatttgttccgctacagaagctgcggcggttgccgcagtatatgcattgttcttaactttgtttgtatatcgcaatatgacgttgaagctttatctggaaggtttgaaaaaatgtctgcctacgatgacaatggcaatggcgattatttctgcatccggagcatttggttatgtgatgtcctatttaaaagtacctcagaatctatccacctggcttctttctctgacctcaaacagaactctgctggttctgctgcttttgctgatgatgctggtccttggatgcttcatggatatgggtattctgattcttttgacgacgcctattttattcccgattgcaaccggagcacttggttttaacccgtaccatttcggtgtggttctggttctggcttatggaatcggtctttgcacacctccggtaggaacttccctgttcatcggatgcagtattgcgaaagtgcctgtggagaaggttgtgaaaggatttcttccattttacctgtctatgattatcatgttgctgctgttgacgtttataccgtccctttcactggggctgccgaaattaatggggttattgtaatgaaacatattttatgttatggagacagtaacacatttggcacggatccgattcatggaggacgacatcctgatgatgttcgctggaccggcgtactgcagaagcttcttgggagcgattatcgcgttatcgaggaaggctgcggcggaagaacaaccgtttttgaagatgaaatctcctatggaagaaatggcttgaaaatgctgatacccattattgccagccataatccgctggatctgattgtggtgatgctgggaaccaatgatctgaagaaacgctttcaggtgacatcctgggatctggggagagcgatggagcagattgttgatacgatccgcagctttccgttcgctccgtcttatccggacccggagattctgattgtttctccagtcttgattaagacaggaatttctgacagtatctatggctgttttactgaagaagcttccgctatgtcacgatgttttcggccggaatatgaagcagtagctagacagaagaattgtcatttcttcgatgctgcttcagttgcagaagccagtgagaaagaccggctgcatatgactgcagaaaatcatcgaaaactggcagcggcgctggcaaaagagattcaaaaattattaatttcatgtaactatttagtaccttagttaggacacattgatttttggtcaaaacagagaaaataaaaattctgtttcgccattccccgcatatgttcctgagccttttgaacagcgcgggctgggatcccgaacttctccgtatacgggccaggcataaaaatatatacaccacgctcaatacgtacgtccatccctcgtatgaggagaaggcggaaagtcaagctgtttatccgtttcatcctaacagacgggaaaagatgttaaagctccgtgaagagccgcttgctgttgaggaggacaggattgcaggaagaagcggcagcaaaaaagaaagtaataactgccattttgagatttctaattgtcaaaacggcagttattcattctaatatgaccagtctgacaagcatggcttcacaggaagcagattgaaacagaatggttacaaagcagattcttgtttaagctatgattctattataaaatctccccattgctttcaattacctttttataccaccagaagctcttttttctgtaccttgccaatgtgccatttccatcattgtcgcggtctacatagataaagccataccgttttttcatctcccctgtaccggcgctgacaagatctatggggccccacatggtatagcccagcaggtctacgccatcctctgtgactgcgtctctcattgccttgatatgatccctcatatattcaatgcggtaatcatcaataacagtcatctcgccattttcgccctctaccagttcatcaaccgcgccaagcccgttttctacgacaaagagcggctttctgtagcggtcatagagagcattgagggtaatcctcagtcccattggatcaatgggccagccccactcgcttgctttcagataaggattcttcaaagaagcgaagatatttccctctatcgtctcgttcacctttggatcagcgcttgcacagcggctgttgtagtaggagaaggagacgaagtcaacggtatacttctttaaaagttctaaatccccatcttccataaccggcataatcccctctgcctcaagctgctttaatgcataaggaggatattctccatgagactggacatcaatgaagaaatagctccggcggtctgcgcacatggcagcccaaacgtcattaggctgacaggtatgcggatatgtatttccggcagccagcatacagccaaccttattttccgggtccacctcatgggcaatcttagttgccagtgcactggctaccagctcatggtgcgctgcctgatatttgatctgcttctcattttcgccttcctcaaagcagagtcccgcacccatgaaaggagcttccaggatcacgttgatttcattgaaggtcagccagtattttacaagccccttataacggcggaagatcgcattgcataaattctcatagaaggaaataagcctgcggtttctccatgcgccatattccctgaccaagtgcatcgggcagtcaaaatgtgttatcgtaaccaagggttcaattccatatttgcggcattccttaaatacatcttcatagaactgaagacctgcctcattaggctccttttcatctccgtgcgggaaaatgcggctccatgcaatactcatgcggtaaaccgtaaagcccatctcggcaaagaggcggatatcctccttataacggtgatacatatcaattgcgtcttttgaaggataaaaatgctcgtcatcaaaatcaaacatttttttctttcctgaaataacagccattcggtcggagccaacaggggatacgtccacattcgcaagtccgcgtccgccctcggaaaagcctccttcacactgattagcggcagttgcgccgccccataaaaaaccttttctaaaagccattgtatacctcccgtattattgtatttataaaagtgttttagtcggaatactgttactggaaatacgtttatttggaaagctcacgtgcaaccggatctttgatcgccacgcccgcagcctctaattccgcaattttgtctgcaaactgcggaaggtatttcttatgcgcaaggagcagctcattaatgatcttcacggcagtttctccagatacgatctgcggattcaaaataaatgcctggagaagtatgccataatctccggtaacagccgcttcttctacacagagctccatgtttttcatacactgaagccatcctctttcagcaggatgtaaggttccaaaggcgatcggccgcgcgccagccgcgccaataaaagcagatacctcaaccgcgcattccggcggaagatccggaacagctccgttatttcttgtagtaacaacaatgtgcctgttcaggtttgcatagatggaagcaatggtatcacaggcggtatctgaataatgggctccgccccgctttgtaagctgttcaggcttataatccagcttcggatccttatataattcaaacagctctgcctctgtctttttcacctgctgtccacgtgtcccaagctccggatccttatattcttctaaacagtggttcagcatctcctcctgcctgtagtaatatctgtgatatccgcaggggatcatgcccatcgtatccagctgctctttaaagaaaggaacatcaaagatgttagccggcagtccggtgtcctcgcccttatataaggaatctatgatctccggcgtcacttcttttccgttttcgtcaaaagccttatgccaatggaaatgattaagtccggcgaatttgtaggtaagctggtctaaggtttttccgatccgctcaggctccttcatcattgctcctataggaacattgcacaggccaataaccttatcccatttgccatatctcataactgcttctgtaaccattccgcttggattggtaaaattgatcagccatgcattggggcaaagctccttcatatccctgacaatatcaagaatcacaggaatggttctcagggccttaaagataccgcccgcaccattggtttcctgtcccagcattccatagctcagcggaatacgctcatccttaattcttgcatttaaaaggccgacgcgaaattgtgtagtaacgaaatcggcgtctttcaaagcagctctccgatctaatgtcaaatggactttaacatcataaggggacgcatcccacatgcgctgcgccatggcgccaacaatttctaatttttccttaccgtcttcaatatccaccagccagatttccctgacaggcataatatcatatcgcttaataaagccttccatcagctccggagtatagctggagccgcctccgatcgtaacgatctttacaggtccattcatctcttctttcctttccgtttattcgtatacagtataaaacagaacgagtcttaagctcatacattcagtcgtttatacacatcgataaattcttttgcaatgatccgaaagccttcggcgctcatcaactggtcctcggcatggatcagcaaaagaccgcttccgtccagttcaccgctcgcctccatagaaagaagagaggtgtgttcagtgtgtccctgattgaatgaaacatcgccttccttgatcatgcgctcagcgtcctcaaatttgccttcctttgcgcattggattgcattaatatagtaagagcgggcagctcctacctgagcaacgatctgaaaacatttcataaccaattcatctgtcatttttgccatagtcaagtctccttattttattcctaccagtcctcatcatcgtcttcgctttcggcagcagccttttcattttccagagccgccagatccagcttgcggacaaagggaagatagataacaaaggagacaaccagcataacaacctgaagaagcgctgtgcgccagcctcccgcaatcaggccggaaatgataggcggggtcgtccagggaacgtaaactccgctgtacatggggcagagccctgctgcaatcgcaacatactctataattccgactacgattggcgttaagataaatggaactgccataagcgggttcataacaatgggcaagccaaacagaatcggctcatttatattgaagatcccaggaactactgaaatctttcccagtgccttaaactgcttggattttgccagggcaaccatgtacagtacgattccgattgtgataccggagccggtagcagttacaaacagctcgataaactgctgagttacgatgtgtccgccgtttgcctttgtcagctccagtccggtatccagaattgcctggttatccagatagtttgcctgcaggatgccctgcataatgccgctcatgatcgtagcgccgtgaacgccgaagaaccacaggaaggatacaataaaggcatagataattatagcaccaaaggaatcggtaagaccctgcagcggaatctggataattgagtaaatctgctcaatcaccgtagtcccggcagcaatatcacagactccatgaaggacggttgcgccggaaatgataacaaaggcaggaaccaaagcagagaaggcattggtaacgccgacgggaactccggcaggcatcttgatacggatattctttttcaaaaaccatgagtagatatatccaactaaaaggccgcagataatagcgccgatcataccctgtccggcagtccaggtacgattgatcacattggaaaccgttccaataacctcacccgcatcattagtgacggagacagaggagggctggaagatcaaaaacgaacccagagcgatcactgccccgccgagaggctcctgtttttccatcaggatgtactgataggaaattccgagaacggcaataatggcattgatattaaaggtagccatgtatgcctggttcagtatgtcgatcagaccgtggtcacttaaaaaggccacaactgccggaaccgggaagtttgaaaggatcagagccacagatccgacgatgatcagaggaatcgtataaatcattccctcttttacagcggtaacaggccgtgtatttacaaaccacaggatttttggcagaagtttctcctgtatccaattattcatagcacatcactcctctaaaatgattagattattttgaattttttaccagtttataagcgaattttaatacgttcataccattacaggttccataatccgccatagggataacatcaaccggaatgcccttaggctcacataatccttttgccttccctaactgaaaaccaatctgaggacctaacaaggctacgtctacaccgtccagacgagcctccatctcactaatcggataagcagcaatctctgcatcctttcccttttctttagcagcctctttcattttttcaactaaaacgctggtagacattccggcagcacagaacaaacgaattaccatactattacctccatattatttttaatgtctgtgtataatcgcgattaccttcatacagacaactatagcagggagatggcaaaaactccaacgaaaaaaatgccggaataaatccggcattttctggataaaaacaaacaatatacaaaaatcatctattttttagcaattgtataaaggtactgtaatagggcgattcaatcagagcttctaccgctgttttatttaaagaaaagcgggctgttgtttcatagaacagacgccgcatctcctctgaatcccctgttcgtccaatagagattaaaagcactacttgtacaggagagccgttccaggaaacaggctctggcagaatagccacgtaagcaaaggaatgttcagaagcaatatgcaggggatgaggaatcgcaatttgtgtgccataattcatttgaatcagctgttctctttccatgactaattcaaggaaatcatcatctaccttttcctgactctggattaccttatatatattggctaaaacctcttgctttgtatttccggatatatgtggaagaaaacgttccggccgataataagtgcagatcgcacgctcaatatcattgagggtcagtgtatctgccaccttacgcttgttctcgtcgtcaaggaaatgttcaatttcaataatggggaccggaacctttctggtgattggaactgttgttaaaataaagtcaatttgggaaaaattaaagctttccaaggctgccacatcacaaacccatatattgtccagatattcggcaaattccttctgatatttgtattttaacagctgagatgagacttttccgctactgcatatgattaatatattggaacgtcttttacactgctgcttttccagcgcaagctgaaagatcagagcaaagtatccaatctcatcttctggtattggtcttttatatatatcagacaacacatttgctgcgattctggctgcctggtatgcaagagaataattttccttgatctcctgaagtaatggatttttcaggggtatttcataacgcatccgtatatcaaaaggaacgaggtgctgattcaaagtcatgcgaatgtcaaagtcattcaggatatcaagatggtattcgttgctgatcagctgaagtatacgaaggcttagctgatcgatgttttcagggataacaaaatttacagcattttcaacaaggttgccgccagtccgttttcctgtcataagacagattaggagaaaggtttcctcggtctgcgtatgattaatgccgcccagctcagaaagatagtcaaacagttccctaataaacagcttatctgtaatttctatatgcagacaatctggggggggggggtgattaatgacagatagtttcctgatttcattctcttataggcgacataggtatagctgacaaaattatcaagcgaaatttcagatagaaaaataccatatctggaggtcaggctgtaaattttttgagccagagaatcaatctcctgaagctggcggctgatattaatccccccaaagccacaatgttttacaaaagaatttacgattaactgtcgcttgttaaattcatttcctgaaatcctaatcccatagttcggtctgcgttcgattgaaaggtgatattgtttcaaagtttcttcaatggatttcagacatttggacaaagttgttttggatacataaataaaattacataattcttccgtctttatataattctgtttaaatatcaggtacgccatcagatagtcaacacgctcattctgactattcggaatgcataaatcacaaagaagtgaattacagtattcttcaaaacactgcggctcctgtattttcaaagaatatccataatgcggtttagagaggattacagcgccatgcttcataacagccttttttaaatcattaagcgcaaggcgaaccgttttttcgcttacagataacttagcagcaagagtttctgctgttataaatattccaggcttcataagcaggagcatctcatgtatttttttctgagtcatttgtagtcatccttttccaatcaggctttccatctgcgcaagctgcttctccagtttggcccgttcattaagggcgtttcgtcatcctccggcgattccgccgctttgggcgcagccctagtataataatggtgtagtcgatagggactacaggttaatagttacaatgtccgatctcattgacgtttcctccttgggaacaagctccagatggcaaaacctcttagaaagtctgtcaatccattcggcggtgatttatgttttggctggaagcctttcaagatcatccatgccgaccctctgtcgagaaacctcgctgtctcaaaaataaaagaagcacaagagacgtattctctcgaaagccgatagcacaaatatgaatataaggaaactacataatgacaaattcgattcaaaaaagatgcaaataataataatcccggaccaggttgcttaggtcaacgactcataaaatgagcagaatactgtttttgtcaagaaacaaataacctacaaaggatgatgtcttatagaaaacagtatataccattcaaagactctttgcaaccacttatgatggctcgccggaaccagaacggccagaaaacttatggagagctgtttttcatgttctgtgaagatatacaggacatggagctgaccactgctatcaagagcttgatggctttgtttgtggagcagataagcagtctctcacccggtatcacaaatatcgtaaaatatgataccttgactgtgagaaacgccgtattaatttgctaaagtcacaggcgccggaagatatcttccggcgcctcttttttccatgtgcaggcggattttactgataatcaaatacgttaatccagctttccagcagttccttttcctcgggacgtttgtaagccagctgggcagctgccacgatggggagccagccctgtacatagcgcttttctgtgcccgttttaacacagaacagatccatgtacatatcagctgtcttcttatccttcaggctcagaagcagataggttctggccacatcggcacttgcgttgccctgggaagcatgtacccagtcaaccagataccatttgccgtcgtcgcctacgatgatattggaagggcagaaatcgccgtggcacagcttggtgtgctttggcatgccgtccagccttgtaagcagctcgtagcgcaggttttcatccagctgttcctcggatttaagggcgcggatggtcttttccttcagcttgtttaacagtgggcaggcctgggcaaaaatcaacaggtgtaaatcaaccatctgctccagatactcccctgtcttgtcaggattttcttccatcagctgctgaagggtcttgccctccacaaattccctggtaatagaccatttgccatcgattacagatacccccagaaccttaggaacattcagggcttcaatggtttccacacgtgcgttgcacagggcttcattcagaacctcggcttttgggaagccttcgcagaattccttgatggcagtgcttccgtcacggtatacggattttgtttcgctactggaaattaattgttttgccataattatactctccttccacacattataaacggtgctgcgacaggtaatccatcgcactgcctttattctactacaacatgactgaaaagtacatacctaatttgataaatttttaacgtacttttaggccctaaaagaatcatatttcttaaaaacatgtttaaaaacggaagatggctgttccgtatgcaggaagaggataggagaaggagtagggctgtccgtcgcattcgcttttagaggatgagaagcacggagcttctgctgccttataagcgccgtgattatccaggagcagggtgtacctgccgcgctttggaacacctacccggtaatccggtctctccaccggagtaaagcttataatgaacatcaggtttttcttacccgtctcatcccgccggatgaagctgaagatacttctgtcgccgtcattggcattaatccactggaaaccgttccagtcattgtcctggcggtaaagggaaggataccttttgtacagatggagcaggtccttcacatagttctgaagctctctgtggtcatcctcgtccgtgagataccagtccagggaaaccttttcatcccattcatggagctggccgaaatcctgacccatgaacaggagcttcttgccgggatggcccatcatgaaggtgtaaccggccttcagattggaaaacttgtccttgccaaggccgggcattttgttaatcatggagcatttcaggtgaaccacctcatcgtgggaaaggaccaggatatagttctcacttgtaaaataggtgagtccgaaggtcatgcggtgatggttatacttgcggaaataggggtctaacttcatgtattccaggaaatcatgcatccaccccatgttccacttgaaggtaaagcccagtccgtcctgttcgggatgctccgtcacctttggccaggcggtggattcctcagcgatgacaagggctccgtggttgcgcccctggaccactgtgttcaggtgcttgaagaactctatggcttccaggttctggttgccgccatgtatgttggggacccactggccctcctgacgtccgtaatccaggtacagcatggacgccacagcgtccaccctgaggccgtccacatggtactgctccacccagtagagtgcattgctgatgaggaagtccttgacctcgttcttgccgtaatcaaataccttggtgccccagtccgggtgttcccccttcctggggtccgcatattcaaaaaggggttcgccgtcaaagtcagccaggccatgggcatccttggggaagtgggccggaacccagtccagtatgacgcctatgccgttcttatgcaggtagttgacaaaatacatgaactccgccggtgtgccatagcgggaggtgggagcaaagtaccccgtaacctgatatccccaggagccgtcgaaggggtgttctgcaatgcccataagctccacatgggtatagcccatctcctttacataagctgccagttcatgggcagcctctgtgtatgtataaaagccgtccttttcaggcctgtcccgtttgcgccacgaacccagatgcacttcgtaaatgctcatgggcagcttctgtacatccgcctgggtccttttttcaatccatgcgctgtcagtccaggaaaagccctggatatcggctgtgacagaggctgtgcccggacggtattccgcgctgaaggcaaagggatctgccttgtagagaatcctgctggactgggtggtaatggcaaatttatagagctctcccagcttcatgtccggattgaaaatctcccagatgccggattcggagatgcgttccatggggttggcctccggattccagttgttaaaatcacctaccagatggacctcttttgcatggggggcccaaacagcgaagtagatgccttcctttcccttgtatgtcttgggatgcgcccctaatttctggtaaatatcatagtgtgtgcctgccccgaacagatagcagtccaggtcagatatgaagcctgtggcagaagcctttttctttgaagatgctgcaatgcgttttttagctaccatatcagttctctcccttgagtttcaggacagctccccagttgccctttaattttatgtggaccttcccgtctgaaatggggaggcggtctccgggttccagaagattgactgcctcgctggcctgaatcggaacagggatggccagcgaggccggctcatcgtcattgtttaccgcggcgataatgacagagtcctcaccgtgtctggcaaatgcatactggcggttggtcagcagcagttcctggtaacggcccgtgtgaagcgcctcctgccgcctgtgaatctgtcccagctgtgcaatcaggtccgtaagctcacagtgaagttcaccttcctggtctatggagatggcgggacgcagcgcctcatcgctggtgttggtgcgttttccctcaatgccccattcgccgccgtaatagacggatgggatgccgggcagtgtgaagagacagaggtatatgggaaacaggtgctccctgagcttaagctttgtggcaatcctgtcctcgtcatgattgtccacaaaggtgtaaagctggcgtccgatggcctccagccgtcttacgttgtgggcaatttcaaagaagttgtgatcattgaagccggagtaaaggcttttgtgaagttcgtaattggtgacggagtggagcatctcactgttaacccagcggctgtagtccccgtgaatcacctcgcccatgagccagaaatcttccttcatggtctctgtctggctgcgcatttccttcatgaagttgaagtccagcacattggcgcagtccaggcgtattccgtcaatgtcaaactcatcaatccaaaaccggatgacgtcaaagagataggaccttacatccgggttaaagaggttcaggcagggcagttcaaaatgttcctgccaggcttcgtatccaaaggaatcgccgcaggggctctgccagtcaaagttcacccccttataccagtccttatagggggaatcccggcgcttttcctgtatgtccttaaaggcaaaaaattcacgtcccgtgtgattgaacacgccgtccactactacctttatgccctcctggtggcattgggccacaaaatttctgaaagaatcattatcgcccagacgccggtccaccagcttataatctctggtatcgtatccatggctggcggattcaaaaaccgggcctatgtagatggcgctgcagcccagggagcggatgtggggaatccacttgtctaattctttaaaacggttggttacttcggttgcatcattgtgtttgggggcgccagtcatccccaggggatacatgtgatagaacactccccgttcataccaggtgctcatgttgttttcctcgcaatctttatgtagttatatgttacagcgcccggagggggatagtactgtaagtactaatcctcctggcttttaaatttacgcagcaggaactggtagcgcagctgggccgcgttcagttcgtagatatagcagtctatcagggtagggtccacggcctgctcaaagtggttcctggcggcttcgatggcacattttgtgcgttcgatttccacgcgcaggcggatgagttcaggtctgggacgccgcgccctggtcactgcggacctggcggcggcagtctccctgactgctttcatgatgtcaaacatatgcttcatctcccagatattgatagaagtagtatatctggaaaatgccatcttatgcatgtatggcctgcggaattaaattttaatacaggctctcaatacaggaattcttccagtctgtaacccagttccatcagccggcggttggattccctcagggtaaggtaataataattggccgttccttcctggcgtacgcctacgatgcccgcctcctttagtatcttgagatgatgggatatggccgggcgggaaaggctggtccgtctggtgatttcgtttacattgagaccgtattgctcgaaatggatggggccaggtgtctgcctgctgtcaagggcttcctctgtcagtacctctatgatggacagacgcatctcatcgcccagggcaatgaacagcggcatacaggcatgaaaacgtttctgtaattcctgggcagttgtcatctgccatttcctcctttggtttaaaaatttgaaccaacttcattttaccatgtatagggaggaaggtcaaggaaatcggaaatgaaatgcataaaactcgctgaaattcacccttgacatttgccggaaaatccctcataatggaacaacatccaacacagtctatttcatgacagtctgatttatctcaatggttttatttacatcattatttttgcgttgcctggctcaggcagaaatttcctcagaaaaaagtgaaagatggaacggagaaagggggtagtgtattcagtttacattgttttatgtcatatgcattgtatggcatgatggcctattgcgcctttatggatatcaggtattaccggatacctaacagggccctggaggccgtggcggcggcaggactggctgtttcggcggaggcctgcgtgtccggagcgggaagcgttggcttttgggcagccgcggctgaaggcgttgttgtttttataatggggctggtgttggcggctgcagccggtttcccgtttttcctgctgcggatggtgggagccggggatattaagttcatggcccttgtggcaggctgttttggcctggaaagaggattttggtccgtagtgattggcttgtgtctgggagctgttctggctctcggaaagatgctgcgagagggcagcgtttgtcagagattcttgtatttgactgcctatatcaggcgtttgattcagagtaaagaaatagaggcgtattactgcccggagcgggatggatataagtgcgtaattccattgggagcctgtttttttgcggggactcttattacagtgttgtggaagggatgagtgatgggtgttaaggcgcatatgcgccaggcagaaacgaggtgagaagtaaatatatggtaaagattctggcagtctatgacgctgaccccgcctttggggaacggctggcggattatgtgaatcagaaggaaaagattccgtttacagccatggcgttttccagcctggacaggctcagagaatatggggaagaacatcccatagaaatcctgctggtagatgagtgctcccggacgctggtgggggatgtgaaggcaaagcagatcatggtgctgtgtgacggggagctggtggatgggctggatgtatttccgtccatctacaagtaccagtccggggactgtatcatgcgtgaggtgttggcttcctactgcagccggcctgtggagccgtcgctggcccttcttgggaccagggccctggtcatgggcatatattcccctgtgaaccggtgctttaagtcctcgctggccctaaccatagggcaggtgatggcaaaaaaggagacggtgctgtatctgaacctggaggaatattcagggctttccaggctgattaacagtgagtacaaggctgatttatcggatgtgctgtatttgtaccggcagggagggtataactggatgaagctaaagtctatgatcagcaactggggaaatatggattatatacctccggtgagatatgcggaggacttaagccaggtggcgccggaggacatggcgcagctcatagacaggattgcgagggagagcggctatgacaggctggtggtggacgtgggccagatgggaaggggatcactgcccattctctccatgtgtgatgtggtgtatatgccggtcagggaggactatatctcagcagccaagatagaggaattcgaggaatacctggaggaagcagacgatgccggggtcagggacaggattcagaaactgagactgcccagacatacaggtattatgaagcgggaggggtacctggaacagctgacatggggagagatgggggattatgtaaggcagcttttgaacgggaagcagccggagagctagggggtgtaggaacaatgaggaggaagcgtgagccatggaggagagggagagtacaaggaggaggaaccgagaaggtgtccggtgggtcataagggaacgcgtcatggaagaactgcaggaaagccaccatatggacgacggggaactgatggagatgattgacagggccataggagacatgggacaggaaatgttcctgccgttaaaagaacggctctggctgcggggcagcctctttgacagcttccgccgtctggatatcctgcaggagcttattgatgacagctccgtatcggaaatcatggttaatggagcaggaaagatatttatggagaaaaacggaaggatggaattgtgggacaggaaatttgagaagccggaacagctggaggatatcatacaacagattgtaagcagggtcaaccgtgtggtgaatgtatcctctcccatggtggatgccaggctggaggacggctccagagtccatgtggtgcttccgcctgtggccctggatggtccggttgtaactataaggaaattcccggacccgattaccatggaaaagctgattcgtttcggagccataagcgcggaggccgcgggctttctggagcagctggtggaggagggatgcaacatgttcatcagcggagggacaaactccgggaaaaccacattcctaaacgcattgtcatccttcataccctccggtgagcgggtaattaccattgaagattctgctgaactgcagataacgcaggttcccaatcttgtgcgcctggagacaagaaacgccaatacggagggggaaggggaaattaccatgagccagctaatcaaggcggccctgcgcatgaaccccaaccgcatcgtagtgggcgaggtgaggggaaaagaggccctggatatgctccaggccatgaacacaggccatcccggcagtctttccacgggtcatggaaacagcccgcgggacatgataagcaggctggagaccatggtgctgatggcggcagaccttccgctggcggcaatcaggaaccagattgtgtcggctctggacatcatggtccatctgggacggctgaaggatggaaagagaagagttttatccattatgagaataggaggtttgcagaatggagaggtggaactggagccattgtttgaatatgacgggaaggaggaccggcttcgtcagaaaagggccgggacacaggcgggacctggttaggcaggagattgccaggagcaaaccggaaaagagggctcccagggcccggcctcccgacagggtggattacagcacctaccggcttacagccagggagtggctgttatacggcgcctgcgggataggggcctgcgggctggcctcctatgtattttaccgcagtgcggtggtgttcctgattctgataccctttggagcctgttatcctttatatcggagggaggatttaaagaaggagagggccaggcggctggaattacagtttaaggagggaatccaggtgctgtcctcctttctcagcgcggggtattccttggaaaatggacttgccctcagcataaaggagctggaagtattgtttggaaagaaggagatgattacagaggagttccggatcctgtgcgatggaatccggatgaaccgtccggcagaagatctgttcatggattttggccggcgcagcggactggaggatgtggataattttgcccaggtactgtccgcggctaaacgaagcggaggtgagctggtggaaatcatccgccagacggctggaattatccgtgataaggtgcaggttaaggaggagatacacaccatgcttgcttccaggatatttgaacagaaaatcatgaatctgataccgtttttgattgtactctatattgatcttacatcccctggatttttcagcgtgatgtacggcacctggatgggccggggagtgatgaccatgtgtctggcagcctatgcgggcgcgctggttatggccgggaagatactggacattgaggtgtgaaaggcaggtggagcggacgataaggattagaaacagacctggggggaggctttgggcccggattgggcggaaacaggttatatgcctggcagccggccttttcttgggaatggcggcacagttgtggcagcgcacagacagcgatcttttggaaggcaataccctggccaggggaagctatggacaggggaatcagacatacagcctgatggtggagggtcttgaggagaaggcggttcctgtggaaatggttctgtcagaacgggtatatacgaaacaggaggcccttaaggcgtacgaggctgtgatggaacagcttccgaagcttatattgggaaataatccgtctcttgaggatgtaaggcaggatttgaacctgcttacatatctggacagctatggaataaggctcaggtgggaatcggatgagccggagcttctggattcttttggtgaactgcatgtccatgagatgaaacagagggggattgacgagcagggaatcagaatcaacctgcatgtgcgtatgacagaggggaaatggccggaagaatatgaactgtccgtgtgcgtaaagccaccggtgcttacggaacaggaacagacggaggcggcatttgccgagttcctcaagaaggaggatgaactgcagtccactacagcttatatgaagcttcctaaggagtatcagggacggagcctgcaatacagtctgccggaagagtctgtctttgttccggtgatgggcttgggagcggccggagccgtcttatgttttctaaaggaccgggccgggctgcaaaacagggcagaggcgaggaaacgccagctggcactggattacccggaggtattgtccaggctgaccatttttctgggcgccggtatgagtatccggacggcctgggataagattgccctggaatataacatgatggtggagcagggaaggcgcaggaaacggtatgtctatgaggaaatgtatgagaccagctgccagatgaaggggggagtgccggaggggagtgcatttgaggagtttggaaggcggtgtggactccagtcttatatgaagttgggaggtctgctggaacaaaaccgtaaaaacggttcaaagaatctcaggaatctgctgcgtacagagatgacagatgcatttgaacagagaaaacatcaggccaggcgcctgggggaggaagctggaacaaaactgctgcttccgctgttcatactactgtcagtggtcatggttatgatagctgttccggcgctgatggaattcaagtaaagcataaggaggagagccatggaattaggaaaagaattaagggagttctggaaggatgaacagggcgtgggggtgattgagctggtgttggtattggtggtgctcataggcctggtcattatctttaaaaagcagataacaaccctgctgcaaaatatttttaaggagataaacagccagtcaaaagaggtgtattaatgtgcaggaaaggtgagattacggtattcctggcaatgatactgttcagtgtctgctcgctgctgtgcgtggtcgtggaatcggcccgcacagcaggcgccagatgctatctgcggatggcagtggactcatccgcagattcccttatggcccagtaccaccgggaactgtgggataaataccggatattgggccttgagtatgacaaggcagagacgctggagaaggagctcagggaatttatgaggccctatatggaggccggcaactggtatcctatgaaggcggaccagatccggataaccgatatgacgggtctgacccagggagacgggagatattttgaacaggaaattctggattatatgaagtatgggctgctggatgtagattgggacgagctggatgaagcaggtgcaatagagctgtcgggggcctggaaggagggaaacagcgttaaccgcgtgtcggaattgtattccgcccattccagggaagctgtgagagtggaaaaggcgctggagacaattaacagtacgcttctggcccagagggaacggtgggaacagggaaaggattgcctggaccggctggatggaggcggtttcgtatcccagaccaataaaatgatacgggaactggaactgcttccagggcaggtaaagacgtatgagaaaagggcggatgaactgtataagaagctgacagacagcagagaacggtttttggaggaaaccaatgacctgagtgacgatgtgcgggctgccctggaggaggaaatcagtcagtatgagtcatatgcggcccaggacggacagcgccgcagggaggttgaggcgctgacaaatctgagccgggacaggattcggtggattggggaaatgatagatatggctgaggaggtaatggagtatatcagtaactgggagccggaggatgaggacgatgagttggacgaggccgccttgtggcaaccggtgagagcgcgctggtcccagtatggtatgctctcgctgggagtggaattcggggtccgcgataaggaaaaggaaggctttctggaacaggtagccaatatggcaggaaaagggatgctggaattggtattgccggaaggaaccgttgtttccggcacagacatcaggctttccggcacaccgtctgtccagaggaaaacagacggcggcggagattccaaaagcaccggctttttgaccggagtcaggacgctgatacagcgtctgattataggagaatatgatatacgcttttttaaagggtttaaaaaggagatgcagaagggggagttttatgagctggaatacatcattcatggaaaggagaaggataaggacaacttaagcggtgtggcggcgcgtctggttgcttttagggaaggactcaatctggtacatatcctgtcggattccggaaaacgccaggaggcacggagtctggctctgaccatagtgggagggacggggatactgcctcttgtatgggtggtggcattttttatcatggcagtgtgggcccttggtgaggcgctgctggatgtgcggtgcctgttggagggaaaaagggtaccggtcattaagacggcctccgactggaaaatggatttggcaggacttttggagatgggaaggagcgggcgtttgattgatggggaaggaggggatgggaatggaagtggaactgattataaaggttatctccggatacttattttcggaggttatgatacggacctggtttaccggatgatggatgtaatgcaggttgttacagcaaggaaacagccgggattttctctggcaaactgtgtatgtacggtgaatgcggaagctcttgtcagtggaaaacatgtgtttttttcaaatggattgtggaaaagtcaggagcgggaggagggttacgcatatgacacgcgcatggctgtagccgggagttacctggaagattacaaaagtccgtagataccatagaaataagagctgctaagatttcagaaatggggaaaggaggttcatgatgatgcccttttttctggtgcagaatataaaattaaaatcgtattgtccagataacaaaacagcaaataaaaatgcaaccgcacctctccaagtacgtatgcgctgtcgactgtcccatgaaaaaggggcattatcatggagctcctgtcagatgcaggggagtttgtccatagaggcagcactcagtctgtccctgttcctgttcttatgtttctgtctcattatgcctatgaagatgctggaccgccagagacagatacaggcagtaatggaatccgtgggggaggaactgagtcagcatgcctatgtggaatactgtttccgcactgcagaggagggcggtgcagaggtggatgtggggagggcagaggatacagcatcctctgtcctggcagcagcatatgcttcagccaggatattgggagggattaacagagagtgggtggaagccgtatcatttgagggaacggatatagggacggatgaaatggtccatatagtgatgagatatcggctgcgtcttcccttttccgtattaggaatcaacagcattcccgtggaacaggtatgcagccgcagaatgtggaacggagcggatgggggacgttttggagatggcggcagggatggggatggagaagaggacgaaacagtatatatcgggaaaaattccacccgttaccaccgcttaaggacctgccattatctttacaatgatttaaaagcggtggattttggtactgttggggaactgcggaatgaatcggggagaaggtattctccctgcgggacttgtgacgcggggagcggaagtacagggaacggaggtacagggagcggcagtatggggagcgctggtacggtgtatgtcatgccatacggcacaagctatcatctgtctaaaagctgccggtccatcatcgcgtatgttcaggcagttccattgtctcaggtggaatattttggggagtgttcttattgcagaggaaaataatttgggagacgggggtgccgcttgttggggatattgaatggtgatttgtcagaacagttaacagtatggcatgaaatagcgggagtaatgctgcgctgcggtttccttatgatgctgttaattggagcgtggcaggatatgaggaatcacaggataaagctcagcctgattgtgatatcgggagccgcaggagccgttgtgcgatgtatgtatattatgctggaggcagcagtcagatatcagatttccggctcccatctgccgtttggttttatagcgggtcagtttaaagatacagccatggccatggctgtaggaggaggattgcttcttctgtcccggataacaaacgaggctgtggggaaaggggacggatggttctttctggtatcaggcatttatctgggggcagtgaaaaatctggttttgctggcaggcggtttaggtgtatgctttttgctatccgtggttttgatgtttaaagggattctgcagggaacagacaggggaaggcttcgcattcctcttcttccgtttctgatcccggcgggaatcggggtgatgttcatatgaaagaaaaaacgcttaaggcaagtcttacagttgaggcggcatggattatggccatggtattgctgtccgtatcggtgatgctccagcaggcagcccgtattcatgatgagaccaaggccgccatgggtctgcatgaggcggtggaaaagggacgtcatggaagcgtgcgggaactggaagcctctgtgtccggggaacaggaacatatgggccgtctcatgttttttactgactgcaatctgatgataaaggaaaaaggacagaggatatacggagtaagcagagatgggaaatggaaaagggagattgaggcgggaaggttccggccggagatattcctgcgcaagattactttaattgaagggctggtcaaagaagatggaaattagctacaggagagaagcaaaacgcaattacctggtagcggggatggcagagaccacagccggatatgaagccagaatgctggcccacaatgagattcgcgggctgctgaggatgtacataacatatcaggatggacggccttcgtattgttatgacatcacctccaggcaaccgttaagccgccttctggagacccgttttataaccggggatgagatatgccagttattaattcagatacatacagcattgaatggtatggaggaatatcttttagacgcaggcggtgttttgctggaaccggaatatatttatgtggagccggaactgttccagaccggtttgtgcctggttcccggcgctcagggtgattttcaggagaaactgagccgccttctgcaatacattctgaagaggataaaccataaagacagggagtgtgtcgttctggcttatgggctttatcaggaaagccttaaggaaaactgcggaatggacgatctgctggggctgattgcgtcagaacggcggaaggggaagaaaagagcgttattgagggagcaggaagaagattttgcgaagaagggaggcgtgcagggaagggataattgggagaaggaacaaaagggaaaagatgaagagaaacaggggaaagaggctgatacagggcaaggcagaggaaaaagtgtgaaaacgaagaaagaacagggggaggacggggggaaggaccgggaaaagaaggaaaaggatgaaaggaaaggaaacattttcatacggcagtttattttatggctgtcagtggcagttctttgtccattggcactgtggctgttcagagggatgacagcggtcttcgataattggaaaatgttagcagcaatagacggaggcttactggttatattatcagccatcaatatatacgggctgttcattgggcatagggctgataatggagatgatacagactcaggcgaggagcaggacccatggagaattttgtatgaggacgaagatgacgaagatgaggatttggacattcagccttctcccgtgtatacgaatgaaaataaaaatgaatattcccagaaaatcccacaaaacagtgccgaagaatcctttcagactgttcttttatcagagcggccggcagaaggggaagaggtacggcgcttatccgccctcaacggttcggatgaagacattgtaatatcctattttccctttgtgattggcaaacacaaggatttagccgattatgtgctgcttaaagatacagtaagccgctttcacataagattagatgaaaataatgggcgttatactgtaacagaccttaactctaccaatggcaccagggtcagaggccgtttgctggaggcaaacgagacaacacagctggagccgggagaccagatatttatggctgactgcggatatgttttttattagctgcacagagcagtcctgtatgtactttctatcttaaaacaatagtatgattttggttgcggaaatagcagatagcaaggggtgggggcataaaaaataactttattgcgtcaaagccacttaacaagtcctttaaagtatgctaagattatatatcattaaggatgtgaggaatacggatggttacaggtataaacaggaacaggccatatgtcaatattgcgctggcagcagtcaacgcattggtatttctgtatctggaggccatcggctccacggaggatggcgtattcatggtaaaacatggtgcggtatttgcgccgtttgtcatccttggtggagagtattacaggctgtttactgccatgtttttgcacttcggagtcagccatctggcaaataatatgctggttctgctggtgcttggcgagaagatggaaaaggcgctgggtcatatcaaatatttgatattttaccttgccagcggtgttgctgccaacggtatatctctggctgttcaggtacggacaggagcggccagtgtgtcagcgggagcttcaggcgcaatcttcggtgtgataggcggtctggtctatgtgattgccattcatcacggtcagttggacggactaaccaacaggcagctgggctttatggttctgctgaccctttatcatgggtttacttcaacaggagtggacaatgtagctcacataggaggcctgatttccggcttcattttaggcatcctgctttacaggaggaaacatgctgccagaatttccggtatggctggatagaatgcaggctgtgttaaccgcagcggaaggaggattttcagaatgacagatgacaattgtattttttgtaaaatagcgggcggggtgattccgtcagccactctgtatgaggatgaggattttcgcgtgattctggatttgggaccggcgtccagaggacatgctcttatccttccaaaacagcattttgcagatgtatgctcactggatggggatatagccgccaaagtccttcctctgggtgccaagattggttctgcgatgaagaaatctctcggatgcgcgggattcaatctggttcagaataatggagaggcagccgggcagactgtgttccatttccacatgcatgtgattccaagatatgagagaggtccagccattgtcggttggactccgggaaaggcttcgccagaggaactggcagaggttgcggataaaatcaaaggctgtctgtaattgcaatgaagattgagaagatggatacagaagataagaaactgtttgagaaaatgtatctggaatatgaggtatacctgagaaggatagcttatgtaaacgatattcctgtggattatattgaggatgtggtacaggatacatttgtctcatatgcccggtataaatattccctggatatgtccgaggaaagtaagagggcgctgctgatacgtattctgaagagccggtgtatggattttcaccgaaagatgaagtacaggagctatggggaattggacgaagaggcatataacagtgaggattatccggcacacgataaggctgccaatctgccggattttgtagtcagcaaagagagatgtcaggcgcttcttaaggaaatcgagaggatgcctgaaaactggcgtcaggtcgcgacgctcagattgatagagggacggccgacaagggaagtatgcgctatgctgaatattacagaaaaggcatgttattccagagtcagccgtatcagaaagtaccttgaagaactgctaaaaaatgataattggccctaacgttatttcacacatgattcaatgagagatacaactgttttaacggcattgttcaaattactctgctccatggactgtatataggaattacggtttaggtataaatcgttaatcgcgtcaagcagagagtcgtcagacaatgcttcctcttccagaaccttactgaatccttgttttgcaaaggaattggcattgagaatctggtctccgcggctggccgctgctgacagggggatgagcagattcggtttgcgcagtgccagaagctcgcagatggaattggccccagctcttgatatgacaaggtcggcagccgcgaaaagatgctttaggggagcatcaacgtattcatactgtacatatccggcagttccaatcagactttcatccagattgcctttgccacagatatgtattacctgatagctgggcagaagcctggggaggatattgcggaccgccgtatttacagctacagagcccagacttccgccaatgacaagaagtacaggcttgctggcagtcaggtgggcataagtgagcccggacagccgatcgccctggagcagttcctcacggataggggagcctgtaagtacggccttgtcagatggaaggtacttaagggtctccgggaagttacagcagactttaagggcagagggaatgcagattttgttagccaaacctggcgtcatatcggactcatgtatgatgacagggattttatagtgcttggcagcgagaaccacgggaactgcaacaaaaccgcccttagaaaaaattacatccggtttatggcgttttaagagccgtctggcctccgcgtaacccttgacaacgcggaacgggtcggaaaaattcttgatatcaaagtatctgcgtagcttgccagaggatatgccatcataatgaatgcccgcattttcaatcagcttgcgttccataccctggtatgaaccgatatagcggatttcgtaaccagcttcttttaatgaagggagcagggccagattgggggtaacgtgtccggcagtaccgccgccggttaaaatgatttttttcataaaaactctcattcctttcgcttcgctttggcacaaaacagttatgaaatagcaagtttgtgcttccgctattttatttttgatgttaaactctcctcagacagatacactacagagcacggaggaggaagtagaatcggttcctccatttgggatcaagtccgcataaaaacatgtgtcggctgtcttctcaagcacaaaccagtgacgccttgagctcgtaacctaatcattgtcaaagcaattccttaggtctttctttgctggacagccagtcaatgtctgtctattttacttaggagggctgttttatgttatctatcaaacactttgtctgctgtggcatggacgttcacaagaaatttgttgtcgctaccattgctctgacagactacaggggcgttacttcttatgttaaaaagcggttcgccaccttcaattccgatcttaattctttgaaaaaatggcttctttctttcaattgcactgagatctgcctcgaatccactggtaaatactggattccaatttttaatatcctggaggattcctgtcacgttgtcgttgctaaccccaagtatgtcagggctatcaaaggacagaaaaccgatgacaaagactccgcctggattgcggatctgtttaaatttgatattgttccttccagttatatcccctgtaaggaaattcgcatgcttcgggaattgttccgataccggcagaaactgattggccaccgcagcagtgagaaaaaccggttacagaatgctcttacggtttccaacattgcccttgcatccgtcctctcagatacctttggaaaatcagcgaccgccatcgttgactatatcctgacctgtgaggtatttgaccccgaatactgtaaatccctgcttcttaaaaaagcaaaggacaaggcagatgatgttgtaacctccataatcggttatgaactgcgccgtgaccaatccgttaagattaaggtctgcagaaagcatttcgatgaaatcaatgagtgcgtctccactctcgaagaaacgatttccgacctggctaaaccttaccataaatttatcgaattggctactacaattcctggaattacagagcagtctgccacctttatcattgctgaaatcggggtggatatggcggtattcaaatcctcaaaacgtttgtgctcctgggctgggctggctcctgaaaataacgaaagtgccggtaaaaagaagagcgtccatgtttcaagagccggggtgtacttaaagcctctgctggttcagtgtgcaaatgctgccatcaagagtaaaaacccttacttcagatacaaatatgaccgtataaaaaaacgtcgtggtcataaacgggcaatcattgccattgcacgcatggtgttgacttgcatttaccacatgttccaaaagcaggaggtatttaatcctgccgatacggattattccgctattcctgaagaaatgtaccggaaatttcaggaacagtatgacagaaatgccatcaaacgtttagagaaacgaggctatatgattactcctcctgctatggcctgataccctttattccataggatcctttggggcggcagtttactggtgctcttgttaagttacgattttttttgattttttctttcaacctaacctcctaaagaatatgatatgctggggaaaccggcattcataaacgtctactattatagtaagcattaaacgcaaaaagtcaaccctaaaggcaaagggaactttaggagatttggtaaacagaggtgtcacgtgggagattataaaagagattcagaacaggacaattctatggactgcccgatttggggaacggatgatatatcagatgaagaactgttaaaagaatttgaagcagtcaagaatatgaccgtcccccttcccattccgtccccatcatcagatgagtttgaaaaaatctgggcaaggatacaggaagaaaaggctgagtcaaagaatgtaccggaatccgaccaaccagagcaccccaaggttatcaaaccgagatttggatggaagcggttggctgcgattggtttaattgcctgtcttgtggcagggagtggatgtatggtggctatggggacgaaatcgtatttttatcgggagagggttagagacgagaataatatagtatataataatgattctaataagatagccgttaatggagaagatgaggcatatcaagtaattgaaaaagagctgaatatcaaatcatttaagctgggatatattcctgcggatatgaatttcaattcactttatattgacaatggaagagcagatatcgaatttatccatgacaataaatatttttatttttgtcagtcaaaaacaagtagggaggcatctagtgtctatggctcagattatcaggcagagtttactgtatataataaatggataaatgaggatataaatattgaaagtgaggtgttagaagatgggagcttgagatataggggatcttttatagctcaaggggtgtactgtagagttattggaataatgagtaaggaagaatttattaatatagttgaaagaataataacttagggaaaggattcaaatcatgaagaaaaatagcgtagttttgttttgctcgttattgttatcaatattaatgagtttaactgtttgggcaggtccgtttaatttgaatgattattcttcagtaaataccccatcggatttgcttccaaaaacggtaagaagtgcttatggttatgattcaacaaaagttagaggtaatttctttgctgaagcaaatgtgttaattactaaccagggaaatggggatattggtggggttgcaactgcctatttagatgtacctgcagacgaagcatatattaccatttatttagaccgttgggatgtggcgggagaacgatggaggcaggtgacatattacgatgctgaattttatgcgaaagattatcaggaaggcttaaatcgtccttcattgaatattacctttaagaatcaggataaaggatattattaccgtttaagaggagcgtttgttgttgtgtatgatggggaatttgaaggatatagtcctgcaacggatggagtttgggttgattaggtatgttaattgtatttctgtgaatagacttagtaaattgagggcattggatccatagagaaacaatgccctttaagaacttaagtaagtatttgtagctaaatttagcgtattagattagtagaatatttaccgccctttaaactgcttcaacgcccgagccaattgatccggacaagatgtaggcctgggaccgcactggattccatccagtcttcggatagcctcatccacgtccatgccttcgatgagccgggacaggccctgagtattgccggagcagccgcctacgaactggacgttggtaagtttattatcttttacctcaaaggatatctccctggaacagaccccctgtgttttaaatctcatgtgtagtgcctcctgtaataaattcgtgtatatccgattatgccttatgcaaaagataatgtcaagtgagaacaagctttgaacttgaaaatcttcaggcatcctatataatagaagaatagtacaagacagaaggaggtaattatgctaggaattattggagccatggacgaggaagtggctatgattaaggcgcagttgacagatgtacaggtggagtcaagggctgccatggacttttataaaggaaagctggaggggaaggaggtagtagtggtccgctccggcattggcaaggtcaatgcagctatgtgcacccagattttggcagatatatatagtgtaacaggtgtggtgaatacgggaattgcaggttctctgaaggcagaaattgatattggggacattgtgctttccagcgatgcacttcagcatgatatggatgcaaccggatttggctatgaaccgggacagatacccagggtggagacgctggcttttaaggcagatgaaggtcttataaatcttgctgaggagtgttgttccagggtgaatccggacatccacacctttgtgggacgtgtggtgactggagaccagttcatttctgataaggaaaaaaagaagtggctgacagatacctttggaggatattgtacagaaatggaaggggcagccattgcccaggcctgctaccttaactccatccctttccttattgtgagggctatttcggataaggcagatgacagtgcctcggtagattaccctgcttttgaggctaaggccattgttcacagcgtgaatctgcttaccgagatcgtacgttcccttcgataagaaaaacgttgattaacagtcagatttgttttatttgtatttgcaaataacagatttataaataatatacttataaatagcgacccacaaacaacagacgcatgactcataaataatcggacctctgtatatgacaagattcagaggtctgttttataagagggaggatggtatggaaaagaaaaagaagtggatagtatttggggtaaaagtcagatagagtcttttaaaaagaaggggttaaatatccggaccagtactaatactacagcgaactccctgagtggcgtgtttccccttttttggtataaaaagaaaaaggggctggtactatgatgaatcctacgatgttcgatccgattgcattagctgcttggtattccgatgaaaataatgattccttactccaaacggaactggaacactatcttcagaattattttccctgcttttctctgcagccacaacgaagattattccaaacctttatacaggggcttttgagcccgttggaacgcaaatcgattgagccagtcgcccttcacttttccggtgaaaagtatgagctcctgtccaggcagattggggcaggctgcggcatgttgtccgtggatgacacaagctttgtaaaaaaagggaagcattccgccggtgtaaagcggcagtactgtggctgcctggggaaaacggaaaactgccagtccggggtgttccttgcctgcgccggtgacaaaggatatgggcttgtggattatgaactgtacatcccaaaggaatggttcagcggggattttttcaggctgcgtgaggaatgccatatcccggaagaagagacatttgccaccaaaaaccagatagcccagcgcatgctcaaccaggtaattaagagcggccggttccaggtccagtgggtggggtgtgatgcagcctatggaaatgaccacggtttcctggacggattggagctgccggaaggtgtatggtattttgctgcaaccagaatggaatcgtcagatgggaaccgtggaaaccgggaatccagccaggagatgcgcccggatacagagggagaaacctggcgtataccttaactgtctaaagaaaaatctcacctctcagaatcgttttttaggagaatttggcgaacgattctagggactctcaacttcccaaatcaaaatccgttgctataatagactttaccgggaaacgcctgactgcaggggcggttcccaaaccaggcatcggctgcagccagcagcccgggccaaaaaataatattattatagaaacgggatggaatccgggaagaaaggggagcttttactatgatgagctttttacaaacaggaaaggcactgtatgtgctggcggcaatctgcctggctggggtatttaccaggctgatggcgggaagcttctacaaacgattaattaaagagagcaccaacatggcactgactaagaacaaatatctgcgcggattgaaacagaatgcagaggatacatatcgtatgaatcagggaatgaataacacacgcgtttatctggagcgccagatgtacagcctgcggacctttggtatgtccgtcaagggactggacaacctgtcggggcagctgacacttctctgcttcctggcaggcggcggggcagcatttctctcttattggtttagaagtgataactactatattgtattgtacggcaccacaggcatcctggccggcatgtttaccatgctggtggattacggagtgaatttggaatccaggagacagcagcttctcacctgccttcaggactacctggaaaatgtgatgtggccgcgaatgaaccgggaaggcacagcggagcatgtgcctgccgttacagccgaggaggaccgcagggagccggctaatctgcgttccataggaagagaccgccgttcaaatagtaataacagaagggggctggagcagactgctgccagcagggaaaagcaggaagagaagtcaaaggaaaactggcttcaggatttgaatccggaacaaaaaagaatgttgggggaattactgaaagaattcatttcctaaaatgctgactttcaggaatttatttccagagtcagaaagaaatggtattataagggaaattatgttataatttaagagataagcggctttaccgcagcactgatagaatcatggacataagaaaaggagagcgcgagttatgggaaaggaagttatgtttgattattccaaggcagcaggattcgtttctgcggaagagatggccaattttaagaccacagtcatgagtgcaaaggagaccctgctggagaagactggtgccggtaatgattttctgggatggatcgatttgccggtagattatgataaggacgaatttgcaaggattaagaaagcagcggaaaagattcaaaatgattctgacgtcctgctggtggtaggtattggaggctcctatctgggagcgagagcagccattgaatttctgtcgcacagcttttacaatgtgttacccaagagcgttcgcaagacacctgagatttattttgtaggaaacagcatcagcagtaaatatatccatgacttaaagcaggtactggacggcaaggatttctccgtcaacatcatttccaagtcaggcactaccacagagcctgcaatcgcattccgtgtatttaaggaaatgcttattgaaaaatatggcaaggaagaagccaacaagcgcatctatgcaaccactgacaaggctaaaggcgcccttaagaacctggcagacgaagaaggatatgaggaattcgttgtgccggatgacgtgggcggacgtttctccgtattgacggctgtaggccttcttccgattgcagtaagtggagcggatattgataagttgatggagggtgctgcttcaggcaggcagaaagccttagatgcaccatatgaatccaacgcggcccttcagtatgcggctgtgcgcaacatcctgcaccgcaagggcaaggcagttgaaatcgtagccaattatgagccaagccttcactatgtgtccgagtggtggaagcagctctacggcgagagcgagggcaaggaccagagaggcattttcccggcggcagtggatctgaccacggatctccactccatgggccagttcatccaggacggatcacgtatcatgtttgagacagttctcagtgtagaggaatctccggcagagattcttctgaataaggaagacgtggataccgacggcatgaattatctggcgggaaagagtgttgattttgtaaataagagcgccatgaacggaacaatcctggcccataccgatggcaatgtacccaacctgatggttaagattccggagcagaacgagttctgtctgggagagctgttctacttctttgagttcgcctgcggtgtcagcggatatattctgggcgtgaatccgtttaaccagccaggtgtggagagctataagaaaaacatgttcgcactgttaggtaagccaggatatgaggctcagagagaggaactgcttaagaggctgtaatggcgggccgggccggcgggggctggtcagtcataccgtaaatcttagtcggatgaaagcttaatagagatacggcatagagaaaaggccgtcctgctgatggggtgagtcagcagggcggcttttcgattgctcaaagtttggaagagagggtggagaatgggggtggggaggggttagcccgcgtcagacactgcgaagcgtaagctctttcctgcgcccgcttctgtcctgtcttagctgccgtattacaaaaggcatggtatatacggccataaagcctgatacagcaggcgcaatcagtccgatgacaaacaggttatccgggcaataggtgtaggccagccatatgagaggcattctgagggccagggctccgaaacagcagctgaccatggtaaacactgtcttggaacggccgttcataaacccgttgagacagaatacaaaggaaacagccaggtaatcaaagctgcaggaatggaagaagggaattcccgcctctatgatatcaggattggtgttaaagagtccaatcatggtctggggagacagctgggcccacaggaagaagacagaggatgccagtaccgcaaagccaattccggccgtcagggaccgccttgcccgttccggcttccctgcgccgtagttctgggccgtgatggctgccagggcgctggcgatggaagtggcagggagcatggcgaacacgtcatatttgctggcaatgccaaccgcggcggctgcgttcactcccaggcggttggtgaccgaggtcaggtaaaggaaggacagccgcaccatgcattcctgggaggagatgggaattcccaccattgccagctccttcagcctgtccctgtcaatgcgcaggttcttaagggtaaaggtaaatatgaacttcttcctgttaaggtagacaatggaacatatcatgctgatggattgggataggacggttgccagggctgtgccggctacgcccaatcccagatatttcacgaaaatgatatcgcccgcaatgttgagcgcgcaggacaatgctacaaagtacatgggtctgcgggaatcgccgtatccccgcagtaaggcgcttatggcattgtagccgcagatgaagaatatgccgcagaagcatatggtcacatactgtctggcctcatccatggaggccgccggtgtctttaaggcagcgagtatggcgtctttgaaaatcagcattccaacggtcagcaccaatgccacaattgcaaatacggacagagtggtcccaatggtgcggcaggtcctttcctcatccttcatgccggtgtattttcccaccagaatcgtgccgcccagagtcaggccggataccatgctggtgatgatttgggttacctgggttccggtagacacagcggccacgctcgccggcgtgcagtaccacccgatgaccatcaggtccacagccccataaagggcctgtatcacattggcaaccagaaatgggacggagaatgccagaagtacgtgaaatacattgccctcggtcagcagattgtcgtttttcatgatgaatctctcctcaatataacatttactaagaataagaataagaataaaccctccagtaactggagggtcaataataaatatttatttttccgtactttttgagaatggaatctgtatttccgtcacataacgggacgtatcattggtaaaacccgcatcaatcagcgtgatctccacggaatccccgcaacaggaatatcccatctgattcatatactccaaaagcagaatatagtactgcgacgcttcctgatgcgtgccggaaaaccgcacgcttacataatccccggcctgcagatactgttccttaccctgatagtggtcctccttctcaagaagtacgaagatacctgaaaatgattggaatttgcgggccttcagattggcggaggacagggaaactcccaccttgcccagaaacatcacaggttccagggtattggctctttccagctcccgaagtgagaattccaggtcctctcccagcttgatatcctttctcaggtacgcaatctgtctttggtcaaaatgaagggtcctgatttcaccgcattgtgtatgaatggcatcctccagggccctgagacggtattccagcttctgttcaatctgcatcagttcgctgatttttgcctgggtttcatccttctgttcttttagaagtcccagcatgatatccacgtccctgttttcaaaaaataatgcaatttttttaagggatacacccagggcccggagatacttgatggtattcaggcgttcaaactggcgggtggagtaatagcggtacccggtctccggatccgctgtctcagggtgcaggatgccaatttcatcgtaataccgcagggtgcgtatgttgatgccgaacagttcggccatttctccgattgtgaaaaggtttttcacgatttaatctccgctttattcttcgattacctgaatctccagaaaatcgaaatctactgattcaatgaaattatcctgtgtgaatctggctttatcatgatacttgaattcctttacagtagagtccagccagatgggtttttccagatcaaattcataacaaatagaatccagggaatcaaagaccatctgagttctggataaggaatagtcagatatgcagaccacagtatcttttagcagatggttgtctttcattaattttccccacattctgaacataaagcttctcctttcgcaaacgattggcggacatataggtttctgatgttttagtataacatctaatccggtgttttaaaagtcattttttaaccggtattgttttcggtatctggaaggcgaggtctgggcgtactggttaaatacacgttcaaaataggtgatggtctcgtatccaacggattctgatacctccgtgatgctcatggaactgctggacaaaagctctctggcatggcggatccgtatcatattaatatactcattaaccgtgaatccggacgcctccttgaaaatccggctcaggtaacatttgtcagcataaaaatggtccgatatcatctccagggacagagattcatcataatggtcgataatataggaagccgcttcatccaccttcctgtgtttgggctgggtggacaggggaaggccgggaggcctgatgagagccctgcgcaccatccctatatatgtacgttttgcagaagccatcaaacaaaattccccggatgcctggattatcaattataccaaccccatgtctctgtgcgtaaagacactgtacctctgtgggccggtacaggcagtagttgagacaaatgcggtctttgaacgggatgccatccgccccattctggccggagacctgcctgagtgtgtgaaggagcttatcatgccggcgtttgagaatcatgaagccatactggaggcagctctcacctgcaatgaggagctggtagtcaaggcatttatgaatgatcctcaggttaaaggaaggaagtgcaaagaacaggatatacggctgcttgtaaaggatatgctggatggaacgaaaaagtatcttccggaaggatggagttcgtataaacgctaaaaaatattgttaaatagcagtacatttttcggccatatttgaattttttgtaacatcccttgcccgtggggattatttgtagtaagctatacgtaatgataaatgttcccataaggaggaaatgcaggtgggacaggcaattacggattatgtaaagttcctggcagatgccagggatgcggtgtaccgtcttaactgtgaccagaatacggccggtcagctggcggatgaggaagagatgaaagaacgggagcttgagactgccaggaaggctgtgtctgactccgtgaaccagacgattaagaagcgtttggatgagattaattccagctatgaccaggagcttggaaaaggacaggaacgtctcaagaaggccagggcaaaacgggagaaggccaagagccagggagtaaaggaacggattgccgaggagaccagcgagctgcgggaacacaacagggacctgaaggtccagatgaggacattgttccagaagaaccgggtgcccgcctggtgtgggaccacattttattatgctctgtactatcccagaggcttcagggaaattatgatttttctgcttaccctggtaatctgctttttgggaattccgtgcggtatctattttttgattccccagagagttatctggtatctggcggctgtgtattttgtggatatcctcctgtttggcggactttatgtgatgattggcaataagaccagacttcgttaccaggatacgcttaagcgggggcgggatatacgcaatcacctgagagcgaaccagaagaaaataaaggtcattaccagaaccattcagaaggacggcagtgaggatttatatgaccttgaaaaatatgacgatgagattgcctgcgttgaacaggagctgtcggagattgcttccaggaaaaaagatgccctgggtacttttgagaatgtgacaaaaaccatcatttcagatgaaatcatagccagtcataaggataagttggacaggctcaggcaggagctggatgaagtgtccgcgaatctacgcaatctggagagcagtatcagggaacagaatatacgcatagcagatacctacggtccgtatttggggagggaattcctgcagccggaaaaattggcccagctttcccgaatcatacaggctggttcggcgtctaatattacggaggccattaagatatatcaggatgcgggacaggatttggggcggccataacattttaaatataacagctatgtacacaggtcctgcagattgcaggacctgcgtaatttatggcgcggcagatgtaattacaataaacagaggagggtgcaccaggttggatatactattcgtagtgccatatccggaattagaaccggtagtacaggaggtatacagggattatcctgaaaaggacaaggtcactgtggaatttaaagtgatgacggttgatatggttcgtcagtacaaaatggagagggaatacgatgttcttgttgggcgtaactttacatttgaagagctgaaacgccagtatcccactaaacccgttattaatatcccaattacaggttacgatatagttcaggctctctacgaggccaagaagatgtatcactgcaggaaggtgggaattgtagggaggttttttcatatgtatcaatatgaacatatggaagagattaccggagtgaaaacctcctatcatccggttgatcagggacatgatttggaatactgtgttgccgaggcagtaagccaggggtgtgactgtattattggcggttattccgcatatctttatctcaagaactcaagaacggatcttccggtagtgactataaaggtcagccgcgaaaccattttcaatgtgttggaagaagcggttcacatagcggaagaggtgaagaaagaaaaagaaaagtctgagcttttcagaatcattactcaaatttcaaatgcaggaattttttatgttaatgataaaggacagattgagatagcaaacagagaagccagaaagttgttcccgaatgtgcagacattattgggggggggggcttatctaaggcaaattgctccgtttatgcaggaggaagcggaacgctgttttgagtctggtgaaagaatagcggacagagtatatcttagggaaggcacttctctgtccactgatttccttcctgtaaaaataggaaattccatgccggggctggtggtcagttttatgaatgcctcaagaatacagcaaatggagaatcagatacgacgtcagatgagcgataaaggattggctgcgcggtatacatttcaggacattgttcataaaagtgatattatggataggaccatcgagaatgccggaagatatgcgggagtatcctccaatgttctgctggtaggggaaaccggaaccggaaaggagctttttgcacagagcatacataatgccagcaagagggcgggaaatgcttttgtggcagttaattgcgcagcattgccggaaagcttgttggaaagtgaattgttcggttatgtggagggggcttttacgggttcaaaaaaaggcggaaagatgggattgtttgagatggcccataaaggtacactgtttttggatgaaatagcagagattcctttgacatttcagagtaaactgcttcgtgtgctgcaggaacgggaggtgcgccgtgttggcggcaactcagttatatctgtggatgtacgaattattgcggccaccaataaaaatctgcaaagacaggtgagtgaagggaaattccggcaggatcttctttaccgtttgaatgttcttagattatacatccctccgctgcgcaaacggagtgaggatattccccttctctttcattactatcttcaatattacagtaatcagtttggttatgaaatgcctattttgtccgcaggagcagaggagatcattaaacaatatgctttcacaggcaatatcagggaacttaggaatatagctgagcggttgagcgtggttcatagcggatttatgataacagaagaagaaatggcagcagcactggggcaggatgatatagaaataactgagtattcagagaggacgatgacaactggtccttcctatatgatgtatgcggaaggcaaaagggagcaggagaaacaatacattcagcgcctgttaagtgaacacggatataataggagcgagacagcaagggccatgggaattgaccgttctactttatggaggaaaatgaaaaaatatgggttgcagtagtgatgcgttgcaaaattcatcataaacaacgaattattgctacaattgagaaaaaattaacaaaacacggaaaagatgctcattttgactgatatgagcatcttttttaatattatctggtaattggcgttgagacatgaatgaaatccaatagaaacattttgaaacgggtatacaacataataatacaaaaaattaagattatttgttgtaaataagttttattgtgtattatttatatccctgaaaaaagctgaggaaaaaaattggaaagaatatataatttggcacgattattgctttaaaaaatataagaatgatataaatataagacaggaggagagattcttgaatattgcagttttaatgggagtattttttgtattactttttctgggggttccgattgcatattcgttgtgtctgtccgcagtgctttacatggcactttttatggatgtacctatgataatcataggacagcagatgctgaaaggggtggactcatttacactaatggccataccgttttttgtaatcgcgggcggactcatggaatccggcggtatttcaaaacggattgtgaactttgctagaacagtggtaggtcatctgccgggaggacttgctattgttacggtagtagccagcatgatttttgcagccatgacaggcgccggagcggcgactaccgcggcagttgggggaatcatgattccatccatgcaggaggaggggtatgacggcggctacgccagcgcagtccaggccgtgggaggaatatttggacctcttattccgccaagtatacttatggttctatatggagttgcatccgaggaatctgtgggggatatgctgctggcaggactggtaccaggcctttttcttggggtaattgtcacagcggtagtagtatggcaatgtattaaaaagggatacaagggggtaggccattttagtctgaagcgggcggcaaaatcatttttagacgctatatgggcgatacttgcgcctgccattattttaggcggcatttattccgggctgtttactccaacagaggcatctgccgttgcttgtttctattgccttattattggtttgttcgtttacagggagcttaatttcaaatccctgggcaaggtggtattcaaatcagtcaagacagcagcgggtatcatgctgatagtagcagctacccaggcatttggatgggtcctgacaagggcaggaataccccagatggtggcagaaggatttacctctgtaatatcaagcccaacagtgtttatgtttgctgttgtattcattctgattattgcgggatgtttcatagatgcagtaccggcattgctgatatttgctcccatattgattcctacagcaacccagtatggaatttccttgattcattttggtgtggttatggtggttaccttatgtattggactggtgacgcctccggtaggaattaacctgtttgtggcatcttctgtaggcggacagcccattcataaaatcataccgcatctaccggtacttattgcttcaattatagcaggaaccatagcgattgtattaatacctggcatttcaacattactgccagcgttaatgaaataaaacataggaggattttattatgagaaagactgcactgtatatgttattggcagcagctgtattaggtatgggaggctgcggcaaagcaaatcaaccagcttccgctgataatggagggacagaagcaaaaacagcagaagcatcaattgaacttagcgtatttgccggttctgtggcggagaacacgcccaccggtaccgggttaaaggctatggtagactatatcaatgagaatggcggcgggaccttgaaagcgacggattattatgatacagctttgggagatgcaacatccatggtgcagggacttcagcaggggacaattgatattggggtatctggtaccgcctatttttcaggattggttccggaggtagaagtattccagcttccgttcctgtttgataatctggaagaggccagggcagctgtagatggagccgcttcggaaaaaatatttgagaagtttgctgaaaagggaatcgtgggattggctttctgggagaacggtttccgggaactcagcaataatgtgagaccggttacgacaccggcggatttaagcggtattaagatgaggactctgcctgcaaccgtacaggtggagacatggaaggctttgggagccctgcccacaaccattgacgcatctgagttatataccgcattgcagcagggcacggtcagtgcggaagagaatccgcttcatgaaattgtttcaagaaagttttacgaggtacagcagtatataacgctgacagaccatgtttataccccgttcatgatgggaatcagccaaaaaacatgggacaaattaagtgaccaacagaagcaggttgtgatggacgcagccaatgcaggtaaagaggcccaaaggaaagccaacgaggaaaagacaatagaggcaaaacaggtgctgctggacaacggatgtgagattgtggaaaatcccgataaggaagcatttaaagagattgcagtgagcgcctggaaggtttttacagatgaaaatggtactgagcttctcgacatcatccagaagaattaaagggggcactatagaatatgagaaaaataactgacctcaccctgccggtagtggaacattggcgctatggaatcaagtttgaactggccacatcccatgccaataaagaccgttggcagacaacgaaatataatttgcagtcacattggtttacccatattgacgcgcctgtccatcatgacccaaatggcaagaatctggacgcatatccgatcagtgattggtgtatttcggactgtctgattctggatttatcatttgtgggtgataatgaggcaataaccgcccagatgctggaaagggcaaacgaacctttcaaggataaacattatgatgcgattataatccgttctgaccgtgggcgaaaggtatcttgggagtccgtggagttttgggataattcctgctgggtcagcgctgacggaggaaggtggatcagggactataatccgaaggtggtcggatttgacttcccgcaagattatgaaatacgcaaaatccgtactgcaaaaccagaggatcctatcgtgcagccggtacatgatttcgtcctgaaagaaggaggaatattaatgattgaataccttactaatttatgggaggtaggacagccaacctgtcagctgattgcgctgccgcttaacacaaaaaacgcggatgggtcccagataagagtgatagcagtgacagaacaaccctaaaggaggaatggacatgaagggtttggtttcaaagcttgattcaggggtaaagagtatatttggttatgtgggaattataatgattttaattgagacatatgctgtctttgcccgtaatgttctgaaagcgccggcgccctggacagatgaaacactgaaaatgctgtttgtatggtctatatttatttgttccagtctggcttttatgggcgatgagttaatcggtctggatcttattcaggagaaaatatctgataacagaaaggcgtatggaggtttaaaaattcttcagtatacccttgggctggtatttggagtcctgacgactaactggggtcttaatatcatattaatgcagctttccacaaatgaaaaaacagctgtagttaaatatcctttatggataatcaacatgggttttctgataggaagtgcgctgccggttatatttgccgtatggaaaatatacggttgcaggaagtactttaggaatgatacaattaaaacagaataaggcggacgaaaaacgggcggccggcaggctgcccgtttttcggctctatatccgcaccagatgatacttcacctgattcgccgtcagcagctgcgcctccctctgatggcaggtaaacacaataatctgattatcatatgccttcacaagccattttaatgctgtcttcaggcgttcatcgtcatacagcacaaagctgtcgtcaaaaatcaggggcatggtatcccttctgccgttctggaccagcttggcggcagccaggcgcagggccagataaatctggtccatggtgccgctgctgacctgctctatgggaaccagcttggacggcgtgttcatgaagacatccagattctcgtcaatgctcatgctggtgtaaattccaccggtgataccggatatgaggtcagaagcctccctgttcaggtataatccgaaggaatcgcggatagaggtggacagagcggtcatggtgtcctgggccagatcgatggcgtccagttcctcctgaatgcgctcgttttccgtcagcacatgtttcagggcttcggctctggtcttgcagttagccagatgttccagcttctgctccagttcccactggatacgctgctgctgctctatctccccggaaaactggtcctcgctggactggagctttgcaatttcttctgataactgcatcagggtctgttccgactgttccacggccttgctgagccgaagaaactccgccatcctcccctccaatgcgttcatggcatcctgggaaatgctggagtcacccaggtggcgggcgaatatttcctgcagaagacgggtgctggtgtccagctcctttcggaaccggcggttcttgcccagcttaaggatgccggttatgcaggcagccagggcaatggcgccagatatccctgctgcggccgtaagaggaaatggtagaagcacaagggagcgtaccaggtccggcgccgccaggcacagcccggaggctcctgcgaaggccagggtgatgaggaacatgaatacggcgcagacagtcctggatttcctgctgcatgcagccagggtgttctggtattcgccgtaaagctttctggtgtcctccatgtatttctgcacggattcctgatcagtaaactggctgtttaaaagaatctgccgtcctttggcagacttttcaagcagtccttccttttccttttgacagctgtccagctgtttcctgatttcattcttcttgttgcggtacgcaattaactggttggcatactggggcgcggatatctcctgctctgttttgcgtatatcccccaaaagggcggtataactgcgtgcagcctcaggaaccatctgattctccagttcccgcctctggctttttaagtatgcggtggctttggttatattcagggcaatgctgccggaggtattgagattggcgatgtaattgcgcagctcagccaccatgcctccgtccgtggcgcattttaactggccgatgctgatggtgttgtcgtaggctgtttccgacaggccgcagcgcagctggtccagaagggctcgggagggttcaacctctctgccccgtgtttcattgacaatggtcagctccttgttctgcttctgaaatcttctctggatacggtatatctggccttcgctctccagccgcatccatccctcgtaggtgccgcttcccttccagggctcgtatttgctgtagacatcattcctggctgcccggcccctctgtttctctataccaaagagcattcccctgataaaggtgtgaagggtggatttgccggcctcgtttttgccgtacactacattcagcccgtccttaaaggaaatgtccaggtcgtggaatttaccgaatccctcgatgtgcagacttaatatcttcatgggttcagctcctttcatcggtggtatgaagaagggcatttaccccgtaatacagggctttcttttccaccgggctcatatcttctttttgaagggcctggatatagaatccaatcatatcgctggaatgctcggcaaacagtgctgaaaaatcgtactgaggctcagagtcatcaataatttccgcaatcctgtatctgactgtgagctgctccaggtcaaattcaatgtcagggtccctcatgcccctgattcggaaccggtaaatatgctgggaaccccggttttcaatctcatttgatatgcggtcgcaaagctctccgttggtagtgtccctggacacattcacggccagtggtatgtactggaggctggcagcaggaataaactgaaggtttatcagtttcctggtgacaggatgaatctctcccgcataaaagccatgggaaccggtctcggtcagatccagaggttcgggagagccgcagtaagcaatctttccgtccgccaggacatgaggtttgtggatatgtcccagggcgatgtaggaaaatggggacagctccaggctgttgaaattaatgggcaggtgggcagtgtcgccgccgtgggccatgaggatttgaatgcggctgtttaaaggaacctgtatatcctccagcaggggcgccttgatttcggccgtgtgatagctgaaaccatgaacttccgtgttaatgtcctcaaagtagacagaggtcagatcttcatccataatgaaggtcacgttgggactccaggtaaagcttaacagggcagagttctccctgatgcggtcatggttgcctgctatcaggatgacctttacggcaggaatggtggagaagagataattgacctccttaaggtctttcatcagcggctgcctgtgaaacaggtctccgctgatgaataagcagtccacatccatctcttttgccttttctatgattatccggaaggtatctttgatggcctgggcgcgttccttgccccagggcttgtttgcatcgggacacataccccagtggatatccccggtgtggatgaatttcatgtctgcctcctgtcaaatgttggggtctttataattcgcagttgtttactgttcttgggaatgggattacgtcacggatgttggacattccggtcaggtacatgacgcagcgctcaaaaccaaggccgaagcctgcgtggcgtgtggagccgtattttcttaaatccagatagaagtcatagtcctccttcttaaggccaagctcgtccatcctggatgtcagtctgccgtaatcgtcctctctctggctgccgccgatgatctcgccgataccgggaaccagacagtctacggctgccacggttttgttgtcaggattcatcttcatatagaaggctttgatttccttcggataatcggttacgaatacaggctttttaaatacctgctctgtcagatagcgctcatgctctgtctgcaggtcacagccccaggataccttgtagtcaaattcatcgttatgttcttccagtatcttcacggcctcggtgtaggtaatccggccaaactcggaatttaacacattgtggagacggtccagaagacccttgtccacaaattggttgaagaagttcatttcctcaggcgcatgctccaatacaaaccggatgatatattttagcataccttctgccaggcacatgttatcatccaggtcagcaaaggccatctccggttcaatcatccagaactcagccgcatggcgggtggtattggaattctcggcgcggaaggtggggccgaaggtatatacgttgcggaaggccatggcataggtctcagcgttcagctgcccgctgacggtcaggttggtggccttgccgaagaagtcctggctgaaatccgccctgccgtcctctgtctttgggatattgtttaaatccatggtggttacctggaacatttccccggcgccctcacagtcactgccggtaatcagaggcgtgtgaacatagacaaaatctctctcctggaaatactggtgaatggcgtacgcaattaaggagcgcacacggaatacagcctgaaaggtattggtcctgggacgcagatgggagatggtgcgcaggaactccagggagtgacgcttcttctgaagaggataatccggtgaggaggttccctccacagtgacctcggcggcctgaatttcaaatggctgcttggcctggggagtacttaccagggttcccctgacaagaatggctgttcccacacttaatttagaaacttccgcgaagttgggaagggtatcgtggtagacaatctgcaatgtttcaaaaaaacttccgtcactgacaacaatgaagccaaatgctttggagtcacgcaggctgcgaacccagcctcccacatttatctccttgccgagatgttcctccggatgtttgtaaagttctcttacggtaatcagatccatgactgatattctccttttctctcatctatatattcagtatccccaattcccctggaaatggacggtaactacatatacgtgattatatgatatttcccgccatgtttcaaggcttaactttccccggagccaggtgcgaagcctgtattttcaatatgattagattatcatgatgtttagacggggacgagggggagttatttagtggtaaattttgagagaggtacaagatatagataaatcaacattaaatggttaaaaacggaaaaaatgtcggaaaaatgcacaaaaacgatgaaataaatttaaaaatttatgtactatttacgaagtttgtggtataattaaaatacaaaaattttaacagcaagaggtgataacgtgattaaaaaagaaatgatagctatgctattagcaggcggacagggaagccgccttggcgtgctaacacaaaaagtagccaagccggctgtatcttttggggggaagtaccgaatcattgattttccgctgagcaactgtatcaattccggagttgacacggtcggggtattgacacagtatcagccattacgtttaaattctcatattggaattggagtaccatgggatttagaccggaacgttggtggtgtaaccattttacctccgtatgagcgcagcaaaggcagcgattggtacacaggaactgccaatgccatttatcagaacctggagtatatggaatcctataacccggaatatgttctgattttatccggtgaccatatttacaagatggattatgaggtaatgctggattatcataaagccaataatgcagatatcaccattgctgccatgccagtacccatcgaggaggccagccgtttcggcatcctgattacggacgagtctaaccgcatcacggaattcgaggagaagcctcctgttcccagaagcaacttagcatccatgggtatctacatattcagctggcctgtattaaaggaagctctgattaagatgaaggaagagccggggtgcgatttcggcaaacacatcattccatactgccacgcaagaggcgacaggatatttgcatatgaatataatggttattggaaggatgtaggtacgctgggctcctactgggaggccaatatggaactcattgatatcattcctgagttcaatctgtatgaggaatactggaagatttacaccaagaatgatgtgattccgccccagtttatttccaatgaggcaaatattgagagaagcattatcggtgagggaactgagatttacggcgaggtaatgaactccgttatcggagcaggcgtcaccgttgccaagggagccgtggtgaaggattccattataatgcagggtaccgtcatcggagcgggtaccgttgtgaacaaggccatcattgctgagaatgtaaggattggctctggtgtggaactgggtataggagagtatgcgcccagtacatatgaccccaaggtatatcagttcgatctggtgaccattggtgagaattctgtgattcctgacggggttaaggtaggcaagaacactgccatagcaggcgagacaaccgtaggcgattatcctgacggattactggctggcggaaattacattataaaggcaggtggcgtaaaatgagagcaatcggtatcgtattagcaggcggtaacagcaagaggatgcgggaactttctaataagagggcagtggctgccatgccggttgcaggaagctaccgcagcattgactttgcactcagcaacatgacaaactcccacatccagaacgtggcagtttttacacagtataattccaggtccctgaatctacacttaagttcctccaagtggtgggatttcggacgtaaacagggcggactctttgtatttaccccatccatcacaccggagaacggcgactggtacaggggaacagcggacgcattataccagaaccttacattcttaaaaaacagccatgagccatatgtggtcatagcggcaggcgacggcgtatacaagctggattataataaggtcctggagtatcacattgagaaaaaggcagacattaccgttgtctgcaaggacatggaagagggcacggatgtgacccggttcggctgtgtgaagctgaatgatgacggccgtatcacggacttcgaggagaagcccatggcatctgacgccaccaccatttcctgcggtatctatgttatccgcagaaggcagcttattgaactgctggagcgctgcgctgcagaagacaggtatgacctggtcaatgacattctggtgcgctataaaaatcttaagagaatttatgcttataagctggacggctactggagcaacattgcttccgtggattcctattataagacaaatatggatttcctcaaacctgaggtgagggattacttcttcaagcagtatcctgatgtatacactaagatcgatgatcttcctcctgccaagtacaaccctggcgctctggtcagaaacagcctgatatccagcggatgtatcctgaatggtacagttgaaaactccattctctttaaaaaggcatacgtgggcaacaattgtgtaataaagaattctattattttaaatgacgtttatattggtgacaacacggtgattgagaactgtatcgtagagagcagggataccatccgtgccaacaccacacacatcggcacaccggagaacatcaaaatcgttgtggagaaaaacgaaaggtatacattataatacgcacatagccccgcaaatcgcacggggagcgcagagcgggggaccggcgggataagacggaaggggtagaaaacatgcaggttacagacgtgagagtgagacgggttgagaaggaaggcaagatgaaagcaattgtttctatcacactggacaacgaattcgtcattcatgacatcaaggtaattgagggggagaagggtttattcatagccatgccaagccgcaaggcagcggacggagagtaccgcgatattgctcatcctattaattccaacacaagggatatgattcagaccatcattctgaataaatacgagacaaccttgctggagaatgaggcggcagcggatggaacggcataagatacagacagaataatgaacgggagctgttttccggataacgggaagttaaccgggacggctcctgtttttgtgttaaaaaaaccaaaaaacgtttggagtccccttaaaataagggggaatccaaacgttttggaattgtaaaaaccgccacacaggattttccgccccgtgtatgacagcagattgccggcgtccatctgttatgggcgtctctatattcagccccccatctgccttaatatactcctggccacgcttatgccatttgcggatgcctgctggagccctctggtgacggaggcgccgtctccgattgcccgcagtcccctgatactggtttcaaagtcagcattgacaactactttattggagtagaacttgacctcgacgccgtagagaagagtctcgtcgctggcaatgccgggagttaccttatccagagccagaagcatttccttgatatccgtcatgatacgatgggggaataccagggacaggtctcccggcacggcatccttcagagtgggaatcaggttgttgcggcagagacgctcctctgtggtccggcgtcctctctggaaatcaccgaaggtctgaaccatgattcttcctccgcagagcatgttggacagctgggcaatgtgcttgccgtattcaatgggttcgttgaagggcttggtaaagttcttgctcaccagaagggcaaaattggtattatttgtcttatactcctgggatttgtacgcatggccgtttaccactgcaaggccgttctcgtagtattctgtggccacctccccggaaggattagtacagaaggtgcggaccttgtcgtcgaaggtgggggtatagtataccagcttggcttcatacaggttctcgtttaagaacttcatgacctcatcccggacttccacacgcacgcctatgtccacagtgcctacctgggtctggattccatggtttccgcagatatgtgagaaccagtcagaaccctcccgtccaatggcggaaaccacctcaggcgcatagtaagtctcgtccttgtccgtgatgataccctttacggtatcgccctcaatgatgatgtccctgaccatggtgttgaattccatggtaatgccctgggccagaaggtgctcctgaagccgggtataaatcttatacccttcctcggttcccagatggcggatggggcattcgatcagctttaagttagcgccgatggctttgcggcggatttcctctatttctttttgtttgtcaacgccgtatacattggtgtcagcgccgaattttaagtagatgttatcagattcctttaagagttcaaccgttttatcatatcccaggatttccggaaggttgccgcccacatcgggggacagggacagcttgccgtcggaaaacgcgcctgcgcccgcgaagccggtggtaatggagcagggtttgcagcccacgcataccttggtggtacgctttggacagactctcttttcgatggggcgtcctttttctaccatgagaattttcatatcgggtttcttctggattaattcatacgcgcagaagatgccggagggacctgctccaataatgattacgtcgtaatttgtggatggattcataggaaaactcctttctttcactgcctgatttgcctggtttcatggcacaaaaaaaccagtatgcaaaatagaagcatgtagtcaactattccggtagctggtagaaacgttcatccaatcatgaacttatacaggcatcacaacggttatagtttagcatagtatgtggtgttatgcaagggcggaatatcttaaaatccattatggaataagggccggaaaccttaagaaaaaccaatcagacctttagaaaaaatttcataaatagtcagagaatagtcacggtatattaaggcaaattcaaagattattgtattctcttatgatatgatacatatatgagataagatgattccataatatatgattcagaagagaaagcgggtgaaagaatgaaggtgcgtacaggtatcaagtgggcggcagctgtaatgcttatggtggttctgtgtttcagcgtgacagtggccgtgaagggttacggattgtaccgggaggccattgacagtgtgagccttgaagataaggtggcgtccatacgtgccaaggaaaactacaccacctttgaccagcttcctgagatttatgtggatgcggtgctgtccgtggaggaccacaggttctataaccatccgggaatcgacgtgatagccattggaagggctgtattcaatgatataaaggcagggtcctttgtggaaggcggaagcacggtgacacagcagctggccaagaacatgtatttcagccaggaaaaggagctggtccgcaaggcggcggaggtcctggtggcatttgatttagagaggaactacagcaagaatgagattctggagctgtatgtgaataccatttattatgggaacggatattactgtgtgaaggatgcaagcaatggctacttcggcaaggagcctgaggacatgacggattatgagagcacactgctggccgggatccccaacgccccatcctgctatgcgcccactgtgagccaggaactggcagccagacgccagcagcaggttctggaccgtctggtgaaatgcggatattttacagaggaacgggctttggaaaccatggcggttggaagcagccggtgatgatgggaatatggcagccggtgatgacaggaatatgattggcagacggaggaaagctggaggaaagaaccttcatctgctttacattttaagcgtaatctgatagaatgatggaacggaaaaaagcgttagataccccatgtggtttgtatctaacgcttaaaggcgtgttataaatataggaatatggaaaatgcgggcaaatcataaaacgggaaggcaaagtgacggaaaatgagcggaatatgggagagaataaaagaacggctgggatttggcaggaaggcagaaggtgataaggaggatgacgaggtaatgtacatcattgcgggtttgggcaatcccaccagggagtatgaaaagacaagacataatgtgggctttgaggtcatagatgtgctggcagaccgtctgggcaccactgtggaggagaaaaagtttaagggatgttacggaagaggaatcatcggcggacagaaggtgctgcttttaaagccccagaccttcatgaacctgagcggcgagagcgtaagggcagcggctgatttctataaagtggatccggaacatattattattgtatatgatgatatcagcctggatgtggggcagctgcgaatacggaaaaagggcagcgcagggggccataacgggattaaaaacatcattgcccacctgggtacccaggagtttccgcgcattaaggtgggagtgggcgataaacctaagaaaatggacctggctgactatgtgctaagccggttctctaaggaggacagtgctgtcatggaggacgcgttccgggaagcggccggggcagtggagatgatgattattcagggcgctgacgctgcaatgaatcagtttaacggccataagggctgataaggggtgcagggataaaatggaaaatccattattggaattacaggagtatgataatctggttcaggcactgaaatccggaaagggaccgctgcaggtaacagggaccctggattcacagaaggtacatctgatgtacgagctgggagaggcaagcgcatttgcctggaagctggtggtgacttatgacgataccagggccaaggaaatttacgatgatttccgcagctttaccagtcaggtgtggctgtatcctgccaaggacctgctgttttacagcgcggacattcatggaaacctgatgaccagacagcggattgctgtgctgcgccgcctcatggaggacagggagggcgtggtggtcaccaccatggatggccttatggaccatctgctgccccttaaatatctgagggaacagtccatcacggtggagagcggacaggtgattgatttggattcctggaaggaacgcctggttgccatgggctatgagaggatggcccaggtagacggtatggggcagttctccatacggggcggaatcgtggatatatttccgctgaccgaggaagtgccggtgcgtattgagctgtgggatgatgaggtggactctatccgtacctttgatctggaaagccagcgctcggtggagcagttagagagtatcaccatttatccggcagcggaggtggtgctctcaggggaccagctggcagccggaatcagaaggctggaaaaggaagaaaagacatatgagaaggcgttaagggagcagcataagccggaggaggcccacagaatccataccatcatcgaggagctgagaaacggactggatgagggatggagaattggcgggctggacgcctatatccggtatttctgccctgatacggtttccttcctggaatatttcccccagggtgagagcgtaatttatctggatgagcctgccagattaaaggaaaagggcgagaccgtggagctggaattcagggaaagcatggtgcacaggctggagaagggttatctgctgccgggccagaccgggcttctccatcctgcggccgaggtcctggcccggatgcagaaaccgtttgcggttatgcttacggggctggaccagaagcttccgggcatgaaggtgaatcagaaattcagcatagatgttaaaaatgtaaactcataccagaacagcttcgagattcttattaaggacctgaccagatggaagaaggaaggctacagggttatcctgctgtctccttccaggaccagggccagcaggcttgccagcgacttgagggaatatgacctaagggcctattgcccggatgtgcgggaaacggatagcgggaacgggggaggagacagtaccggcagtccggattccgggaatccggttgctgtaaatgccgctgccaacaaggtccggccgggagagatactggttacctacggcaatctccaccggggatttgaatattctcttttgaagtttgtatttatcacagaaggcgatatgttcggcgtggagaaaaaaagaaagcgccgtaaaaagacaaattaccagggcaaggccatacagagcttcaccgagctgtcggtgggggattatgtggtccacgaggagcacggcctgggtatatataagggtatcgagaaggttgagcgggataaggtcataaaggactatatcaagattgagtatggggacgggggcaatctgtatctgccggccacacgtctggaaagtatccagaaatacgcgggggcggaggccaagaaacccaagcttaacaagctgggaggggctgagtggaataaaaccaagaccagggtccggggagctgtccaggaaattgccaaggatttggtgaagctttatgcggcgcgccaggagaaggccggattccagtatgggccggatacggtgtggcagagggagtttgaagaactgttcccctacgatgagaccgatgaccagatggatgccattgacgcggtgaagaaggatatggagagcaggaaaatcatggaccggctgatttgcggcgatgtggggtacggcaagacagaggtggccctgagggcggcatttaaggcggtccaggacagcaagcaggtggtgtacctggtgccgaccaccattttagcccagcagcattacaatacattcgttcagcggatgaaggattttccggtgcgggtggatatgctgagcagattctgtacgccggccaggcagaaaaggacgctggaggacctgcgcaagggaatggtggacattgtaatcggcacccaccgggttttgtccaaggatatgcagtttaaggacctgggactgctgattattgacgaggagcagcggtttggcgttgcccataaggaaaagatcaagcacctgaaggaaaatgtagatgtactcaccctgacagccacgccgattcccaggacgcttcatatgagtctggcaggcataagggatatgagtgtgctggaggaacctccggtggacaggatgcccatccagacctatgtgatggaatacaatgaggagatggtgcgtgaggcaatcaaccgtgagctggcaaggaacggccaggtatattatgtatacaatcgcgtgacggatattgatgaggtggctggccgcgtacaggctcttgtgccggatgcggtggtaacatttgcccatggccagatgcgggagcatgagctggaacggattatggcggatttcatcaacggggaaatcgacgttctggtatccaccactatcattgagaccggcctggatatacccaatgccaataccatgattatccacgacgcggaccgcatggggctgtcccagctgtatcagctgagaggccgggtaggacgttccaacaggacctcctatgcctttctcatgtataagagggataagcttttgagggaagaggctgagaagcgcctccaggccatccgggaatttacggaactgggatccggcatcaagattgccatgcgggacctggaaatccggggcgcgggcaatgtgctgggggcagaacagcacggccatatggaagccgtggggtatgatttgtactgcaaaatgctgaaccaggccgtgctggcccttaagggagagacattggaggaggattcctatgagaccgttgtggaatgcgacattgatgcatacattcccgtaagttatatcaagaatgaataccagaagctggatatctataaacgtatctccgccattgagacagaggaggagtacatggatatgcaggatgagcttatggaccgctttggggatataccgcacagtgtggagaacctgcttaagatagcggctatcagggctctggcccaccgggcatatgtgacagaggtggttattaaccgacaggaggtaaggcttaccatgtatcagaaggccagactccgggtggagaagattccggacctggtgaggtcctacaagggggatttaaaactggtgcccggggatgtgccttccttccactatattgacaggaggaataagaaccaggacagccttgagatgatggggaaggcggaagagattctgaaagatatatacgggatacgcatatagaggaccataaaaaagcagccaggactgtgatattgatatgctcatatcacagttctggctgcttttattttggaaaatcagactgtttgcggttatttacgaataccgtttacgccgcgcagcaccggcatgaccatggcccgtcctacagacatccctgtacataccgggttgccagctcaatgtaatacttttccggtttggtcagataacaccccttcagataggccatgcagcgcatccatgtctgccgcggacggacggaaaagtaggcgatgggggcttcgggctccacgtaggactggggaaagaaggctggacatatctgctgccgcaccatgttcaccacggtcctggtgctgacagattcaaacagaatcctgggacggaagcctgcttcctcaaaagcacggtcaatcatgtccctcattctggtctccctggatatcagggtgaagctgtcctcccgcaggagctttaaatctatctccggaaaggtccggaagctgtcatcacccgctagatgggcaagagggtgggagacaggaagacccaacaccataagctcttcacccatgtccacatattccaggaatgggttcttctggtttccaaaataggtaaggctggccatggtgacttccttctgaagtatcatctgttccatcttttttaccctggcttccctgatgctgaacgtgatattggggtatttttcacgaaaatacggatatatgcaggagaacatgagggaaccctgttccggagtataggctatggatatctcgccggcgttttcttctgtgatgtcgctgatgattttgtaggtctcccgtttcatgtccaccatgcggcgggccgtggccaggtaaatacggcccgcaagggtgggaatcatgctgtgttttctgcgctcaaacagcggagtacccagctccttttccagacgcagcagctgctgattcagggccgactgggtgagatacagcttttcagctgccttggatatgctctgttcctgttcgatggcaacaatatattcaatctggcgtaaatccatgggggctccttttgaacttaattatgttaagagattatataaaaatcaataagttgaaataagtcattacagtcattataatcaaaaccaataaagagttcaatggaaacgagaaaattatgttgaattctaacaatttaaaaaaggagacagaagcatgaagaaaagcgtattagggatgatattggcaggaatcatggcggtttcggtgacgggatgcggaggcagtgccgcaaaggacggtgaatgggccaagaatgtggagattcaggtaccggccaaagccggcggcggaaccgatgtgatggcaagggcattggctaacaaggtatcaggagagtccggttccaccatcaccattgtgaataatacggacggcggcggagtagtcgcgtgtgagaaagcatcagccggaaaaaaggacggctccaccctgacacagtggcatctgaccatgctgattaaaacagcagcgggactgtacgataaatcagccacagaggactttacggtcattggagtggcggttcccaaggacaaggccaacaatgtgctggtggtatccggcggttcttcttatcagaccctggatgatttgattggggctgcaaaggaaagaccgggtgaggtcatgttcggcgtggaaaccggcggaacggtacatatccagacagggctgtttgcaaaggcagcgggaatcgatgtcaaatatgtggaggcaggatccgatacagagaagctgactgctctggtgggaaacagcattgacgcctgttttgtaaatgcaaaccaggcaaagcagtatgtggaatccggtaaggccagagccctgggagccatctctaattccgatgagggcggacgcagcagcgtgcttccagaagtgcctgactttattgaacagggcgtggatttcagcttcaagatgctaaatgtggtcctggtagggccaaaggacatggattcggagctggcatccaggattcacgattactatgcatccgctgccaatgacgcggaggtggtaaagactctggcgcctgctggaatggagatggaatttttaagcctggaggaaggtgggagcaccttaaaggaaatgcagggacagattgacgccgtggtggaggaactggggcttaggaaataactggaatgaagacatgcgcataaggcgcatgatgaagaaaagcaggtataagcaatatcaggaaaggggcgagatgccgtgagaataaaaagagaccagataacaggcgctgtgttaatcctgttgggagccgtggtgttcctgatgaccactaccttttccacccccattacagccgcctatccagggccaaggatgctgccctccattgcggctttcggattcgctgtatgcggtctgggtatattggcggagagcaccttgagcaagaaagaacagaaggcatatatggcaaaagcaggatggatgagaatgggggcgtcccttattataataacagcttacatagccgccatgacagcggcaggttatctgattgccacaccagcagccctgtatgtgctcacaaccatgtttgcaggaggcggttcatccacccttaagggaaggctgctgttctccgtggcggtggcagtcatcatttatgtgatttatgtatatgccttcgggctcacactgccatcaggcatgctgtttgaataggagggggaacgtatgatagaatttttaccttatatcgccgggcagattacccagcccttcaatctggttctgatgtttggggcaacggtcatcggtcttatattcggggcaattcccggactttccggaactctggccgtcatgcttttcatgccgcttacatataccatgaatgcctcaagtgcagtggtattcctcatagccctatgggtgggcggatgttcaggggcatttatcggatccgtacttctgggaatacccggatctgcttccgcggtggcaacctgttttgacggttatcccatggcccaggcaggcaaagctggcaaggccttggccatcggcatggtggcatccttcctgggaacctttttcagcgccatactgggagccctgttaagccagaaaatagcagatattgcctttgccctgggtccgtgggagtatttttcactctgcttcgtggctataaccatggtattggccatttccaagggtaatatgtttaagggactggcttccgcgtccgtcggcctgctgtttgcctctgtgggatattctcccattgatgcagagcccaggtttgtgttcggcaatatgtaccttatgagcggtctggggatgaccattgtactgattggtatttttggggtggcccgaatcgtggaggaatacggcaagggattcggcgctatgccggacgtggacacaaagtcaatcaagggcctgggaatcacgttaaaggaaataaaggctcagtttgtgaacattgtccgctcctttggcattggcctgggaatcggtttccttcccggcatgggatcgggactgtccaaccttgtggcctactccagcgccaagaatggttccaggacgcctgagatgttcggtaaaggatgtcctgacggaatctgggcttctgaggtatccaacaacgcggccatcggcggttccatgattcccatggcagccctgggtattcccggtgattccaccacagcccttctgattggggcacttacgattcatggactggaaatggggcccatggtatttaagaacagcggaaatgtggtctaccttatgtttgccactgttatggtatgcgctgtgctgatactgattctccaggctctggggatgcgggtatttccactgattctcaaggttccgtatcactatatgtatccggctcttatcatcatttcctttgtgagcgcatacgtggattccggcagtttatacaaatgcggtatgatgctggtgtttgttgtcatcggtctgatgatgagctatggaggactgcccacagcgcctttgattttggcgtttatcctgggacctaccctggagagcaatatgctgaaggcatttcagtattcaggcagtgcagccgcattcttcacaagacccatatcctgcgtgctgatgctcataggaatagggtgcgtattttcgccaatgttttgcgcgctgcctgcgaaaacaaaaaatagtaaacaaaaggaggccaattaaatgccgcttaacagtacttcggccacgagccttcctccccagaagctgatggaacggtgctgccgcaccccctgggtcagttatctgccgccctttcggatggcgccgggcgtctattatgtgtctggcaatgactgggtggcctgctatctcattgatacaggagcggggctgattcttatagatacggctatgcatgagacatgctatctgatgttagaatgcatccgaagcctgggatacgacccaatggatattaagaaaattcttctgacccacgctcatgcggaccatataggagcagccaggaccatgaaggaactgaccggagccagagtttatctgggagagagggatttatttatgatacatgagcgtaaggatctgatttgcagcgacggatatacctgcggagatattgaaccagatgagatttacctggatgacaaacctattgtacagggaaatgtttccgtacgcaccatttccacgccgggacacacgccgggctgtacctctatgatatttgacgtgaaggagaaggacggcaggatctatacctgcggaatccacggcggggtagggcttaacaccctgtccagggagttcctggaacagaatggactgcccctgagccttcagaaggagttctgcgaaagcctgaggatgatggaccggcttcatgtggacatctgccttccttcccacaccaatcaggtgggaatcatcccgctgataggggagattacagatacccataatccgtttgtggatgagagcatctggcatgagctgatgcatgagcgtctggaccgcatggaggcccttattcggtccgttcctcttctttgatttcccagtgaatcaggaaggtaagggcggccctcagcacaatgattccggccacaattcctatttccttccactcacggaccactaccgtgcgcaggatttcgcttcccatcttgaattccagtcccatggccaggcccttcgccagataaatcttggtgtcgggggacctgcggaggaatttaaggaagcttgtaagacctgagtatatgatgatacccacgccgataaattcaaaaataatgattgcggtgtttgctgccagagacagcagccattccaaatgttccatggatttgcccctttcttttacttgctgaccggcatctgaatggattttacctttacaccgtccaccttacccaggtcccctgcaaaggagctgatttggttctgggttccgtgcagaaccacgctgatgacggagaccccgtaatcccggcagggaacacccaggcgggcaataatcagaccggactgaagatggaatttttcatttaccgttgccacggagccgggattgctgataatgcagctgatgacagccagacggtcttccataaagtatgtcctcccttattgttttctacccggctggcttctgccgcagccagatacatgcttttgcgcgagccggagttatctgtggttatgatatcacgggcatcggcctttcgtaaagcccaaacaaggcacagaacaagataattttttaacccttgctttttccctctggctggaatatgatgatagtaactaaatagaacctttctctgatgcgaagcaaccctgagataaagagagagcggaactgtcccggctgtgcgggaaccggtttgtgtggtttgtcagtgcgtgccgtgtgccggcatggctggcataagtcacccatatgtgcctgccggtgaagccgtggtatgcggatgatatcctctctctgaatttcagagagaggtttttgtatgttagaacaagaggggaaggaaaaaacatgttaaatatagcggtttacggaaaaggcggaatctgaggcgggagggcctgctccgggcacccgggtgctgtccgtcccgggagccaacggcgcgggaaagaccaccctgtttggcccaacaggtgagatactgagcgaggaacatctcaatgaggcgtttgtggtggagttcagactgtatccgttaacgttgaggaacaggacatatacctgtgtcctgcctttgggattaaaagaaagaatggaaagaggtgcatgatggatcgggtgattacgctggtggataaactggccgggtcccgtatgctttccggggaggaatttattttcctgcttgataacataggggaggaagatgacgcatatctgtatggaaaggccagggagtcagcgcttgctaattacggaaataagatatatgtccgggggcttatggagtttactaattattgtaaaaacgactgctactattgcggtatacgcagaagcaaccagaaggcttcccgctacaggctgtcaccagagcagattatggagtgctgccgtatcggctatggactgggatttcggacctttgtgcttcagggcggcgaggatccgtggtttacggacgagaagattgcgtatctggtagagcgcattaaaaagcagtatccggactgcgcggtcacactgtctgtgggtgaaaaagggtacgatacctataagcgctggtttgatgcgggggcagaccgctatctgctccgccacgaaacagccaacccatgccattacgccagtctccatccgcctcagatgtcttctgagcacaggaaggaatgtctgcataacctgaaagccattggctatcagaccggctgcggaatcatggcaggctcgccgtatcagaccacggcccatattgcccaggacctggaatttatacacggccttcagccggagatggtgggaatcggtccttttatcccgcatcacgataccccctttaaggacaggccggccggaaccctgcgccagacccttctgctgctggccattgtacggctcatgctgccggatgtgcttctgcccgccaccacggccctggggaccatagagccggatggaagggagcagggagtgatggcaggggccaatgtggtaatgccaaacctgtctccgctggaagtaagaaaaaagtacatgctctacgacaataaaatcagcacaggcgtggaggcggcggccaatattaaagaattaaaaaacagaatggcgtccataggatacaaagtggtcactgaccggggcgaccacaaaaaaataaaaagcagtccctgcccttaaagcctcatatttactttgaaggttactttaagtataaattcctctgttttacagatactacatttacgggcaacaaagaagataaatgacagaaagtaaaatggaggaattttgtttatgaaagctacaggaatagtcagaagaattgatgatctgggccgtgtggtcattccaaaggaaattcggaggacattgaggctcagggaaggtacgccgttagagatattcacagacagggaaggagaaatcatccttaaaaaatactcgcctatgatggagctcacctcatttgccgtgcagtatgcagaggccatggcacagtccaccggccttttcgtatgcatcacggacagggaccaggtcatagctgtggcaggaggggccaagaaggacctgctccagaaaaatatcagccgccagctggaacaggccatcaatgagcgcagtactgtcattgctgccagggaagacaaggctttcatccagttagtggacgaggaactggagggaatcagcgcacaggtggtggcgcctattatctgcgaaggcgacgccattggtgccgtatctctcatgagccgtgagccaagggccaagttcggggacgccgagatgaagctggcatccacggctgccgggtttttgggacggcagatggaaggttaaccgttatatatggaattttcagtggtatcccggcatggggaagcgttatcgcggccctgtgccgggatgtttctgttttccatccgtattctgctgcgtcagccactccgcaaaataaggtttaatgacgctgaagggagccgggcctatatccagcaggaagcggttaaattccatgttggtgtagcggcttccaaggttttttttggcctcgcgctgcatgcccaggatttccaggtagcccacataatactccagataattggccggattctccgcaatgtcataatagatggtggtaatgacagaggaatcgctgatgcggaagtagtggtttaagtaatcctccacctgcctgatgtcccagccctcatagtggatatttacatccaggatggcgtacagggcaagggtgaaggcggcattgtgccggagcagctctcccaggtccgggtccagtccgttgttcaggctgtaggaatagtattccacataggtggcccagccttctgaatagctgctgaagctcaggagcttacgcaggttacaggtgttatgtttgttgaaatagagagtttggtacatgtggcctggataaccctcgtgggccagggtggagtacaggttcctggcggtgttggtgcttccgttgttgatgtagatggaattgtcctgggggcggtcaatgggcacggtcaggtagaaggccgggctcagagtggcttccagggcagcgggtacatttttaatgctgcatgtgtaatcctcgatggccgggaagtccttcgcgcactgttttctcaggtcctccagaatctggttggggtcggtgagggcgaaggagtaggagtacagttttttcgccaaggcgggattttcagtcagcagctcatccatggcggtcaggtcatccatcatctggccgctcatggcttttttcagggccgggatatcctgataggaagtgccggtatacgaattcaccaggtactggtaatatttcttgccctgggggaagtaatacagccccttatcgttggttccggttcctttcaggggagtcagtccctcaatcagcctctggtatgcaggcacgaagtgttcgtcaatggcagtatggttcctggcaatgaaatcctccttttcctgctttgtcagtccctccacctgctccagacgctccgcaaatgtttctgccatgaagctgtggtccgcatccagaagataggcgttgcaggatttgaggatacggtcgatgaccgtgtcgcacagccccagtccggcatcggccttttccttttcaaaggcgatgatgctgtcatagtaggtgtcaatggaggatagcagggaaagataatcctctacgtcctgtttattgtagaatacatactcggacaaaagtatgggaagctgcgcctgtatgcccagggaggaggaaagaggctggtcgtagagctccagaccttcgctgtccaacatggtatttaagtaggataacaggatattgtatgtgagcagctggtcctcacggagcaggcggctgtcaatatcatttaattgtactttcagggatttggcatcattaagagcctgtttactgtcctccagggatacggtccccagggttttatcgtagtcagtgatgccgtaggcggccggattggccagggtgtagtgaagcgtgataagggaattgtcaacttcgtccaggaacaggccgttggtcagctggtcaaaggacgcctgggcatcaatggtctttttctcatattgttcataggactggggactttcctgtgcagcggattcctttgccaaaggagcggaagcctgaggacgcgcgggcgccacgcatccggctgtcaggcagataaccaggagcagggataaaagatattgtaaaaatatggtttttcgttgtctcattctaaacaaatcctccattggggtgtctgttctgttttgtattacgacattatatagtatatgagcggaaattacaacttatgagcagtgaaaaaactggcagggccttccaaagagggaaaaaacagggggcacgtcttgacgaacatgggggaaacgcttatacttaaaactattaaaataagcggattgggcgctgcggccgccggagcatttttaagaactgctctgccccggcccttagcttccgctcagaaaaagagggaattaatcatatgtgtcaggattgtaaaaaaacatattatattaccacggccattgcctatgcttccggcaagccacatatcggtaatacctatgaaatcattctggctgacagcatagccagatataagagggagcagggatatgacgtgttcttccagacaggtacggacgagcatggacagaagattgaggaaaaggctgaggcatccggtgtgactcccaaggaatttgtggacaaggcagccgctgagattaagcggatttgggatttgatgaacacttcctatgataaattcatccgcaccacggaccaggaccacgaggcccaggtgcagaagattttcaagaagctttacgaccagggcgatatttataagggttattacgaagggctgtactgcactccctgcgagtcctttttcaccgaatcccagctggtggacggcaagtgtccggactgcggacgtgaggtaaagcctgccaaggaggaggcatatttcttccgcatgagcaagtacgcccccaggctgatcgagtatatcaatgagcatccggagtttatccagcccgtatccaggaagaatgagatgatgaacaacttccttcttccgggacttcaggatttgtgcgtgtccaggaccaccttcagctggggcataccggttgattttgatcccaggcatgtgacctatgtatggctggatgccctgaccaactatatcaccggtatcggatatgattgcgacggcagcagtacggatcagtttaagaagtactggcccgctgacctgcatctgattggaaaggatatcatccgtttccataccatttactggcccattttcctgatggccctgggcctgccccttcccaagcaggtatttggccatccatggctgctgcagggcgacggtaagatgagcaagtccaagggcaacgtgctctacgcagataccctggtcgacttttttggcgtggacgcggtgcgctatttcgtgcttcacgagatgccgtttgacaatgacggcgtcatttcctgggagctgatggtggagcgcatgaactctgacctggctaatatactgggcaacctggtgaaccgcactatctccatgagcaacaagtattttgacggcgtggtcagtgataagggcgcctgcggggaagtggacgaggatcttaagaaggtagtactggaggaagtgaagaaggctgatgccaagatggagcagctgcgtgtggcagatgccatgacggaaatctttaacatcttcagaagatgcaacaaatatattgatgagaccacaccctggacattggccaaggatgagagccagaaggacaggcttgccaccgtgctctataacctgacagaggccattgccatcggggcatccttactgtattcctttatgcccgagacgtctgaaaagattctggcgcagattcatacgggcaagcgtgagctgtcccggatggatacctttggactgtatccaagcggacagagggtgacggataagccggagattctctttgcgcgcatggacatcaaggaagtgctggaaaaggtggaggccatgcatggggcagaggccgctgcggaccggaaccaggcaggcggtgaggaaggagcgtccggcagcgcagaggacagcggcattgatttggaggccaaggcggagattacctatgatgattttgcgaagcttcagtttcaggtgggagaaatcatcaagtgcgaggcggttccaaagtccaagaagctcctttgttcccaggtaaagattggaagccaggtgcgccagattttaagcggtattaaggcttactattctcctgaggagatggtgggcaagaaggtcatggtagtgaccaacttaaagccggccaagctggcaggcatggtgtccgagggcatgattctctgcgccgaggatgcagagggcagcctggcccttatgacgccggagaagagtatgccggcaggagccgaaatctgctgataggaatacagacagagctgcggatattggcccggcaggagccggttgtctgccgctggtacggaagctgtgagacgtaaaaaatatggcaggagcgggcggtatgacctgctcctgtttttaaattaagtgtattttgtatgtttaaggagaaatggaggggattatgaggatactgagcataacagcccagaaaccccacagtacggggagcggtgtttatcttaccggcctggtaaaaggttttgctgcactggggcatgagcaggcagtggtggcaggggtctataaggaggacgagatacattttcctgaagggacccggttctatccggtatattacaggacagaaagcctgccctttcccatagcggggatgtcggatgagatgccttacgagagtaccatatacagccagatgacagaggatatggtggatgcattcaaacaggcgtttctggagaaaaccagggaggcagtggaatgcttccggccggattttattctgtgccatcatctgtatctgctgacagccgtggtacgggaggcgtttccccaatataaaacagcggccatatgccatggcacaggcctgcgccagataaagaaaaacagtcttgaacgggaatatattctggctcacataaaggagcttcataaggtgttctgccttcacagggaacagagggaagaaatcagccggatatacggcgtgcccggagagcggctggaagtgattggaagcggatttgatgattccattttccgttttacgccggttaaaaaggatgatggagccaagcggctgatttacgctggaaagctgtcggagaagaaggggatcatgagcctgctgcggagtcttgcgtatctggaacagatgcaaagacaggatggggagcagcagaggcaggcagcggggcagtctgcggagcctgtgaaaattgaggtatggctggcaggagggtatggtaaccagctggagtatgaaaccattaaaaagctggcggggcagtcaccctacccggtgaaatttctcggcaggctggaccagccccggctggcagaacggatgaatcaggcggatgttttcgtgcttccgtccttttacgaggggcttcctcttgtggtgatagaggctctggcctgcggtttacaggtggtctgcacagacctgccgggagtcaggccctggctggaggaaaatatcggaacgtgtcccgtgaaattcgtgtccctgcccgccattgtgaatgcggatgaaccggttgaacaggagctgccggagtttgaacggcgtctggctgaggctataggcaaaagtctggggatgaacggcggcagcttggggacggatggcggcagcttggagacggatggtggtgggctgagtacgcacggcggggaaaatatgactgccgcgggcccgtcaatggcttcccttccgccggatttgagccgcatatcctgggcgggcataagcaaaaaaatattagaatcctgtaattttatataaataccccaaaatttggatgaaaatgggagtatcatactctgtatcctggaaaaatcaacctaaagtgggagaaacttgaaatttttgccattttggagtatgatgaaaggaaattaaaacatgagggggctaaaaagccctaaagagggtacgatatgggtagaggacgcagccgcgggccatacggcggccgccggcaggggcttacgggaaaccagctgaagattctgggaattgtggcaattctaattgataatatcggcgctgtggtgattcagggagggattcttcatggaacagacagtgctctttatcatggggtactgctgacgccttccgggcattactgggtgattgcgggccaggtctgccgttatgtggggagactgggatttcctatcctggcatatctcacaacagaggaatttgtgcgtaccagggaccgacggtggtacgccgtcaggatgctcctgtttgccctgttatccgaagtgccctttgatttggctgtgtaccacaccatgttttatccccactatcagaatatgatgtttaccctgtttgcgggggtactggttatggctgtcatggagtccacccgaaatccgggtctgcaggcaggagccctggcagcgggatgcgcgctgtcatgggtgctgcagtttgattacaatgtggtgggagtcctgttcatagctgccatgtactggttccggcgcagtgatacggcccaggtggttgcgggagtgggaatctgcgcagtggagagcatcagctgctattgtgtgtcagccctgtcctttgtgccgattgtattgtataatggaagacggggggcatttcagcttaaatatatgttctgcgtgttttacccggtgcattttctggtgctgtacggtgtgagcatgtggattgcaaaaggagtttagaatcatgatatttgatacacatgcccattatgatgatgaggcatttgacgaggatcggccggaacttctgggacgtttgcaggaagccggcgtgggtgcggttatgaatgtagccgccagcctggagagctgccgcagtaccctgaaactggccgaagcctatgactggatatatggggccatgggagtccatcccagtgagacgggggagctggaccaggagggccttcagtggattaaggaacagtgcggccgccccagggtaaaggccgtgggcgaaattggcctggattactactgggaggaaccggcccacgatatacagaaaaagtggtttgaggcacagatggatttggccaggcaggtaaagcttcccttaatcatccacagcagggatgccgcaaaggataccctggatatgatgaaggcggctaaggccggggagatcggaggtgtcgtccactgtttttcctacaccagggagatggccagagagtacctggacatgggatttttccttggaatcggaggcgtccttaccttcaacaatgccaggaaactgaaagaagtggtggaatatatacctctggagtccattgtactggagacggactgtccctatctgacgccggtccctaaccggggaaagagaaactcatcccttgagcttccctatgtggtggaggctgtcagccggctaaagggagtggacccggaaaccgtcatgaaggccacctgggaaaatggaaaaaagctctaccggctgtaggctgaccgattatgggaagcagagttgataaataaacaaaaagcgctgtaatgtacgatatacagcgcttcttttttgcctgttcttttgcccgggcattgacttttgcacgggaatccattactcttaaaagagggccgaatccggtccgcagaaaggaaattataatacatggcgactttgggtaatccgaaaaataccattgaaatcatacagaaatatcaattcgcattccagaagaaatttggtcagaatttcctcatagatacccacgtgctggacaaaatcataagcgccgcagggattacaggggatgactgtgtgctggagataggaccgggcatcggcaccatgacccagtatctggcggaacatgccggaaaagtggttgcggtggagattgacaccaatcttctacccattctggacgaaactttaaagggctattccaatgtgacggttatcaacagcgatattctgaaattagacatgaataagctggtggacgagtataatgatggaaggcccgtcaaggtggcggcaaaccttccatattacatcactactcccattatcatgggattgtttgagagcaatgtacccattgacaatatcactgtcatggtgcagaaggaagtggcggaccggatgcaggtggggcccggctccaaggactacggcgcattgtccctggcagtgcagtactatgcaaagccttatattgtggcaaatgtgccgcccaactgctttattccccgccccaatgtgggttccgctgtcatccgcctcacaagatatcaggagccgccggtgcaggtggacgagccaggtatcatgttccgtcttataagggcctcttttaatcagcgcaggaagacgctgcagaacgggttaaataactctccggaggtaccgtatacaaaggagcagattgcggctgccattgagagcctgggagttcccgcttctgtcaggggggaggctctgacgctggagcagtttgccagcctggctaattactttaccaggacagcgggaaaggaagccggcgtttcataatgtgacgccgggaatacaaaaaccggggcgcggtgtatttcatgcggataaaggggaataatcctggaaggacaattatctgaattatcagagaaattatatataaaacagaaaggaaggtaagttgatgaacaagaaagtgggtaaaatcctgacagctgcggcagcaggagcagttgtgggcgtggcagtgaagaagctgcaggacggccggaaggaaaaggaagatgagagaattgccgccattgaggaagcggtgatgaataaccgggattacggtgacaggaaagcttatctggtaggcggaggcctgggcaccctggctgcggctgcgtatctgatccgggactgcaagttccctgccaaccagataacggtttacgagggcatgcacatacttgggggaagcaatgacggtatcggtacgccggagcaggggtttgtatgccgcggcggacgtatgctcaatgaggagacctatgagaacttctgggagctctttggttccattccatctctgcgtcagcccggacacagcgttacggaagagattctggagtttgaccatgcccatcccacctgcgccaaggcaaggctggtggataaggacggcaacattctggatgtgaaatccatgggatttaaccaggctgaccgcatggcccttctgaagctgctgatgacggacgaaaaaaagctggacaacctgaccattcaggactggtttaaggaaacaccccatatattcgagactaatttctggtatatgtggcagaccacctttgcattccagaagtacagcagcctgtttgaattcagacggtatatgaaccgcatgatttttgagttcagccgtattgaaacgctggagggagttaccagaactccgttaaaccagtatgacagtgtgattcgtcctctggagacttacctgaggaaggccggcgtcaacttccgggaaaactgtgaagtgacagatatagattttacggacggccccggaattacggctaagaccctgtatctgaagaagaaagtggagagcgcggatgactcaggcgaggaagcagacgctccggccgagacttcctatgtgacggaggaagttcagttaaataagagtgatatctgcatcatgaccaatgcgtgcatgacggacagcgctaccctgggaagcctttacaaacccgcgcctgctcctgagaagaagccaatcagcggcgaactctgggcaaaggtggccggtaagaagccgggactgggaaatccggagccgttttttaccaagcctgaggagacgaactggctcagctttactgttacctgcaaaggcgatgatatcttaaagaccattgagaattttaccggcaatgtacccggcagcggcgcccttatgacctttaaggattccagctggcttatgagcagcgtggttgcggcgcagcctcatttcgtgaaccagcccgccgaccagaccattttctggggatatggactgcacacagaggccataggcgattatgtaaagaagcctatgaaggattgtaccgggcaggaactgttaaatgaatatctccatcatctgcatattccggaggacaggattgcggagctgatgaagacggtcatcaatgtgattccctgctatatgccttatgtggacgcacagtttgagccgcgcaagatgagcgacaggccgccggtgattcccgcagggtccaccaactttgcgatggtgagccagtttgtggagattccggaggacatggtatttaccgaggaatattccgtgcgggccgcgcgcattgcggtttatggccttttggatgtaaagaaaaagatttgcccggtgacgccttacaacaggcagcctaagattcttttgaaggcgcttaagaaatcatatctgtagtgggcataaccatcatatgattaaatattgggccggcttttgccggcccgcacttttggaatacatgcaggataggagataacaccaatgatatttataggaggaatcagccagggacagaaaatactggattatgtgaaaactgtcatatgtgaccggtgcggcggatacggacgctgccaggtatacatgacctatatgtatttcagctttttcttcatccccctgtttaagtggaacaagaggttctatgtaaagatgtcctgctgtgaggctgtctatgagctggacccggaggtgggaaaggcgctgcttcacggccagcaggtggatataaaaagttccgacctgacgctggttcaggaggggcaccgcaggggatattatgacagcggggcctataagacctggaaaaaatgcggcaattgcggatatgaaacagaagaagattttgagtactgtcctaaatgcggcaggagactgtgacggacggctgtgtgcagacggcaggaggagagaaaacggtatccacaactgatatgaggccaaaccatgcgtctgtataagatgcggccgtactctgttaaattaccgggcgcggattgaaacagcctgctgtaattttttaaaattcggcctagctattgagcttccggtatagtataatggaatcagcctttacgggcatctgatatttggagaggtgttggatgctgcaatggttagcagccattgcataagagaaaggatgggaaaatgacggaaaatcagaagatggatttgatccttcagaagttaggagggatcgagggaggccttgcctcggtaggagaagatgtgcggttgctgcaaggagacgtacagtcgctcaaagaggacgtacagtcgctcaaagaggacgtgcagacactcaaagaggacgtgcagacactcaaaggagacgtacagtcgctcaaagaggacgtacagacacttaaagaggacgtgcagacacttaaagaggacgtacagacacttaaagaggacgtacagtcgctcaaagaaagggtaacaaacatagagattaccctggaaaatgagacaaacaggaatatccagttggttgcggaggggcatttgaacctggaccgtaaactggatgaagctttaaaggaattacatcctaacaccatgtatcatttaaaggtgaatcacctggacggcgaggtcaccaagatgaagcgtattttgaatatggcataaaacagataccaggattgaatgccgtagttcaaacctcacggttcaaatcataacaatttcagcaaacaacagaggattttgcaaggcaggcagccgccgcattgcagaatccttttttcatatgtgttcagccctccatataagccatatccattgccgcatacgggaataaccaggaaactttacctgtttttacctccattttacgcgaacctgcttttggattttacctgaataatttagaatctatagatagatttgcaagagagaaaggaacgtaaatggcggatatttcactggtaaatgtatgtaaaacctataaaggcgggcaaaatgcggtcaaggattttaatttggatatcaaggaccgagagctgattatttttgtagggccatcgggctgcggaaaatccacaacgctgagaatgattgcgggacttgaggatatttcctcaggggaattatggatggatgactgcctgatgaacatggtcgagcctaaaaacaggaatctgtccatggtatttcagaattatgccttatatccccatatgacggtgtatgagaacatggcctttggactcagggtacgcaggattccgtcaggagaaatcgatgccagggtgagggaggcagcacgaatcctggaaatcagccatctgctggatcgcaggccggctgcattgtcaggaggacagaagcagagagttgcaatcggaagcgttattgtgagaaagccaaaggcctatcttatggacgaacccctgtccaacctggatgccaagctgagggcccagatgagggtggaaatcgcaaagcttcacaaacagcttaacgccaccatcatatatgtgacccatgaccaggtggaggccatgactctgggtacccgtattgttgtcatgaaccggggaatgatacagcaggtagcgcctcccgcagagctttaccggaatcctgtaaataaattcgtggcgggattcataggttcccccaccatgaactttctggatgtggatgtgctggaagaggatggaacagtctggcttctgggacaggggtggcggcttcctctggaaggatatcaggccagcaaactgaaagacaaagggtacacgggaaaacggataaccctgggaatcaggccggaagatcttcatcaggaagaatgcagcgggaaaaacggttccagtggtttgaacggaaatggcagcgggtggattggagcttacataagtgtcagggaaatgctgggaagcgaggtgcttcttcacgggaatacaggggatacgggacagctgtcggccagaatgccggcgtcctgccgggtgaagccgggagaatttctccgtctttacgtggatatgcctcaaattaagctttttgacatacagacagaagaaaatattttatttgattaggagacagtgatgaaatcagattcattattaaaaaaggcagggccttatggatatattttaccggccctcctggtgtttgccgtattcctgttttacccgtttttcaagaccatttacctgagtctttataagacaaataaaatggggcaggccaagctgtttgtgggactgggcaactatgtggagctgttcaagtcggcttccttttataacagtctggcagtgaccttcctgttcgtggcaatcgtggtggtgggaagcatggccctgggactcctggcagctgtactgtgcaataaggcatttccgggaatccgtatattcagcacggcgtatgctctgcccatggccatcgcgtccagttccgcggccatgatatttaaaatcatgcttcatccttccatcggcattatgaacaagctgctgggactcaatatcaattggatcaatgctcccaaatacgcgcttgtatgtgtggctctgctgacagcctggcttaacagtggaatcaacttcctgtatttcagcgccggactcagcaatattgatgataccatctacgagagggcatccgtggatggggctaacgggattcagaaatttctccggctgacgctgccgggcctcagcccaatcatgttttataccatcgtagtgaatatcatacaggcattccagtcctttggtcaggtgaagatactgacccagggcggaccgggggaatccacaaatctgattgtgtactccatttacagggatgcgttttttaactacaggtttggcagcgcggcggcgcagtccgtcatactgtttgccatcatcatggtcatgacgcttttgatgtttaaggcagagaagaaaggagtcagctattaatggaacagacactggccataaagggccgcggcagggtcagccgcgaggaaatcattaaaatacaggaggaagccaaccgaaaagccatgactgtaaggagagtcaggaccggagccctgattgctgccaatgtgctggtatcccttttcattcttctgccgctgctgtatgcggtcagcgtggcattcatgccgcctggcgaactgttcaccacggaaatgaatctggtgcccaggcagcccacgttggacaatttcaggcaggccctggtgaaaataccgctggtgaggtttgtgtgcaactcctttatcacagccggactgataacagtgggacagattatttcctgttccctggcagcgttttccttctccttcctggagtttaagggcaaaaacgtacttttcatgctggtaatggccaccatgatgattccgggagaggccaccatcatatcaaattatctgacggtgagtcagtggaactggctggattcctatcaggtgctgattgtgccctatcttacgtcggcaatgggaatctttctgttccggcagttttataaatcatttcccatctctttgtacgagtccgcaaagatagacggctgcggaaatctcaggttcattttttgcatcctgcttccgcttacaaagtcggccatcggggccatggcggtgtatacctttatcaatgcctggaacatgtatatgtggcctttgctggtgaccggatccaacgaaatgagaaccgtgcaaattggtatcagcatgttaaacagcgtggacgcccagtccattaccttgatgattgcaggcgtggttatgataatcctgccgtccatttccatctttatattgggacagaaacagctgatacggggcatgttctcaggagcagtaaaaggttaggcacacccggaaaagtttatggaatcaaatgaaataagaataaattataaacggaggaataacaattatgaaaaagagattaatcggttatgctgcagctttactggcagtatccatgctggcagggtgcggtgcgccggcggcgggcacgggcgctgccgctgacccgggctcccggtcgggcgcatcccagccgggtacatcccaggcagatggttctcaggcaggcacatctcaggcagatggttcccagacagatgcctttcaaaatgcaggcgcagagggcgcgtccatcaccttctggcattccatgggcggagtgaacggagaagcattggagtatctggttaataagtttaattcagaaaacaccatgggaatccaggtggaggcccagtatcagggagagtatgacgatgccatcaacaaactgaaaagcgcccagattggcaatatgggtgcggatttggtgcagatttacgacattggaaccaggttcatgattgattccgggtgggtggtccccatgcaggagttaatcgacgcggacggatgggataaaacacagattgaacctaacatcgccgcgtattatactgtaggtgacaccttatattccatgccctttaactcatccacgcctttgctgtactacaacaaggatatgtttgacaaggcgggcattactcaggcgcctcagagccttggggagatcggccggattgccggtgatttggtgaacaagggcggggccggagaacctatatccctgagcatttacggttggtttttcgagcagtttacctgcaagcaggggcagaattatgtaaacaacggaaatggacgaaaggcagctgccacaacagttgaatttgaccagaacggagcgggagcaaagacactggcggcctggaaggaactgtacgacaagggatacgctcccaatgtaggcagaggcggcgacgcgggactggcagatttcagctccggcaagtctgccatgacccttggatccactgcttccttaaagcagattctggaagacgtaaatggcaagttcgaggtgggaaccgcttatttccccatggtcagtgacagcgataaaggcggagtgtccattggaggagcctctctctgggctctgaacaatgaggatgaggctaagaaggccgccacatgggagttcgttaagttccttgtttcaccggagagccaggcttactggaacgctcagacaggatatttccctgtgactgtgaaggcccacgaggaacctgtatttaaggagaatctggaaaaatatccccagttcggtactgctattgaccagcttcatgattccactccccagtcagcaggcgctttgctcagcgtatttcctgaggccaggcaggtggttgaaacggagatagagaacatgcttaataatggaaccagccctgatgaggctgcgtctaagatggcgcagcagattaataaggcaatcgaggaatataacctgctcaatgaatgataatcatggatcggagggtatactgagtatgaagacacagatttgggcccacagaggcgcatcggcttacgcgccggagaatacactggaggcattccggctggcagcggaaatgggagccgacggggtggagctggatgtccagttaagcagggacggtgagcttgtggtggctcatgatgagaccatcgacagggtgagcaacggcacagggtatataaaagattataccctggcccagcttaaggaactgtcctttaacaggctgtttcccgcctttaaggaggcccggattcctacgcttttggaagtctatgaattgttaaagcctgcgggactgacggtgaatgtggagcttaagaccggcatcatactctaccctgagattgaggaaaaggtactggctctcactgcttccatggggatggaggacagggtgatttattcatccttctgccaccccagcctggtaaggcttaaggaactgaacagcggccttaagacagggcttctgtactcggacggctggattggcgcggcagactatgggcggcgtacagtgggggtggatgccctgcatccggccctgtaccacatgcaggatccggatcttatcccggctgccagaaggcagggactggcagtgaatgtatggacggtcaatgaagaaccgcatatggaaatgctggtgcggcagaaagtggacgctatcattactaaccggccggacctgtgcaggcgggtcgttgacaggtacacagacctatgacagaatatttgacagaaagcaggcatatatgataagactggttgcaattgacatggacggcaccctcctgcgccctgacgggcatatttcagagaggaatgtgcgtgcgcttaaaggacttaaggctatgggagccgagtttttgatttgtacgggacgcagctatatagacgcattggagcccctgcaggaggccggactcagggcgcctgtggtgtgcatgaacggagccgctgtgtatgattgggacggcaggctcatggacgagatacggctttctgagagacaggtagggggaatcctggactgctgccaaaaggaggacattatctttgatttcatgacggacagaggcagctataccacagccggggaggcacagtttagggcatgttttgaacggaatgtgctgcttcccatggcggagtttacctatgagggagtgagagaccggttctcctttgtggaggaagaacggctctttgagctgggtctggcattttataaaatatcggtcatccatgaatcgcaggaggttctgggcagaattaaggagcgcctgtccggtatagcggaactggcggttgcgtcctcctttgccaccaacctggagctgacccacagctatgcccaaaagggccgggctctggctttttacgcagcctccaggggcgtgagaccggaagaaatcatggccataggagacagcgagaatgactattccatgttgtccatggatataaaatatacagttgccatgggaaatgccatggagagtattaaacgcaccgccaaatgccagacccgttccaatatacaggacggtgtggcatatgccatagagaccctggtccttaccagggaggccagggcatattaagccctctaagtgacgggtgtaaaaataattcaccggtcataagtaaagagccgcaggctctttttttctttctaggaaacttcatgctgcaatgcggtcacatcaaaacactgcggagatgtgaaagtatgctgtaattccagtataaaatcttcaatttctttacaggtttcggcggcggtggtttagcaactgccagaactccgccgacggctctggctgtggggcgttgtctttgcataactgccgcataaattccgctacggacagaccgcaagcggcagcatactgctataatttttggctttcttcttcgttcagtcggacggtaacaggaatgttccgcacattcttttctgatttttctctgctcaatttttttaatcctccagtcttgaattttcttttaacggggattttgggcaaatgttatagtatgccctgtggacagatattttattcggtaaggaatagagctaataaaccgtgattgctggatagtttttcaatattgtatcttctctaattttgtcaggggttttattgctgcaaacaggacagtgtatccattctgtttgataagcagcactcatatttatcttacttcccaatcccaaatacttaattgcctactatcgttcttttcttcaaagaaacgcaaatagaagccaaagccatgctcatatattaagttcagagcctttctgacatttcctatttccaattctaatggaatatacgggtcagtcatagagcctgtgcctatcatacatttcttgcgtttatgagtaagagcatactctaacaagtcaatcgcattttctttgacttcaatatcttcaaaagcgtgttccatgtgatagcatttgcttctggagtcacaataaatgcacccgtgagagcagccccggtacaaattaattccatttttagcagataatattccttttgccttcacaaagtgcatgatatgtccttcctacattttggcgcagtttttcctatgtgctttcaattttttcattgcccaatcataatgacttgcagtagcgctgacaaaataagaaccaagcgtacttccgcctacccatttataaacgcctttagaaaataattcctcatttgaaaaggtttccgccagcttcattacttcgttatgggattgctggaacataatttttgcatcctctaacgatgtggactggtgttttttccaaaactccacattcatatctccataggttttccaattataaggctctggaataaacggtttattatcgccattctgattggaatatacccagtttaacaaaagctgatgccattcatagagatgaatgaaaatatcacgaagatttttatctcttttccaatgagcttctttctttttttcatcacctgaaaaatcaaacgaagttgataattctttttctgtcagctcagaaacaagagtatttaacttttcataattagcggtagcggctgttagtaaatctgtttttgctgttggtctgcccatattcatttccttttctcttttataacagtatgttgttatttttctatatctgtaaccttgtatctcaaggttgtttttaagttggctttttctgtacggttagcattattcaaatatatttcacggtgttctttccccatacgcttataaccatgttccatatttcctctaacggatataccgtataatctgttatttcgttgcttttttcggcaagtgctttatatgccattttaattttatatgccatcgaaaacagagccgcaaccttatctgagaagatttcatcgttaggatttccattgccagaaacaatgatatatttttgagcaggaacatcaacaacacaaggttttgtttttacaccatatatttctttctcctgctttttccattcatgtttcactttcactccccgctttctcaaatagaatttacaggcaaattatatcacacatatactgacgccctgtgtcaagatttatatttctcataaattttctttgcctgctctgccacaatgtctttcagatatgcaggctctataatatctacttgtgttccaaatgacaataaaaacccgattagccattcatcttctggcattggggcggatacgattaaatccccattttcttttttacttacttgggttttatcaaattcatcataaacacggtatgacatatttttctggaaacgcagtacgattgtattgtaggcttgccctaatgattcatctaattctggaaaagagcttttgcaaaaaccgtccgtgagcatttctaaatctatcatacgggtcagcttaaaaatacgataatcctgtttttccatgcaatatgcttttaagtaccatgacatagacttatatgacatttttaacggctggacaattctttcgttaattattccgctggaatttgcataggttatttttacgcactttcgatgaattaccgctgattttagcaattcaaatttcccattgtccgttccatgattgccccatctggaaaaatccacttcaagccagttttccgaactcatattaaatattgcagaaagtttttgcaatgtctgattgttgtcgatattgttcatagaattgatactttgcagggctgttagaatttcctgcttttcttcttcagacagcacccctttatctaaaacaaaatcattcattaaatgaatgccgccgtttcgccctgcttctgcataaacgggaatgcccgcgccgcttaaagcgtcaatatctctgtaaattgtccttacagatacttcaaatttttctgctaattctggagcggtagcctgtcctttatcgagtaaataatacacaatcttaaataatctgctttcctgcattgtcagttcctccctttgatgataatagaatactaccaaaaacctgacacgatgcgtcaatatttattataatcatttttcttcccattatcaaccaagcgagcatatatgatttttttatctcgtaacttgtagtttctactcaaacggccacataatttttaccacccgaaaaacaatgatggtaacgattttcctcattgcagcgcctatatttcagccgctttttccttaaaaaagagagcaagaaactttatatacctgctctccaatttcagttctttatgcgttacatctatgcgtaaatgatttacgtttccacaatctcccctgcacaagcccttatattattaaggcgtcctgtccattccaaggcattttttgcctttagctgttccgttatgccctgtgcttgcttcatttgctctacgagcctttcaaagcgttcctgcgcctgtttattaatctccgcaaggtaggcgttcagcctgccgcttgtcagaagattggtgtatataactttattgtgcctgctgtcttaaacacatttttgagttttctccttatctggcttcattcattactgattgacaaataaatagtccggtgctatgctaaataacaacagggagcttgtgaagcaggctgagaggaagtaatcaaacttcgacctatcgcacctgatttgggtaatgccaacgtagggaaatatgagacatgtatgtgtattaaatgcgtaatttaagtccatatcccgcgcggtatgggcttttttcagccttcaccgcggttcggacatatgagggctttagagctgtgcaggcaatacgccgctgtaccagagaatatgcctctctaccaggaagataggcgggctccgagtaaaaaacatggaggtatgactatgactatgaaagtaaacattaagaaactggcggtaagcgccatgctgacagcggtggccgtgtctttatccggcttttccatccccataggggcatccaaatgttttccgattcagcaccttgccaatgtattggccggcgtattccttgggccgtggtatggcgtggggatggcgttctgcacatcgtttatcaggaatctgatggggacgggcagtctgctggcatttccgggaagtatggtgggagcatttttaggagggtatctgtaccagcgtttcggcaggctgacactggcctactttggggaagtgtttggcaccggcatactgggcggaatgctctgctatccggtggccacactggttatggggaaggaagcggccatttttgcctatgtaatcccattccttatgagcaccatgtgcggcacggtcattgccgcgttcctgattggggtgctgtataagtccggcgcgtttcagtatatgaggcggatgctggatctggatgtacagaccggcaaagccatgggaagataacaggaaaaaggataaatcagatgacgcggagacaatggatgaaggacttaagggagcgctctcccagggtccactgtataaccaattatgttacggcaggggatgtggccaatatggtgctggccgcaggcggttcccctgttatggcccaggggctgcatgaggtggaggacgttacctccatctgcagcagtcttgtccttaatctgggaaccctggaagaaaaaaccataccggccatggaggcagcgggaagaaaagctgccgttctgggccttcccgttatcctggacccggtaggagtcactgcatcacggtttcgcagacagacagccattgatatgatccggaaggccgctccttctgtcatccggggaaatgaggcagaaatccgggccctgaaccaggaactgaggggacatgaggcgggaaatacctgcggcgtggattcgggaatctttggtacgattgagagacgcctggaaaccgcctgttccctgagggaccttacaggcgcggttgtggtcatgaccggggaagaggatgtggtggccggaaaagaaagaaggttcattgtcagaaacggccatccctggatggccagaattacaggcagcggctgtatgctggacgggcttatgggagcgttctgcggtctgtatggggaactgggaccggacggccctctggaagaagctgtggtcatggccctcagcgcgcacgggctctgcggagaattggcggccggagagactgcggggaggggaggcgggacaggtacattccgcatgtatctgatggacaaaatgagccttctggatgacgagacactggagagaggtaagaaaattgagattcgatagaaaacagcttttgatttatgcagtaaccgataaggcatggaccgggaagctttctctggaggagcaggtggaggaggcgttaaaaggcggcgcaaccatggttcagctcagggaaaaggaactggacaaagggaattttgaggaagtgctgagaacggcctgcgccatccgcaaaatcacagaaaaatataatgtgccccttatcatagacgacaatttggagctggccctggcctgtcacgcggacgggctccatgtggggcaggacgatatggaggcatctgaggccagaaggcttttgggacctgaccgtatactgggggttacggcaaaaacagtggaccaggccagagcagcccaggcagcaggcgcggattatctgggcagcggagccatattcggcaccagtacaaaagcagatgcgcggcccatgacaatggagaccctgaatgcaatctgcgacagtgtggacattcctgtggtggccatcggaggaatctgcctggataacatagggcgcctggccggcagccatgcagcgggagcagccattgtatcaggcatatttggggcgccgaatatacgggagacaacagaaaagctggcagaggcaatgacggagatagccggaatgcccaggcgggacctcagggcgggatcagtgtaagaaaatgagaaaaatataaaaaactttcaagaaaaccattgacatttgaaaataggctgattataatgagttcaacattcaacaaaacataaaaaactgttgagtaggagtaagtaagattgtaattccaggcgcagagagcttccggccggtgtaagggagcattggattagagtctgaatggacctgcgagggcagctggaaaccaggggcatagagatatggctgatgggagtatgggctgacgggtatcccaccgttaccagggagaacgcatgatggtgcgttgcagagcgggcgtattttatttctttgttcgatgacacagcatcaggttaaatttaacttgatgcttttttatttcccggaccggaggatggcggggaacgtgcaggacatggaaagcgccaatcagggtggtaccgcagaagccggaagaagcttttgtccctgttgattacagatgtagtcggcagggataagggcttctttttttgatgaatgtgacgcccggacccgggaatggtgaagggtttagaataaacagccggcaagaaggaaaggagttaaggtaaatgataatcccagcttgtgatgaaatattaagtctgtcaggggaatacgatataattcccatctgccgcgagatttacgcggatgtagtgacgcccataacactgctcagacgtatagcggagcggagcagccgtttttacctgttggaaagcatagagggcggcgaaaaatggggacgctactcctttctcggatataatccggtgatgcgtgttacctgccgctgcgggaaggtgaagattgagagccatgtcagccggttcccgtccagggaaatacagacagctcatcccatggatgtgcttcgtgagatattggcacagtacaaggcgcccaggctgaaaggacagccgccctttaccggtggatttgtagggtattttgcgtatgcaatgattgagtacgcagagcccacccttcatatcagcagaggcggggccaatgactttgacctgatgctatttgacaaggtcattgcctatgaccacctgaaacagaagattcagattgtggttaatatgaaaaccggcaggacagagagggcaggaaggacggaacggggaaaccgtgaagagcaggagcgctgcgaaggccgcaagggtggtgaaggccgggaaaataggaacacctacagcggtctggaatatttgttgaaggagtatggaagggcctgtgaggaaatacaggaaattgcttcccttatcaatgatacaacacctcttaagaggctgtcctcgccggagaaaccatcctttgtatgcagtgtttccaaagaagagttctgcgatacggtggaaaagacaaaggagtatattctggacggggatatcttccaggcggttatatccaggcagtttaccagttcctatgaaggcagtctgctgaatgcctaccgggttctgaggactaccaacccgtccccttacatggtttatatgaacatagaccaggatgaaatcatcagcacgtcaccggaaacactggtccgccttgaaaacaggcgccttactacatttccggtagcgggttcccggccaaggggagacggggacgaggaggacagaaggctggaggaagaactactggcagatgaaaaggagctttccgagcacaatatgctggtggatttggggaggaatgatattggacgcatcgctgagttcgggtccgttgaggtgacggagtacaagatgatacacaagtattccaaaatcatgcatatctgttcccaggtggaaggaaatataaaacccggcctggacggctgttcggcggtggagtccctgcttccggcaggcaccctttcaggagcgcctaagatacgggcatgcgagattatagaaaagctggagtccgttccccgcggaatatacggcggagctctgggatatctggattttaccggaaacctggacacatgtatcgccatacgcatggcggtaaagcaggcaggaaaggttacggtccaggccggaggcggaatcgtggcggacagtgttccggaactggaatacgaggaatcagcaaataaagccaaggccgtcatacaggccatccttcaggcaggggaggtagatgacagatgatagtattgattgataattatgacagcttttcctataacctggtacagatgattgggagcattgagccggatatacaggtagtccgcaatgaccaggtaaccgcagatgacatagagaacatgaagccaagccacctgattctgtcgcccggaccgggatatccccgggatgctggtatactggaggaagcagtgatgaagctgaagggaaaaatgcccatactgggcgtgtgtctgggccatcagggaatatgcgaggcattcggcggaaccattgcccatgcaaagaagctgatgcacggcaagcagagcgatatcaggctggacagtcatatacaggacgggaggttccccgcttcagaaaaagcgggaaacagatgcaggttatttgaaggcctgccgcccgttataccggctgccagatatcattccctgtcggcagtgcctgagagcctgccggaggaactggaagtggtggctctggattgtatggaaggggaggtcatggcagttcagcacaggggctatcccatatatgggctgcagttccatcccgaatccatattgacgccggatggaaggaggatactggagaacttccttaatatccggacgacacaggcaatgtaatttgtgagggacagaacaaaacagaaataaaaatcaggtattgtaaaaaaggaggatgactatgatacagaaagcaatccatgaattggtagaaaataagaatctggattttgaaacaacaaaggaagttatggatgaaatcatgagtggaaacgccacccaggcccagatatcttcctttctcacagcgctgaggatgaagggagagaccattgatgagattacggcctgcgccactgttatgcgtgataaggcggtaaagctgtctccgccctttccggtaatggacattgtgggaacaggaggggacgaggtgggaacctttaatatttccaccaccagcgcatttgtggctgctgccggaggcatacgggtggcaaagcatggaaaccgcagcgtatccagtaaaagcggcgcggcggatgtgctggaaaggctgggggcagagctggctctgactgcacaacaggctgaaactgtcttagaggacaccggaatgtgtttcttgttcgcgccggcataccattcttccatgaaatacgcggctcctgtgaggaaagaaatcggaatcagaagtatatttaacatattaggccccctgtccaatccggcaggagcctccatgcagctgttaggtgtgtatagccgtgatttagtggaaccgctggctcaggtgctggctaatctgggagtcaccaggggaatggtggtatgcgggggagacggactggatgaagcaacacttaccggccccacccatgtatgcgagattcgttacgggaaaattacggcttacgatatgacgcctgaggaattgggcctgactgtatgcagtctggaagaactcatcggaggcacacctgaggaaaatgcaaagataacaaggaatatcctgtccggaagcctgaaagggccgaagagggacgtggtggttctgaacgcggccatcagcttatatctgggaattgatgactgcacggtgagggactgtatcaaaacggctcaggacatcattgactccggagcagccatggctaagatggaagaatttatccaggcaacaaaaaaagcggcaggagaggtgaaggcgtcatgatactggataccattgcccggtccgccgggaaacgggtggagcagcggaaacaggtaaaatcactggaacaaatgatgaaggcagcctgcgagtgcagagagagagaaggcattaagggggatgccataaagagggctggtattaagagagaggacggaacaaatgaagtacatccctttaaggcggcgctgtctaagccgggagtctcctttatctgtgaggtaaaaaaggcttcgccttcaaagggacttatcgctcctgattttccttatgtggaaatagccaggcagtaccaggaagctggcgcggacgccgtatccgtattgacagagcctgaattttttttaggagcagaccggtatctggaagaaatccatagagagatagagcttccgctgctgcgcaaggattttatcgtggatgaatatcagatttatgaggcaaaggtgctgggagccaccgctgtcctgctgatttgttctcttatggatatggaaaagctgaaacggtatatgggcatctgcggcagtctgggccttagttccctggtggaggctcacactgaccgggaggtggccatggcggcagaggcaggatccgatataattggaattaataaccgcaatctggagacatttgaggtggacttcacaaacgccctgaggctcagaaaactggtggaccggggaaccatatttgtggcggagagcggaatcaggacgcctgaggacatagagcttctggcggagaaccaggtagatgcggttctggtgggagagaccctgatgcgggcaccagataaaaagagggctctcagagaacttaagtcccggattgggtagagccggacatgaaccgtgacagacagagtaaaacatgcggggagattgactatgaaaacatgcaggcttaagatttgtggtctgagccggtttggagatatactggcggccaatgacattctgccggactatatcggctttgtatttgccgagagcagccgcagggttacgcctgataaggctgcccagttaaggcaggagctggataaaagaatcaaggcagtgggtgtatttgtcaatgcgcccatggaggagatagtgaagctgtcagaggaccggggaaacgcaagggtgattgacctgatacagctccacggagatgaggatgaagcttacataagacaactgaaaacacacaccggcctgccggttatcaaggcggtacgggtcagaagcagggaacagattttaaaggcccaggagctgccctgtgattacctgcttctggacacctatacaaaggacaggtacggaggcagcggcacccagtttgactggaacatgataccagagcttacgaaaccctattttctggcaggcggtatacatctgggcaacataagacaggcggtatcccatggcccctactgcattgatgtcagcagcgcggtggaaacagggggcaggaaggacagaaggaagatggaggaaatggcccaggtcctgcggtgaaaaattgttttagaaaaggagaaacagaaatgtcaagaggaagatttggaatccatggcggtcagttcataccggaaacactgatgagcgctgtcacggagctggaagaagcatatgagtattataaaaaggatacccggtttacggctgagttaaagtatctgctggaggaatacacaggccgtccgtcacgtctctattatgcggagaagatgacaaaggacctgggcggagccaggatttacctgaaaagagaggacttaaaccacaccggatcccacaaaatcaataacgctctggggcaggtccttctggctaagaagatgggaaagaccagggtgattgccgagacaggggccggacagcacggcgtggcaactgccaccgcggcagcccttttgggactggaatgcgaggtctacatgggaaaggaggatacggaccgccaggcactcaatgtataccgtatggaactgttaggggccaaggtacatccggtgaccagcggaacacagacattaaaggatgctgtcaatgagacgctcagggagtggacgaaccgcatctccgacacacactatgtcataggttctgtcatgggaccccatcccttccccatgatggtaagggatttccagagtgttatcggcagggaaataagagagcagcttatggagaaggagggaaagcttcctgatatggttatagcctgtgtgggcggcggaagcaatgcaatgggagctttctatgaattcatagatgaaaaggacgtgaagctggtaggctgtgaggcagcgggactgggtgtggagacagagcagaccgcggctaccatagcaacgggccggctggggattttccacggcatgaaatcttacttctgccaggatgaatatggacagattgcaccggtgtattccatctcagcgggtttggattatccgggcatcgggccggagcacgcgcagctgcatgacagcggcagggcagtgtatgtgcctgtgacagacgatgaggcggtggattcctttgaatatctgtcacgtatggaaggaatcattccggcagtggagagcgcccatgcggtggcctatgccaggaaggtggctggctccatgggtaaagaccagattattgttatcaatctttccggcaggggagacaaggatgtggcggctattgccagatataagggggtagaactctatgaataggatacagcaggtttttgagaataagaaggcatttatacctttcataacagcaggcgacccggatctttccgttacagaagcactcgtgcctgcaatggcagaggccggtgcggatttgattgagctggggataccattttccgacccggtggcagagggaattgtcattcaggaagcagaccttcggtccctggcctcaggaaccaccacagataaaatatttgatacggtgcgccggattcgccaaaaaacagatgtgccgctggcatttatgacctatatcaacccggtgtttgcatacggtgtggataagttcatgaaaaatgccgctgattgtggaatagacgccctgattgtgccggatatgccctttgaagagagggaggaactgctgccggcgtgtaaaaaatacgatatgaccctgatttatctggtggcgcccacatccagggagcgggcccaggccatagccagggaatccgatggatttgtgtactgcgtatcatcacttggagttacgggtgtccgaagcgagattaccacgaatattaaggaaatggtggacaccgtaaagcagggccggaatgtgccctgcgccattggattcggcatctccactccggaacaggccagtaaaatggcttcgcaggcagacggggtaatcgtgggaagcgccattgtgaaaatgattgccaggtacggaataaactgcgtggaacctgtctgcgattatgtaaagcagatgaaggcggctgttggggtatagacagtgcggacggggtgagactgtcaggtgaaagcggcaggtgaaagcggcaagtgaaaaaggggcagcggcggagtacgccccaaggccctttttcgaggaaaacagtatctcgcctgccggtataaacggaatattatgtagaacgtaaatctcatcaatagaatatttttcaaacagtccatcatcaatcatagccttagaaccttttccgggttcttccaactgaatcgcatccatgtctgcccttaaaccaataacagttttgccttctccggctttaagatccgctacgataccggttttaccagtgccctcataaacagtcagccccatttttcgaagttcatttgcaacaaattttgcggtattcatctcttcatatcatcaatatgatatcggtatagtttgcggtatagcgtggataggttgattttgagttgatttgcaatttcttttttagctttggttgtagttccatattgttttaaataggaaatcagaatctctttttcaaagcattctgtgagattatttaaagattttccatccatatgagaaagaatttctgcactgtcaggaatacgatggctttgctgattcatatctatgcttttgaagtaatcaggtagatattttggtgtgataaggtttttttccgatatatttaccagatattcaatcacattttccagttctctgacatttcctttccagtgggcgttgcaaaatacttccatcagttcattagaaatcttcttttgcggtttattcagcttttggcaatattcagccagttttatgtttacaagaagaggaatatcatccttgcgttctctcaatggcggtatattgattggtattacatttaaccgaaaatataagtcttcacgaaattccttatttttaatcatgttttccagatttcgattggtagcggtaatcagccggaaattaactttaatcgtattttttccaccaagtcttagaaaagaaccatcttgtaaaacacgaaggagttttggctgtaagtggagcggcatatcaccgatttcatctaaaaacaaagttcctccatttgccagttcaaagcgtcccacctttcctgacgtattagctccggaaaacgcgcctctttcatatccaaatagttcgctctccagcagagtatctggaatagatgcacaattgatagctacgaacggtttatgcctgcggttagaggcatagtggattgaccgggcaaataattcttttccagtcccgctttctccgcgaatcagtacagaagaatcgcctgtggagatttgtttggccagtgttataatattttgaagtgcagcactatctccgcagatatcagaaaaattaatctcatcttttcgctcaataatattatatgcgttcatcaactcattggagtaacgcgaaacctgaagaacataattgcggatatcttcgtgtatcggagtgataatcatctttatggaaaaacggatacgcgggtccgccagtctggattttactgtcatagtaccgtctccaggagagtctgcgattggggggggggggtaaaagatttcatcaactctttttccaatcagatcctgctcggaatgatttaggagctttgtaagctgtttatttacaatggtaatcctttgattagtgtctgctaagcatagaccataatctagagaattcacgatagttgtaatttcctggttgcggagaaacagatttttaatggtttcttcatacgcaagattaccagccagcaattctccaagcttgcctaaaaaacgggttatagtggattgattttccttgatatacatccattgagattctttaaatgcaatcagaccgatagcgccgagtgcctgtccgtcacgagatataattggatagcctacggttgcaatttctttgcatatggaagcggatttgcaatgggcacagcgtgagcttaatgcagtttctgtaattatttcggttttctttgaattgatagtatattcataagaacagcccttcggtaaatattcccccactaaatgtcggtaattaccggtcgctgcaattcgcttcaaagttttgtctacaattgtaacatccagaagaagcaaagactggattgcatctgctatttcctgagcagaatttttctcgattttatacataatagatcacccatcataatataacacatctccaattttttgtaaagttacacaaaagatatctgttattggtgaatagatttggaaaaaacagtcagattttacttatttgcacaagtgagaaaaaaattagcaattttgcaaaaatgcgaaagccagtgaaacgcagattcgctgttttctggacaaaattagttggcatacgatttgcttattatattagtaatcaacataaccatatttcttaatcgcagtttctgtcttatgggaaaataacatgtaaaaggagggagaagtgatgctggcgatttgcggcagaatgcgataagtaatatgaaaaactaaaaggagtattattatgggaaattcaaaggagaaaaagaataagggtaagagtattaacgcatttattattgtttttggtgttattgttgcctgctacatcctgtcgtttttcataagccctggtgcttttgaacgtgaggttgtcgggggaagaaccattgttgtacccaattctttccacgcaattgaaaaaacttacttaggactgcaggctattttccaggcaattccaaacggactggaggcttctgcaggaatgatgttcctggtaatgttagttgccggttgtatcgaagtttataaacgaaccaacaccttggataaaagtgtggcaaaaatcttaacgagtgcagaaaaagtaggctcggaaaaaattctagtcttaatcatggttatttttgcatgttttggtggatttttgggatggaatgagcagattgtaccgtttattcctattatcatatcactgtgtctggctctcggttatgacttgatgactggtgtcgcctgctctgcaatgattgatatgattagcttttccatttcacctaccagtgtctatacggttggtatctcccatgaaattgctgagttaccaatgttctcaggctttttattccgctttattctgctggtaatttttgacataattgttatttgttacgtattgaaatatgcaagaaaagtaaaacgcgataaagcagcttccattactgcagatattgatgacagcgaattcagaattgattatagtgatatcgcaaagaatccgctgaccaaaagacagagtgtttctcttgcagtgttcatgattacgtttattgcggcaattgcaggtgtcgcaaaatttggctggtccatgaatgacttgtctgcatgtttcttatttacagcaattgcagctggtgtcatcaataaactgagtgctgataagattattgactgcattatcgatggtgcaaaagacgggttgagaccggcgctggtaatcggtcttgcaagaggtatccagtggatattgacaagttctggtattatcgacccgattatcaatgcaatttccaaaccgcttatggaacttccgagctccattacagcaattgcagttatgtttgttatcgcgctgttcaatggactgattacctccggttctgcaaaagcaatggctctgatgccgattctgattccgctggcagacattgttggtatgaccagacaaaccatgattcttgctttccagtttggtgatggacttacaaactctttatggtttacaagcggtaccctgttaatcttcctgacaattgcgaagattccgttaaaaaaatggtggaagtttgttactccgctgattacgatactgacagttgtaagtgtactttcattggttattgcaactaaaattaattatggaccgttctaggaggaagactatggaaattaaaaatcagattaaaataatcgaagatgaattaatccaattaagaagatacttccatgaaaatccagagaaatcatgggaggagcataacacacagaaaaaaatcatggaatatctggatgaactggatgttccgtacattgcttctacaaaaaccggcgtaatcgccacaatccgcggcaaaaagtccgacgatcatatcattggaatccgtgcagatattgatgcgcttccaatggatgacctggtagattgcgaatataaatcaaaggtttcaggctgtgcacatacctgcggccatgatacacatatcacaatgttactaggaacagcaaaaatcctttccaagataaaagatgaactgactgtgactgtacgtttgctgttccagccagcagaggaatttatcgaagacagtggagcagcttacatgaaaaatgaggagcagattttggaatgtgaccgtttaattgcacttcatatctggagtcagattgaagcaggttatgcatctcttcgttatggcccggttatgtctgctgcagatacgtttgacatttttatcaacggtaaaggcggacacggtgcattgccacatcagaccattgatccggtagtagcaggtgcagaactggtaggtgcacttcagaaggttgtcagcagagaagtcagcccactggatacggctgtagtcagcgtaacttcattccattcaggtaccacatttaacattattccgaattccgcgcatttaatgggaacctgcagaacatttaataatgagctgagaaaccattatccggatatcttaaaccgtgtggctcagggtgttgccatttcgaccagaacggatattaaagtggaatatcactggggaccgccagcaatgattaacgattcggaatgtgttgatacaggacaccgtgcggcagcaaaagtattcggtgaggataaacttattgattacgaacagcagatgggtggagaggattttgcaaaatataaaaacccgaaatgtctgttgatgctgggcggtggattcagtaatccagaagggagatttccgcagcatagtccgtattttgatattgatgaaaacgtcttaaaacttggagtagaatattttgttcaatatgtaatcgagtacggattggagaatgagtaaggagtgaagagtgaaaaatagagagaacttttaggcgcacttgtacttgtttgtgccttgagcgaagcgaaaggaatggtataaagcatgaattacattgaatattttaaacaggagattgtgcctgcatttggttgtacagaaccgattgcacttgcatacgcagccgctaaggcaaaggaagtactgggaacgaatcctgacagaattatagcaagattatctggcagtatgattaaaaatgccaacagcataaaagtgccgggaactgacggacgaaaaggaatcgcaatctcactggtaaccggagcttttctgggagatgcggagaagaagttacgggtattagagaatgtcgataagagcaggctctgtgaggcagatgcattgattgagcagggaatcgtacatacggaactggttccaggtgtttcgaatctctatattgaggttgaagaacacagtggcgacgactatgcaaaagttgtgctagaagattctcatactaatattactttgattgaaagaaatgaagagattctgtataagcaggacaaaaacagttcaaaagaaaacacaataaacttttcatttgaacaaatctacgattttgcgcgaaatacagattacagtgaaatccggccgattctggatatggaaatcgaatataatatcgctattgcagaagaaggcattcaaaataattggggttccaatattggaaaactggtgttggataagcgcccagatgattttgtggaaaagatggttgcttatgcttcggccggttcggatgccagaatgagcggttgtgagaagccggttgttatcaactctggttctggaaatcagggcattaccgtgtctgttccgattatcctttatgctagagaacaccactgtgaggaaaatcagttataccgggctctgatttttgctaatctgcttggcctgtatatgaagcagggaatcggaaaattatcagcttattgtggggttgtgtctgcatcatctgcttctgttgcaggaatcgcattcctgagtggggaaggtgaaaaaatcatcagggaattgcttacaaattcgttggtagtgaattcgggtctgatttgtgatggtgcaaaaccttcctgtgcaatgaagattgcgtccagcctgaggaatgcatttctggcgtatcagcaggccaaagccggtaagagtttccaaccaggagatgggattgtcaaagatgatttcgaagaaactattcataccatttctgtcattgcacgggatggcatgaaaaagacggatgaggtgattctgcatgaaatggtaacagaaacctgttagaatgactaataaagggagcatcgcaaacggataagagatattaagatttcttatccgggcggtgctcttttttatattaaaggtaagttctccagttggagaacccttgcattaacaatctcttgtgggaccccaataaaaggcgcaacatggattttggaaaaactattgaagaaaaccaaagctttctgtcaatattttggaaatagaaaataggggaaagctgttaatataagaatatcgaagggatggcaggacaatggaacaggatacaggagggaacatgatgcagaaacggcaatataaaattctgaagctgctgtacaggtcagatggatttgtgactgtggagcgcctggcggcagatgtgcaatgttcccttaagaccatcaggaacgacctcaagcagctgggaagttttctggaagaacacggactgggaaagattgtctctaagagcaacaaaggtgtctgtctcatgaaaggtaaggactgggacgcggcaaagcaggatatccagaaagcgtcatgagtttggggaccagacactgaaaagccagacagagaagttcctgtggggatttgatatggctggggtaccagcagctgtcatttctcctgtcactgtgtgttctgcgaatcaggaaaaaggaatatgcagagattccggcggattttgaatatcagggggcagagtggcagggcgcggaatatgaccgaagtatggccggagtatgcatggaaagccttaagaagtattataatatcgttttcagcccggcaaccaacagcatggacgaaatgatgggggaggagctgggagcgctgggaggcgccctggttacaggcgtgttccttatattcattgtcatgggcatacagtttgaatcacccaagtattccctgatggtcatggtgaccattcccttcagcctgattggttccttcggccttctgtacctgaccggcagccccatcagcatggtatccatgctggtcagtgtgccacttatggaggcgctggtggaagcgggagccatccgtatgaggcccattctcatgacaaccctgacaacggtcatttccatgatacccaatgccctggcctatggaagggccggcaagatgatgcagggtattgctctggtaaatatcggcggccttatggcatccatggtccttaccctgattcttctgcctaccttctacaaggtggtgtaccagctgggaagaaaacggattgggggcgagggagagccgtcctatgactgatgggcgctctgaaatgacctgacagaaaaatagcaccaataaaagatatcctttttatcgtctgggcgcacccaaaaaggatgaagatgagggcagttaaatataatataaatttttaaaacccccttgacatttccggaaaaaaaggataaactcaataaaaattcataatgaatgcggaacagctcgaaagggagtagtttagatatattgtcaacaacctcggttccaacggaacctggcaatatatgcctttgcggttacaagacttttatgcgtggtttgcagatatgttacatatcctggcagccatccatagaagtctttttttgtgggtttcccggtgccggagcatggcggataaatgtttttttgaattgcttttttgccatgcacatggcattttggcgcagggatacgcgcataatagactaagaactcattacgagccactccactaagtggtcaaaggacgaccgctgagtggagatgacatgaatcgcacgtaagcgcctaaaggatgggagctaagtgctcacaacgaggaggaaagtacatgaaagaatggtatcaacagacaaaagaagagatactcggccagtttcaggtaacggaacaggggctgacatcttcccaggcagagaaaatcctggctgagaagggagaaaatgtcctggaggagggaaagcgcaagagtaccctgcaggtgtttttagagcagttctgtgacctgctggtggttatcctgattattgcagcccttatttccatggtgtcaggcaatgtggagagcacggtagttatccttgctgtcatcatcctcaacgctatcctgggcacggtacagcatgcaaaggctgagaaatccctggacagcctcaaatccctgtcatcccccaacgccaaggtgctgagggacggacagaaggtggagattccatcgtccaaggtggttcccggagacatcctgtacctggaagcaggagatctggtggtggctgacggaagaattctggagaattattcccttcaggtcaatgaaagctccctgaccggagagtccactaatgtggataagagcgacggcacccttcacagcgactgcgccctggctgaccgggccaatatggtgtattccagcggcctggtgacttacggacgggcagtggtcctggtgactgccacgggcatggacacagagattggtaagattgcagctctgatgaatgccaccaaggaaaaaaagacgccccttcaggtcagcctggaccagttcggcagccgtctggccatggcgatcatggtcatatgtgctctggtgtttctgctgagcctgtaccgcaagatgcctgtcctggattccctgatgtttgcggtggccctggcagtggcggccatacctgaggcgctcagctccattgtaaccatcgtacaggccatgggcacccagaaaatggcaaaggaacatgccattatcaaggagttaaaggccgtggaaagcctgggctgtgtctctgtcatctgttcggataagaccggtaccctgactcagaataagatgacggtacagaacatctacaccaatggacagaccattaccatagaccagctgaacctgaagaaccagcttcaccgttatcttctctatgatgccatacttaccaacgattcctctatcgtagacggaaaaggcatcggagatcccacagagttcgcgctggtggagatgggaagaaaggcgaccgtggacgaaaacctgctcagagagctgatgccccgtctggaggagataccctttgactcagacaggaagcttatgagtaccaaatacgaacttcacgatgtgcccaccgtacttaccaaaggagccctggatgtgcttttagaccgcaccgtgaaaatccgtatggaagagggaatcagggacattacccgggaggatagggaggctatccttcagaaaaatctggagttttcccaggagggattaagggtcctggcctttggatacaaggaagttccccaagactatatcctgtcccttgataatgagaaggacttcattttcctgggacttatatccatgatggatccgccaagggaggaatccaaggcagcggtagcagacgccaagcgggccggaattaaacctgttatgataaccggcgatcacaagataaccgccactgccatcgcaaagcagattggcatttatgaggacggcgatatggccatgacgggccgtgaactggacgccatgccggaggaggagctggaccgtaaaattacggacatatccgtttacgccagggtttcacctgagaacaaaatccgcatcgtggatgcgtggcagcggcgcggttccatcacggccatgaccggagacggagtcaatgacgctcccgcccttaagaaggcggacatcggagtggccatgggcatcaccggcaccgaggtttccaaggatgcggcagccatgatactgacggacgataatttcgcaaccatcatcaaggcggtagccaatggaagaaatgtataccgcaatataaagaatgccatcaagttcctgctgtcaggcaacatggcaggtattctttcggtattatacacatccctggcagccctgccagtgccatttgcgccggtacatctgctgtttatcaacctgctgaccgattcactgccggccattgcaatcggcatggagccagctgagaaggatttattgtcagaagcgcccagaaatccgaagacaggcatcctgacaaaggatttcatgaccactatcctgacccagggcggaatcatagctgtctgtaccatgattgccttccacgcaggcctcagaaccggcagcgcggccacggccagcaccatggcgtttgcaaccctgaccctggcccgtctgttccacggattcaactgccgcagtaagcacaacatcttcaagctgggcttttcatccaactggtacagtctgggagcatttgcggccggcgtggtactgttaggcattgtcatgtttgttccgtttatgcagaacctgttttccgtaacaccactgacccaaagccagatagtgaatgtctgtattctggccgcagtacccacggtactgatacagctgtttaagattataagagatattaagcataggaaataatggggaattgtggtataatgtccacgtaggcaatgagcagtgcaaaaagcggcgggcatatatctgttgggagcttgctcgcataaggatatatgcccgccgcttttttatagggcgaagcccattcaaagctcatcctgtccaaaacaaaaccaaccaaaggaaaggggcggtgcttaatggataaggtcataacagtaagccgcgaattcggaagcggaggccgtgagctgggggtaaagctggcagaaaagctggacatcccattttacgacaaggagttaatctccatggctgcggacgatatcaatattgcagaagaggcatttcaaaactacgatgagcatatcgtaattcacgacccgttagacaggcagtattaccatgctttttctgacatttacaaagttcccatgtcggaccagattttcgtggcccagtccaacgtcatccgcaggctggctgctcacggtccatgtgtaattgtgggacggtgtgcggacatgattctggatgacagcattaacctgttcatctactccaaaatgagggaccggattaagcgtatgcttatactggagccaggttctgatgagaaggagatggagcgccgtatccgggaggtggaccggaaacgcaaggagtattaccagtattacaccggcaacacatggggccgggcccagaactaccacttatgcctggacagcgggctgacaggggtggacggatgtctgcgggcggttctggcttatctgggagaattgtcagagtaacgggaatcggggcagccggcacgggcgggcggtacaggcggcagtgcgggcggcgatacaggcgtttcggtcaaatgaacaattaaaaagaaccaagaaagacattttagcaaaagaagcagaattctaataaattcaggaggcagaagatgaaacaggatatgattgtaattcttgacctgggaagcacagagaacacaaaactggccagggacatcagggagatgggggtgtacagtgagatttatccccacgatatcacagccagcgagcttaaggaacttcccaatgttaaaggaattatcatcaacggcggccctaataatgttgtggacggttctcccattgatgtgcgtccggaactgtatgaagcaggatacccggtaatggcggcaggccacaacgcggctgcctgtgagcgttccatacatagctgggatgaagctgacagcgaccaggttctccgttcctttgtgttcgatacatgtaaggcccagcctaactggaatatgaagaacttcatttccgaccaggtggaattaatccgccagcaggtaggagacaagaaggtgctcctggctctgtcaggaggcgtggacagctcagtggtagcggccctgctcatcaaagccatcggaaaacagctgacctgcgtccatgtaaaccatggccttatgagaaaaggggaatccgagagcgttatagatgtattcaagaaccagatggatgcaaacctggtatatgtggacgccgcagatcgtttccttggaaagctggccggagtggctgacccggaacaaaagcgcaagattatcggcgctgaatttatatgcgtgtttgaggaggaggccagaaagctggaaggaatcgagttcctggcccagggaaccatttacccggacatcgtggagagcggaaccaagacagccaaggtggtaaaatcccaccacaatgtgggaggacttcctgaggatttgaacttcactctggtagagccgctgcgccagctgttcaaggacgaggtgcgcgcctgcggactggagctgggcctgcctcacagcatggtataccgtcagccgttccctggtcccggattaggagtgcgctgtctgggggccataaccagagaacgtctggaagctgtcagggagtccgacgctattctccgcgaggaatttgcaaacgccggcctggacaagacagtgtggcagtattttactattgtaccggactttaaatcagttggagtcagggataatgcgcgctgctttgattatcctgtcatcatccgtgcagtcaatactgtggacgctatgactgcctccattgagcgcattgattatgatgtgctgcagaggattacggaccgtatattgaaggaagttaagaatgtgaacagggtgtgttatgacttgagtccgaagcctacggctacgattgagtgggaataaaaaaatggagctcggaaatccagcgtttatgcggggttccgggctctttgtatgtgaggtgagtacagtttgagtacaaaattat

SEQ ID NO: 490 - DNA, 1140560 bp, Enterocloster clostridioformis
  source 1..1140560: mol_type = genomic DNA
gcttaaaccaagtacatcaatatcaatactcaactgataggcgtagtatttattaataatttcctcatttttcccttcataaacatcttctttcacaaaacgcactcttatactctttaaggtttctgtatctaattcaacaagctttaagacgtgattcctatccaaacaacagcccttaagtatatttataatatcttttgtaatatctgctgcaaatgggttcaaatcgttataataaaagcgtctgttttgttttatcgcttcaacaccaactgttccttttcctccaaaaggatcaaaaacaatatcattttcctttgacaatagcgcaattagaaatttgggtattggcggtggcagagttgctggataccatggtattgaattaatatctataggaaatttcaaactattataatcagaaaagtcccaattgatttgattcaaagtccgaataagcttttccattatcctcacctccatataacgatacttcaaaattctttaacaatccctcttccaggatattacacattacttccaactcactttttctgaaagaaattttctttctaaggttttttccctcaacctcaacatttttaaaattattattgctaaaagggctaaaaaggcccagtaaaactccttgtggataatcttctgaattacaaaccttaatctcctcattccataaaaaaactttatttgctatcattcttttccttttatctggataaaagtttgcaacaacaggtggtattcctattgattttatctttttgtccgtcatacccataaaatccacgaaatactctcccgctaccttctctattttttgtaaatttttatttatatagttgactactccattgcccttaacatacagaattcccaagcatacatatggtttgcataacaagacacgtttcataatatcacggcttttagtatgccttaataaaacattatatgtcatttccgaatcagttaatcgccatgaattaatatcaagcactgtagtattacaatcttcctctaacaataaatttatagctctttttatcattgtttgataggcaaaatcctctatactttcaaatatcgcagtatattgcaaatcacgtatcctttgccattctcgtatttgatcaacatacatcccattaaggcaaatctgtccctctttaacaacaaaagaccccgcaagcatttttgctgtttctccacattcccccgctattagccccattgcagatgaagccctaaaaatattatctatattatctaaatccatacctttactatttactaaatctgaaagaagttctcgagaatctcctgctgctaaatgagcgatgcgatgaatatctaaacctattctcctggcctctctactttggcacacactcagtatttttaaaccctgtccctgatagatttgagcaaattctctatcaaaaacacctgttgttcccatgattagatttttcaaattttgctcatggtcaaatccgaactttatctgcaagacctcttccattgcatgcgcaaaaggaggcgttccaacgtcatgatataaacaagctaccatcaattctgttctatctttttcagccagttccatactatctgcacaaataccagcaagatagcaaactcccaaagagtgttcataacgtgatgacgatgcaaatgatgggaatgcaacaaattgattatttgccatcctaacatcacgtaaccgcaaaagacctgggcagtttaataattctatgataatgggaggaaatttcatctctttatataatctatcatatattttcatactacttacctctactatttaaattaaatctatcctttaccattatactatttttgtatgatgattcttcataaaatttttcataagcataattaaccaactcaagtaactgctctctactcacatacttattttggtaaacaatttctccccaaggccacgtatccttcataatataatcaacccagtccttctcattgtgaaaacattcttgatatattggagttcctggataaataaacaaaggattataatgggcaaaatcaagattcatatttgtagagacttctatagtatgttcaatattttctctcgtctcgtcttttccacctaaaataaaagtacctgcgatctttattttagaaatattctttacatacttaatctgatctgctaatccattaagagaaatattcttacctaaatacttcaaaccacttattgatactttttctatacctaaatttatctgtctacaccctgattgatatagtaacataacgtccctatcattcattatttcaaataagtcacatcttatctccatctgccatgtcataccaaccttcctttgtattaacatagagcaaaaatcaaaaacatcctggtgtactttttgaggattataaaaaaaacaatcatcataaaaaataatgtctgtaatcttatatttttctttaagatattgcatttcatcaataatatcattgtaacttctttttctgaactgcttatacttcatattacctgaaacacaatatttacaattatataaacatcccctcgaagttatcatagtcgctgttttattatgcccatccattctccttgttgaaattatattatcttcaataaagggtctttgtggataagaaatattactaatatcctcaatttcattaaaaaaactataatttcttctcgttacatatttacattccgaaagttccgcacctttttttgcacactttagcatttcaacaatcgccttttctccatccccctttacaatatattgaagtcctaaaaaatcaaaaaaaaaccattcctgaccatcaatcgaagctaatggaccgcccgcaaaaattctatcatttctataaatatctttacaacaatcagatataatttttaaagattttacctgtgttgtaatacatgggccgattccaacaagcgtaggtgtataactttttaaattaatctgtaaatattcttttaatttattcaaatcgccaggttcatatgttgatataacatgtgaacagtctattacatcacttgttaatccatttatatttactgccgcaagtatatatcccaaacccaatggaaaaattgttccacttccatttcttctatgaaacggagggttaattaacaataaatctacatttttcataacattacctcattatgtatttttaacacatccataccaattttactcctatgaatttgtttcttcacttatatataggtcttgatatgctaaaacaatattctttgtccaatatctataatatcttttactcctatttagaagtatatatattcctagaatgagcaccacatccaaacttataaatgataatattaaatcttgtcttttaagaatcataaattctatttcgaatgctaatgccaaacataaaataagcataattgcaactcctaatgtagcacatgtattataaatcacatttagttttacatattcatttgctctcttccgcctctgcatatccatattaattttatgaaataatgagcgactctcttctctttgcttttccttatcatttaacgtaaaatcacttccttttaacttaatatacattggcatcaatacttggatttgttcttgctcaaaaacaccaccttggtaatccagcaaaagctctataggcttcccatgtttatacataaccctgttcttaaatatactactaaattcgtgtagaagtaatcccacaaaataagagcttaaaagaaagattagtaattcatatactgttcctggctcatatatataagatttacaaaaaagaaatgttcgttcaatcacgcttgttgtgttttttacttgttctggtaatgacaacatataatcaaaaattgttttaaataatagctggaaaattgcacctggaaaaagtacagtccagatatcatataagcccattttctctattaacttatccatgttatttaccctcacattttattattcattgttaaattaatcataaatattagattgtagttgtataactcttacaccatcttaacatattatcccactctttactatctaaaaatatattatgaatactccctcacgtaccatctgctcataagacctaccaatttatatactaccttctgctacgcaactcaaagaaccgaatcatctgatctaatccctcctctctctacaactattatatgggaactgaaataaaatcgcagcatattttaaaagtaagtaagtaataatccgtatcttgacaaaataagaaatcccccagcacttaccgggggaagatctgttttttactttttaagtttgctgcggcaatcatcaggcagattggaggaccatgggagaagctccagcatttcttcctttgccggaaacgcaccgagttctttcatcttttccatcacatatgtgagatagttgtatggcttcagtccattcagaagcgcagtttctgtgatgctgtacacagtcgcactggcctgtgccccgcggatgcttttggcaaacagccagctgcgtctccctatggcaaaatttttcagtgcccgctctgcagctagattgtcaatactcagatggccatcttccagataccttttcagataggtttcctggttcagcgtatacaggaccgcctctccgatcttagaagatctgtccacagcttcctccagggtatgaagccactcaaagaaagcctctaaaagcggctttgcctgcttttgacgctcttcatacctttcttccggtgacttgtcacggatcatctcttcgatcttatagaacatcccgatccgtgccattgcctgatatgcggttgtttccttcagctgctctttggtaaagtcctttttcaaaacggtcagggattcatcaaatctgcgcctcgcatgggccatgcatcctgtcacggtgatcctttccggaaggctgtggtatgcctggtatccatcgcaggtgaaatatccctggtactgatccccaaggaattccaccggatgatatcccgcccgggttctttcgtattggaagaggaccatccggggtgcgccgctgtattcatcagtgagatagacccacatccagttctgggtggaacctttctgttccggctcatcgattacctgaacacgggtttcatccccatgagcgtaccggctccggaggaattcttccttcatcagttcataaagcggctgcagataccggtccgcacactggatgatccaattcgccatggtctttgtggaaaggttcaggccgtaacgggcgaattcccgttcctgacgcgcaaggggcatgccgcccacatactttgcgttcatgatgcctgccgccagggatggtgttgccacactgcctttgagaagggaaggcgccttttccggacgtttcatcgccccgcattttgggcagctgtaaacataggtgacctcctccaccacttcaaaccgtgcaggcacaaacttcaggcgcttcaccgtctcttttgtcacgactttatatttggtattgcagtccggacagtttcggtccgcgccggtcagcttatactcaattacttccgttgtctcaaaggcggaaagatcttcctcctttttgccggaacgtttctttcttttataggaagacggatggatctcctccatttccggctccggcgcatcaggctctgcttcctgctctgcctcgttaaaaaggttcagctgcgtatagccatccgcatatttttcgctggatgggccaaactgtttccgctgcgcaagagtcagacggtcagaaagcatcgcgttcaggaattccagttcctttgttttttcttcgaggatctggatctttgtttcctgtttctgataatgctcccgcatggttttcatcagggagatgatatcctccctgctcatcttgttcagttgttcctctgtaaaaagcggatccataacacagcctcaactttctgaaatctctgccagaaagtataccagaaaaagcattccgttcctataggaaactgcattccgggacggaggaaaatccgcccaaaacaaagtgattttcggctttttgcgaattgacaggatccgggctcatatgacgatcttcgggtgacgttcttcaaatgcgccgctggggttcagggataaaccatcgcacagccaatggatctctttcagcgtaactttctgcagttcatccggtgtgtcaggccaatggaaggaatcgcggtccagccgtttcatcaggatccaaaaccctgacccgtcccactgaaggatcttgagcaatgtgcgcctgcgattgcagaacgcgaacatacagcgggagtacggatcgagatggaatttcagtttgatgatggccgctaaaccagtgcagctcttccggaggtccgtgcagccacatgccagatagaccgtagtacttccggaaaaatcaagcatagttctttaaggcctgaagcagggcagtcaacagtctggctggacagtccgcagcagcttcaatccggatattttccgggagacagagcatcacaggaggttttcctgtacctgctgtactgaaatggagttcatgttccgaagggagctttgcaaacaccggatcagaagcactttctgtctcagctgcttctgactggagctttcggatccagtaacccagtgtagactgtgggattccattctgctgacaccattctttgcgggataaaccgctttcctgaaaagcatggaaccggtctgcccaaaggtcagcctttgaggttacattgtcattcgtatttattggtatcacctccatcatttgaacttatcttatcaaatgtggatggaaatttgcagatactgattattacctacttacttttaaaacgtctattcttttcatgttaagttactgtcttggcctatatttaaacgttgtattgaaagacttacattaaaagctgccgctcctgcccaatttgacttccgcccaggcagtcccgccgaaactcctcctctgtttttataaacaggttgtcattattgtctgtatcccagaacccaatataaatctcacccttctccgtccgaataggccggtaaaacagttcttctccccagccactatccgccatcgccttccactcttccatcactgccgccaattcccgatcatttaattctccgtaagttcgtactgtaagcacaccccaaaggctgccggcatatgcttctacatctggcatcatggatacaacccgttttttaagcagttcagaatatagatattctgccagccccttctcgaggcagttttttaagctggcctggatcttttcccggatcatgctttcatacgagagaagctcctccccgcttaaaagctccggcacaaatgattcactttcattccaataggcagttacagccaatgaattgtacagacggaactcctgaacagacgggctcatttcctgtatcggatgtcccttgcaaatcaacgtgccaaatgttgtctccaccggcccgttttctttcattttctgcaaaccatattcctggagacggacatatggttccagctccttctcgatgtaaatctgatgtagattcaacagatacttcgcatagctctccacagacaacttctgaactgaaaggaactcatagtccttataattacggataatccgacacgctgcgtctgcatcccttggaacctccgcttctagtgaagccagaagtttctttctcgacacagtggatttatctgccaggttctgtatctccattgcaatctggttcagctccctaaatgtgagccttggaggtaagaactgatccaactcccagatattgctgagataatctgcctcctcatcaccatcatatgttctgcacttctcctccagagcctccagctgtttctccgtcatagggaagtaaaaacagctcttttccgaatacctcttatcaaatgccagatacactcggaatacggctgatccaggctgcaccacttccggattctgcttcgttcccactgctggttttggcgccttgattcttgtgacgagtccctcatctgtcaaccgctcactggctttcatattcaaacggccatatgcttcataatcaaaatagccggtcaattccaccggtagcgttcttccctcccgctcaaacagataatacccacactgttccagggattttatctctggatggcattcgtactggtctaaatggtccattgcctccacaatccgcagcaaggaatccggcttttcattctgcagtacagtctcgaatacagcccgctcctgttccgaccaggaaccaagctctgcggcaaggtagtttaactgccccaggtttgaatcctgaaacacaaattctccaattaacagatgagccagaccagccaccggcgctttcacatcccctatgaatggaatcattctggaaggatgatacccggccaattccttctggacctgctctgcctgttcctccgaggccggcagcttcatccagattccgccatcccagttttcacgcttcacaaacacttccatttaagccctgctcccttcctcattccttctataatttatatatggttccgatgatttaagtaaggatattactcggcagcactcccacctgttcattctgcccctgggattctccttccttctgtccctgaactagttcttccgactgaaacagggacagatatccattgaccgcctccgctatcttctggtagtcctcctcttccatctcacaattccaccagacagaatccttatacgatctcagttctggccctgccatccgttccccttccgtttcttgtttcagaccggtcacatcactgattaaaaacttcatctgatccaccagtccatttgttcgctccagcacagagacggtaagacgggtatatccactgtccaggaagccctgtcccagctcaatcttacctctaagattctcatccagtctcccatagcaggctttccccacatagtgcatatcctgcattgcaatccgcccatcaaacatctttttcaactcttctgataccattctgctgttcctccgcttctatcgttcctttaccgctctgtaatgccaacaataaaacccccagctgtgatagaaatatcacactatgtctggggactttattcttaccactgtcaggatcccggcaggcaggaacccgttgattctgccgccggccttagtcataatcgttgattctctgtgtcattacaatccctgagtggaactggatttcaatcttatcttcgctgattaccttgatacccttaatcagccgtctgaccagttcatcgtcaaactggcgttttaggtagttggtcttttggatatactggcccatgccttccactctctggtcgtaagcttcggccagctgtttttcccggattagctctgttctttttttcttgagagcccggatctggtccgcgatctcccggtacgcccggtcgaattcctcgtcggcgctctctgttttggcgctgtcctcaattagggccagcatctgtttctgcagcgcatcgatcttctcatcatattcggtcggttccacgttatccgagtagctgcccaggatccggatgacattatcccggaaggcatcgataaactccccttcatcctttaccacggagttgacggcctccataatcgcttcatggagcgtcttttcttccaggcttggggaatgcttgcacttcttggttccgctcttcaagcggctgtaacagcgccacaccggcttctttgtcccgccgttcacccagacctgcctacggtaaggctgtccgcactccttacagtacatgatgtcagccagcacatacttggaactgtattttccccggatggtggttcccttcttgtttgccggacgataaacattcgcccggcgggcccgttcctcctgtacctggtaaaacagttcccgagggataatcgcttcatggttgccttcgatgtaaaactgcggtacgattcctttattgaccgccctcttcttttccaggaaatccacggtataggttttttgcagcagcgcatctcccatatatttttcattcatcagcatcttggaaatcaccgtggcatgccatacggtgtttcctgtcacagtccggattccttcttttgtaaatgtctctgcaattttgttaatgctgtttccttccaggtataatcggaagatcctgcggaccagctttgcctcatctggcacaatgaccagatttccttcttcatctttggtgtatcccagaaatttattgtgatttacatacaccactccgttttcaaactgcctcacatacccccagtggacattttcactcaaattccggctttcctcctgggcctggctgcttaaaatggtgatcagcatttccccgccatcccccagggtattgatgttctccttttcaaaatacacggcgatattctttgcctttaattttcggatatgggtaagggagtctaccgtgttcctggcaaagcggctgatggattttgtgatgaccatatcaatttttcctgccatacagtcatcaatcattgcttgaaagtcattccgcttacgggtcatggtggcgctcttcccgtcatctgcatagattcctgcaaacccccattccgggttgctgttgattttttctgtataataattcacctgtgcttcatagctggtctcctgctgttcctgcaaggtactgacccggcagtaggcggctacccgcagccgcttatattgggcccttgtatcacggctgtattccggattggctggaattacagagatgtttttctttacaacggtttctgttctggcccgtctcatccggtttcctcccttctgctgcttctcggataggaagctcgatttttacaccattcattaattcaaattcgaaccgtctgtccttgtgaacggtaatccgatgtatcgttgccttaaaaagttcactattaaattctttttggagtgggttttcttccaggactgttttcagtttttctgtctggtaattctggtactgaattctggacacccggtactgtaatctggcccgctcataaatcagccgtaccatctcctcggatggatactccggcttttcctccaattcctgcagctttctggtcagttctgccacctcacggctatatggcaggccctgcacgatggtttccggctctatttggaacctcccatccttcacccctctcatcagttccataaatgcttggatgatctgactgtctaccaggaatatgttccggcagcacaccctattttcatttatgtagtgcttacatttccagacgattttttctcccggctgtccgcagtgctccacgtaccggcggtagggctgcccgcagactccacagaccagactgcctgcgaacatagagcgatttccgaagctgttaggctgcatgacgcgccccaactctctgctcttttctttcctgcgatcctgtacctgggtgaacagtttcggttctatgattgttgggtagaattcgtctcccagatactttcgattctccaggatttttccgaccgtcccatgattccacaccggcttatgatttgcattgagcaccccctgctccgtaagttttctcgcaatctgatacagggaggctccttctgaatactcctggaagattccttttataatctctgcctgttctggatcaattactatttttcctcccgccatccgataccccagcggcatatggcgttgtcccatacttagctcacctcctgttcattttcttccagttccagaccattcttcagacggaataccagccggcgtccgggtagcaccgtgatatggtctaccagcagcaggaacaactcctcgtcatatgcctccagaatggcaggacgattgcggaaggcgcttatcagatattcggtctgggatatctcccattcaaaggctttctgcccctgtagctgccgcagccgcctccggtccgcttccagctgtgcctcaatctggttctgtctctcaataaaaatggcagagcttatgctgccttcggttaataacctgcccagcctgtagccctgccgttttagttcctgaatattctgttctatctcctgcatttcccggtcttgctctgggttgccctggattgccttcagcgccgccagcatggggatcaggatctcctcataattgctggcaagccggttccaaagcgtaagaaatgcagcctggatgacgtcctcgcggactgccttctggctgcatttcttactgtctttaatatgctggtagcaacaccactggattttttcatatggctttccgatatagattttctgcctgcgaaattttgtcccacactccccgcagagaatccgactgctgaatgcataccggttctgatatacttctgtataaaccgtatcctcacgctttaaaacaaggccacttgggcagtaatcacctttgtggtctgcaaaataggaatcccggatccgttcaaaatccagcatggggtacagtacctcgggtatctcaatctgttttcctctgcgtaacagctccgccgcaattcgtcccggatcactgatatcctctaacagatcgtaggagtccaggttaaaggaaagattgatgatctccttcagcgttccgggcgcttccaatttaagcgccacggaaaaaatatcctgctctttccttgtcatatgccgcagccgcgaatccaggaaatccagttccttccgcctcgtctcatctccgtaatccagccctataatcatctccgacagcggctgaaccggtgaaaccagagaacggaccgtcaccgtctgattctcggttttcccctcgtccagtatctttttgacagcctcagagtctgaagccgacataggaattctcatcagttctgaaaccatatccccatagccaatccggatttctaacattccacttcctcctcatttaaggcagtccctattccatgccggctgattaagatcgcatggataatcagacgcaacagcccgtcatggaacaactccggatcccctaactctgataaagacacataaggttttccagtacataattcctttgccacacagaacgttgcatagctgtccaaatcagccccgcgaaggcggaatcggctgtagtcaatcgtgcgctcctgcacaaatggcccggccttttcccaaagcctctcctcgctgctcaatagaaacacggcggcagcgaatcccggttccgtcacaagccccggatataaaccgcaacgcatgagcgcccgaaaccgccgcctgtgttcctcacttttaaaaaacataatccctttctccccttcctcccggagcttccctacccggaccgtcagggctgatcccggtagctcctctgtcaacagtctgagtaaaatctgatagaatgcagaaggcatttcctcgtccgctacggtatacagatggccgtccctaccctgttctttttctgctctccacacattgacatatcggcagcttccaatccccgctgtctctccagcctgccggctccggatgattccgcttttacgcggcctgaaccctggcacctgctgcatttcccgctccagctctgcgattgacgtccctttcataaatcttacagtcatggttctcagtcctttctttcaaatcggtgggattttgacataaaaaaagcagctatgcccttatcctaaaagacataactgcggtttctcgatctcactgtacgccagcactttcctatcaaagtctggctgattatttttcagctcttctctctagcgtaataccatggattccaattcatccaaccaccccatatccatctcttctgcttttgaactgatactttccatacggtatcccagttcttcgagcctgctctggactccttttacacagtagttggaaaatccttccgcctcctgttcattttcatcgtaacaggaaaactcatactctacccgtaccttgtagccgtccagaaaccgcagcgtcagatcgctggtgatataccccttaaggctttcatcatttaggaatgcggtctggatatcctttttaatcttttccttcatcccttcatacatcaggcagttattctccctgtcatcaaatccggtatgaaaggttatggctgtgttcactgtataatctttcaattcatgaatcaccatctttccttgatgtattgaccttacgaaaaccgatcaattggcaatccttccattcactgtttcattgacatcccgcccagaccagcttcctcgccttcccatgcagaatgagacgggtgttcacccggctgttgaatctcctctgtcttttgtgcaggcgcctcgtccagaaatcctcccaaccggttcggaacataatcagacagccaagtacccccaaacgtctcatggctcttaattctccatatcgccagctttccaagatcgagtttcacatcctcaaacggaaacagcaggttggtcaatccctcatggcaaaatgacttcacatgcttaaactctgtcccctccaataaaatgccttcctgtgttaacagttcgttgattccgtctatccactcctgcgcatcccctccgcagccctggagaatcagtccttcctgatttgtcattctgcgtaactcatcggttgtgatctgcatgaaattcctccttcattttttataatctatttaaaaaggccagccattttctaatctggctgacctggattttttattctatgaccttttcatttacatctccaatactggcgcctgctgattctccatgctctgacaatgctcagtcaccaaatcattcaactcctctatggaaccatactccggcagccaatcccacagcgttggcactctgcactggatggctaactgtttacattcgctccagtttgaaattcccatagcgctcttgagcgcatccattttgctttcggttgccggaaggctcaatgtatagttatcataaggattccctttataaatccatactttaaaactacaagtctgtttgaaatccggatctggtaactcattccctctatagatgggctccagttcttcttgaatcccgctggtatagccaaatgcatgaaacataccaccgtgtttttttatataatcttttccaatcccttcataattaaatctggctgcctgttcctccatagccatatcagcgtttcccttcagcagatattctcctaattttacttctgtagttgcgctcggcagatatctgaatttatccatgttgcaggaaagattgatcatatcttggagtgtctccggtttcatcatctcaatcacggttccgaataccgcctcatcctggctgtccatccatttcacacgataggccaggtagttcagttcttccaatcttttttctgtcaccgggacctcatacaggtactggcgcagatttggaatggacgattccacataggcggtagctgtttccaacggaactgtatccgttccattcagaagagaataggcttctctcatttcttcgattgtagccggcagactgatacctacaccagggcttactgtccggctcaaataaatcttaaacatttaatttcccctctctatccctccgcatatagccgtttctatttttgatactctctattaaaaaaggccagccattttttgatctggctgacctgaaattttaccccatatcctcttttacccgtctcacatctatgaaaaggccaaaaaatcggggtcaaaaacggccattttttgcccgattttttcctcgatttttcgtcaaaaaccactatatcttgtggtttaacccttctattttccttccaaaccgcaattccgcatcattattaccacctcgacattcccggtccccggaaacatatccaccccacaaaccttctccaccctatatcctctgtcctgcagcaccgccaaatctctgaccaaactggtaggtttacaggatatatatacaatccggtccaccccgaaatcaatgatttttcccaatgccttaggatgtattccatccctgggcggatccactacaatcagatcgggcttatcctggagttcatctatcactttgagcacatcgccagccaaaaactcgcagttctccagtccattgagttcggcgtttaccttggctgacctgacggcttcttctacaatctcaacgcccaccacctttttagccacagacgccagtatctgtgcaatggttccggttccgctgtatagatcgaataccactctgtcctttgtatcgcctacaaatccccgtactgtatcgtacagaatctccgcgccaagggaatttgtctgaaagaaagagaagggcgagatacgaaaacgcagtcccagcagttcttcgtaaaagtaatcctgaccgtaaaggatgtgggtcgcgtcgctctgcaccacatctgccagggagtcattctctgtgtgaagaattcccgccagcctgccatccagaggaaggccagccagcttttccgtccactttgacagcgcctcttcctctgtcctttcgcccagatactcccgctgtgtgctggtcaccaggtctaccagaatttcccctgtctttaccgcccttcggaccagcagatggcgaagataaccctggtgctgtaatttcttatagaaagtaatccccagctcctcaaaatattctttggtggccaccaatatcctgcagaaatccggatgtacaatccggcactcaggagtggttacgatatcgtaaaagctccccctcttgtgcattcccaatgccagggggccatcctttacctcatctccaaaggaaaactccattttattgcggtatcctgatgagttggggctggccttgattccctgaaactcgtaggtgccgtcctctaccacgctgtccagcagggattttacctgctctttttttatttttaactgttcttcgtagggcaggctctggtaaatgcagccgccgcatatcccaaaatgcggacatgcctcctccggcctttctgccggtgaatgctccagtatctccaaggttctggcctctgactttccctttctgcgcttggtgataacacactgaattttctggcctggtatggcattctttatcaccactctctcgccatctatatgcaggatacccttattcgggaattcgattttttccactattccttcgtaaatatcgccttttctcataaaaactctcattcctttcgcttcgcttaggcacaaaacagttatgaaatagcaagtttgtgcttccactattttatttttgatgttaaactctcctcagacagatacactacagagcacggaggaggaagtagaatcggttcctccatttgggatcaagtccgcataaaaacatgtgtcggctgtcttctcaagcacaaaccagtgacgccttgagctcgtaacctaatcattgtcaaagcaattccttaggtctttctttgctggacagccagtcaatgtctgtctattttacttaggagggctgttttatgttatctatcaaacactttgtctgctgtggcatggacgttcacaagaaatttgttgtcgctaccattgctctgacagactacaggggcgttacttcttatgttaaaaagcggttcgccaccttcaattccgatcttaattctttgaaaaaatggcttctttctttcaattgcactgagatctgcctcgaatccactggtaaatactggattccaatttttaatatcctggaggattcctgtcacgttgtcgttgctaaccccaagtatgtcagggctatcaaaggacagaaaaccgatgacaaagactccgcctggattgcggatctgtttaaatttgatattgttccttccagttatatcccctgtaaggaaattcgcatgcttcgggaattgttccgataccggcagaaactgattggccaccgcagcagtgagaaaaaccggttacagaatgctcttacggtttccaacattgcccttgcatccgtcctctcagatacctttggaaaatcagcgaccgccatcgttgactatatcctgacctgtgaggtatttgaccccgaatactgtaaatccctgcttcttaaaaaagcaaaggacaaggcagatgatgttgtaacctccataatcggttatgaactgcgccgtgaccaatccgttaagattaaggtctgcagaaagcatttcgatgaaatcaatgagtgcgtctccactctcgaagaaacgatttccgacctggctaaaccttaccataaatttatcgaattggctactacaattcctggaattacagagcagtctgccacctttatcattgctgaaatcggggtggatatggcggtattcaaatcctcaaaacgtttgtgctcctgggctgggctggctcctgaaaataacgaaagtgccggtaaaaagaagagcgtccatgtttcaagagccggggtgtacttaaagcctctgctggttcagtgtgcaaatgctgccatcaagagtaaaaacccttacttcagatacaaatatgaccgtataaaaaaacgtcgtggtcataaacgggcaatcattgccattgcacgcatggtgttgacttgcatttaccacatgttccaaaagcaggaggtatttaatcctgccgatacggattattccgctattcctgaagaaatgtaccggaaatttcaggaacagtatgacagaaatgccatcaaacgtttagagaaacgaggctatatgattactcctcctgctatggcctgataccctttattccataggatcctttggggcggcagtttactggtgctcttgttaagttacgattttttttgattttttctttcaacctatttctccgttctgtccgccgtttaggcatttttcttgtggttcattttgccgtatcattatatcatgcaatagggctcacatcaagccggccccaaaaggacctccacttcctacagaatcgagtagggagattttctctcccctctcacaccgtacatgccgtttggcatacggcggttcaacataacttcaaagcatgatgttccatgtaataatcattacagctgaccagtcctgccagtgtcagtttttcttttgaaattgccctgacaacacatgttttggtcacaacccactggtattggtctccacagtataccgttgctcgtgcaaggtcttttcctactccaagctgctgcactctcacctcaaacgctgttgattttcttctttctgccagcttctttcacgtccttttaaatttctgtacggaatccttgagaggtttgcatttccattcctttgtctttgtatctttataaaatccaaatccgagatatttgaggttacttggtcttgttatgtgtgtcttttcagcatttacattcaatccgagttttctctctttccagtccgttatcgaatatatgactcgcttggcactcgcttcgcttcttactgctattacacagtcgtcagcatacctcacgaagcgtaatcctcgcttctccaactctttgtccagttcgttcagcattattggcgacaatagtggcgaaagattacccccacccccccacatatggggttcctcgttccgttttcacgtacctgccctgcaccattacgcctgctttcagatattttcgtatcagcgattctgcgtctccgtcgttgataatgttatgaacaaggctcatccgtttatctcggggcacgttatcgaagaattcctctaagtcaatattaagaaatacgagcatctcccttattgccatttcacaactcctgttcggacggaatccgcagctgtgctctgaaaacagcggcttgcacatagagctgattacctgtattataccttactggcctttttttgatggggtggtaaaactcctttctgatttgctctctgatactgtgcagttcttgcggatatatccggcaagttcttcaatctccatgccgtctacgccgcttgcgcctttgttggcacggactttcttatacgctttgttcatgctcctcttgtccggtatcttttccaacaactccgtcatactctgtgtgcttcacttctctccgctccctgatttgtcctatgttcatgcgtttacggctcttatacgtttcgcctacatccgcttgtcagatactcacaggtacatacattcgttcacactgttacattgttcagaccttcggcagatgtttccacctgtctactatggcttctgctgacttctcacagttcgttgttactacggctaatgagacccgcccgtgagacctcacgggataagtccgtgttctttcctcgtctgccctcttgatttacgcccatggtttacggctgcctttaaggcttcgttatcttaggctaacttacacgccaatgaacgccttaatatcaagcttctgttcgtagggctacgatttctctatcccttcctctcgtccacgcctcgcgctgtgaaccttgggagtcgctatatagttcgttgacagctacgcctaagtggactttcaccacagaacacgggcatgcccgtcatacccaaaaaggaccgccacttcccgcggcggtccaaacaactatcctttttatcattcttcagtgtatcttataacagcattatagcattccctgttattcagccttttctgccttctcctccggctcctcatcctcaaagaagtcatcgtcaaagtcatcgtcgaaatcatcctcaaaatcctccagataatccggagtaaagaaacggtatacagcgtatgcaatacctgccactgctgccactgctccaatgatggccagcacccagagaatgcagttctttttcttctcgtcctcttctctcttgtgaagcagttcattgattctgctggaattcatcagttcttctacacggcttaatgcctctttccccatctgatcaaacctgtctctgtcaaatctgttcattctacccacgtcctttcttatatataagcacttctgccctcttgcttgtttttaattattatatcatggaagctcttgatttactatcccaatttattcaaattttatccaattgtttcaatccaattttaattgaaacccgatcccggcgggaatccgctatgcagataccggtttccgccaggcgttccggacgctgccacacccatcagaccttttttagctttgcaaaggatgcaaacatcttcttctggcccgcaccgtcgaacaccacggtgacttcgtagtccttccctccgtccctgatggacttcacggttccctctccgaatttgatgtgcctgacccggtctccctcgccgtaatccagggatgctgccttctgtaccgtaaatgctttgccaaatcccggattacccgctgggctgccggcgccccggcctgacagaggctgggatgcaccggatgcatatgcgttataaccttttccaaaggtgcttgtacgcgtattccctggggccggctggttccacggcagacctgcttcgccggaaatacctgacctgccaaatccacctgcaccatccccattgttccggctgccaaagcttcccagcaccggttccagacgctcctcctccagcaactcacccggcacttcctccaggaaacggctgggcttgcagtatctggtctctccgttgaccatccgctgtctggcgctggtaatcaccagctcattcttggcccttgtcattcccacatagcagagacgacgctcctcctccatgtctgtcttgtcatcggaatttatggacatcatgctggggaacagtccgtcctccagacctaccagatacacctttgggaactccagtcccttggcgctgtgcagggtcatgagggtgacccggttttcagattcatccatattgtctatatcagccaccagggccacctgctccaggaattcatccagtgtgggatgctcgctgtcctcctcgtagctcacggccttgttgaccagctcctctatgttctccagcctggtctgggactccacctctccctctgcctccagctcctgctggtagcctgtttcgtccataataccctctatcaaatcctggatggtgtaatcctctgactgtgccctggctcggaagctctccatctgccctatgaaggttccgatcttctcagcaaccttgcctatgcccggaatctggcgggcctccctgagggcgtcgtacaggctcatgccatgttcagaggcaaagatggttaccttccccatggtggtggctccgattccccgcttgggcacattgataatgcgcagcacagacaaatcatccactccgttggctatagtctttaaataggccaggatatccttgatttcctttctctgatagaaattcacgcctcccaccaggcgatagggtacgttgtaaaagatacacctctcctccagaaggcgggactgggcattggtgcggtaaagcacagcctggtcctgataagcatagccgctgtcccttatctccctggccacaaagtccgcttcctctctggccgtgtcaaattgtttaaaacgaatcaaatccccctcgccattggcggtccacagggttttgtccttacgtccccggttgtggcgtatgacgccgttggccgcattcagtatattctgggtggagcggtaattctgctccagcttaatgacctttgccccgggaaatgtctcctcgaagctcagaatattccctatatccgcccctctgaaccggtaaatggactggtcgtcatcccccaccacacacaggttcctgtacttggaagccagcaggctgatcagcttaaactgggccaggttggtgtcctgatattcgtccaccatgatatacttaaaccgctcctgatagtaattcaggatctcgctgttgttctggaacagctccactgtctttactatgaggtcgtcgaagtccagggcattgttcttcctgagacgcttctggtactccttatatatctccccaatcctgcgctgcctgaagtcctgccctgcatttaacaggaactcctcagggccgatgagcttgtcctttgcggaggatatggtgcctaacacggaacgctccttgaactgcttggtatccacatccatgaccttgaacacctgcttcatcagggtcttctggtcgtcgctgtcatagatggaaaaattcgtggtgtagcccagatactctatatgcctgcgcaggatgcgcacacaggtggagtggaaggtgctgacccaaatgctctcagccccaaatcctaccagctggtccaccctttccctcatctctccggccgccttattggtaaaggtgatggccaggatattccacgggttcacctgcttctcatcaatcagatatgccactctgtgggtcagcaccctggtttttccggaaccggctcctgctaaaataaggagaggcccttccgtatgaaggaccgcctccttctgcatgggattcaatgcatcgtaaatactcataaactatgtaccgccttcttaactgcaattatgtttattaagtataccattctgaatcccatcctgcaagacctgcatttgggacgattgcaggcgactgcaggcggcaaaatacaatcctatcttacaagcaatcccccatacatgcggctggtccttgttccaggtttgatttcgccattgattgaataaatataatctccgttcagcaccaggccttccccgcacggggcgtcaaaagaaacctctcccacagcgctccatgcattttccagagcatttaaaatcagtaaagccactgcatccccgccgctgaatacataaatccggccatccaacacctgtgatacgcactgtgtcctggtttcctccccctggcacaggcgccagttccactgtctcctttgtgtccagggcaaacgcataaaacctgttggatgccttgccgtcctgtttgcctgcacccacaatctcatcaaatgtgacttctcctttttcatccgctttcacaagcgtaattttatcaccttttccatccaccgggcttcctccaatataataaatgtgtctaagaacccatgtaaaataaggggaatttcccccttgtcatctagtattgaatactatataatggatatagtaatgtgataagaatgacagaggtgacacatagatgaagacaaatgaagaacgtctgcaggacctgttttcctatctggagaacctgtcccatgtcaaggcggacgagattcctgatattgatttgtacatggaccaggttaccaccttcatggacagccatttaaaagatatgagacgccatccgggtgataaagtcctgaccaaaaccatgattaacaactacgccaagaacaacctccttcctcctccggtgaagaagaagtattccaaagaccacatgctgatgcttgtgttcatatattacttcaaaaacctgctgtccttcagtgatattgaagaactgttccgtcctattacgtcgaagcatttctcagggcagacatcccggctgtccctggaagatatctataacgaagtatttactttggaaaagggcgagatgaacaatctgaagtctgatgtggcggccaagtttgcccgggcccaggatacattttcagatgctcctgtggatgatgaggacagggagtacctgaagctgtttgcctttatctgcgagctgtcctttgacgtgtatctgaagacacagatgattgaaatgattgcggaccagctcagggaggatgcgcccgctccccgcaagaagtaggcttcataaccggttgaaacccgcccatagcggacaaaagccaatcgagtaggaggaaggcgattatttcgccttccgacctctcacaccaccgtacgtaccgttcggtatacggcggttcaatcaacttaacatgtaacagccttttcggcgtagtagtcttccatggatacaagaccaaacttagctagtctctctttactgatacaaatgtggagattccagcttctgcacactctggcatatcctttggcatatgaaatgccatgtgccgcatttggcggcagaccaagtttgataagattcttttccctgttctttggcgttttccagtgtttccatatgcacatgcgcagtcgataccgaatctgtccgtccatttttgcgcacagccttttcatgcttccgattttgaaataatttatccaccctcggataagccggttgagtttcccaattttataaccattgcccactccccagctcctgcttgtatatttcttcatctgcgccttgaactttgctgccgctttcgggtgtggtctggctttgtaccctttggcaaatgagtcatagtaaaatccaaaccccagatacttaatgccctttggtttatcaaccctgctcttttccgcgttcactttcagtccaagcttttcctctataaaccgagccacgctcttcattacccgctctgccgcctgtctgctcccgaccattataataaggtcatctgcataccggacgaaatccagcctccttgcttccagttctttgtccagctcatttaacatgatatttgctaacagcggcgagatatttccaccctgcggtgtgccgactaccgtatcttcatactcatcatcaatcattacgccgctgaccagaatctttcttaccaccgatatgacatctccgtcctttattgtccgtccgaaaatcgtcatcagcttgtcatggtctactgtgtcaaagaatttcgctaggtcgatatccactatccagttgtgtccgtcattcatcatttccaatgctttaaggactgcctgctgtgcacaccgcttgggtctgaatccatagctgtggtcgtgaaactgctcctcaaatatcggggtaagcacctgtgccaccgcctgctgtacaaagcggtctactgctgttggcactccaagatttcttgtaccaccatcgggtttgggtatctccaccctgcggactggcttcggcttatacttcctcgtccgcaactgttccttaatgttttcgccgttttccgaaagatatgcgccaagttcttcaacggtcatcccgtccacgcctgccgctcctttattccttacgacttgcagatacgccgcatttagattatccctgcttaatatctgctccatgagactgcttgtgtccatgcgttgtttcctttctgccccttttgcctttgccgcctttgaagtcatcgacaggcgtatgctccggctacgaagtggaacgtacttcaactgattgattgttcagcccttcgctccgtccccattacaggaacttcctcactactatggcttctgctgacttctcacaattcgttgttactacggctaatgagaccgcctgtgagacctccccagttaaggtgcgtgttcttttcctccatgtacctgccgcatttactcgtacttccggcaaccttttggacttcagtgccttttgccaccttatccgtatttccgagccttatatgcggttcctgtccgtcaggtcagaggtttgcttacagcttctttcagattccgtctcacggcggacacccttgctgttcggctatgtgcttcgttgttgcctacgcgcacttgggactttcacccattagaaaacgcccatgctgggcaaacaaaacggatatcgcggccattcacgccgcaatatccgttttttaatacaccctttatcatactcagctttcgatatcccctttttctgcctgcgttccccttgtgagcctggcaaataccatgtcgtatccgtcgcttccataattcagcgaacggttaacccggctgatggtagctgtagatgcgccggtcttctccgcaatctccaggtaggtcttgccttcccgcagcattttggccacttcatagcgctgggacagggacagcagttcattgatggtgcatacgtcctcgaaaaacttatagcattcatccggagtctttaaggtcagtatggcatcaaatagatggtccactgcttctgttttaattttcttgttcatgtcctggttatctctccttataattcatacggccttccccttccgtatggtattgtaaaatgattacaggtcatataagccccatacttgttcattttagcatattaaagtctgaaagtccatacgtggcaggagattttataagggcatttttttcgggtatatattcttctgttttccctgcctcttttaggacagcatgaatttctcaaccaccagccctacgccgtcgtggttgttggatgcagtgatgtaatcagcggcctgtctcaccgggagaacggcattttccatggccacgcccaggccggcatacttaatcatggtcatgtcattgtaaccgtcgccgcaggctatcatctgctcccgttcaagccccagcacctccagcaaacgggccagagactgggccttgtcgattccctttggcatgatttccaggaaatacggctcggaacggtacacgctgaaatcacgccccatagcggcttttaccttgggctccacggtcaccaggtaatcgccgtcatccagcatcaggaacttgggcaccctgaaatccacataggacttcatatcctccacctgtcgcaaaggcaggtggttgatattggactcggcaatggcgtagggacattcctcattgttggtgataatttccccgccttcatatgtaaggatatctaccctgtgctcctctgccagcccgattatcttctggttggactccctgggcagcaatgaagaaaacacggtttcacctgtcttacagttggttatcatccctccgttgtaggacaggatatagctgccgaaacgcgacagctccagctcccttgccagcggctccacgcctgccgtgggacggccggatgccagcaccaccacgtttcctgcttcctgggccttcatcagggcctcttttgttctgggcgtaatgattttatcacggttggtcagtgtaccgtccaaatccagtacgattatcttgtagtccattgccttttctctcctgtatccgattctttatttccacttatatttttccgcgttttacttccatgtttccatttacacttccatggaaccattttatcagaaatacagcgcagtgacaaccggaacagatattaatccacatccctgagaccgaatttcagctctaccagagccctggggcggcctcccttggcagcgctttccctggcgcagaccgtccccaggccggctgcctgaatcttgctgagaatccgcctggcgctcctgaccgtgatgcccagacattcagccagctccgaagcgtcaaacacatagctcttcctcacaccagcaatggcctgaatcttcagaatggattccatgctgagtcctgtcttttcagagatcgtctgaattttggggtcaaaggatatcatgctgtactgaagctgctgctccaggcccagcgggccatgaatcttctctccctcatcaatctgaaagattcctccatcccccttgccaagagaatattccagagccttcctggcatgcatctctgcttggtaagccgtcacgcccatgcccagacctgcatttactaccagtcccagattctttccctccccctgaagaattctcagatccttatggttcttctttcccttcaccactccggaattggcataaatcacatattcatcacgcccaaaggggaatacagatccctggattccccttacatagcgtatcagttccacttcaaattccgccttgcttgccatggcattataatactggtcctccctctccgggaagttggacatctgaatcaattccaccgcaatctgcgaatattctgcctgagccagggcccagcccttgtccagatcggccagggcatccctgacctgggagcgtttgggctccaggtaaaagaccctgccgcccttttcttctatcatatgatagactgccacataagcagtgaccgccacatcggtcatcttcttctccagcagctccatatgccatgcaacatactcttcctccgccacgcctgcaagcagcgggcaggtatatatattcctgggctgtatgtgaaaggcgtccaggatatcctcgataatctgcttttccaccacgtcaatgctgaaggtgtcgatttcccgcccttccctgaccattttcagaaatacttccgagatactgctggcggaccgcttgatgtatgtgtaaggtttctgcatctggtgatgacccagcacatagtcgcagatgccgcttccggtaaaaatcacaccgtcgcactcctgctcgcagatgtcaatgacatccacggcctctcttaccagctcccttgtatataaacgcacctcatgactctggtcaatctgatgaattgctttcctgatgattccgcaggattcctttggccccactactcccactatcatttatactgtcaacctcccgattttttgcgcacagcgcgccatataccgattataaatcagaagcgtcgtataaatcaaccacctgatggtcttttaagagatttaggtattcttcctttgtcagggcagggcggaaattccccatgatttcctttcccctcgcgcctccgtcccacaaaaggtcgatgatggtaagggccatcattttagcaggtacaatataggcagtgtaagggtcgtccatccggtatttttccgtgtggaggccgccttttatgccgcctgcccagatgtgcatgcagggcatgatctgggaaatgtcccccaggtccgtggaaccggctgtctcccagtcctccacaaacgcatcctcccccgcgtgttcgtaggctatcatgttgtcccggtacagacgggcaatccggcggtccgtattcagggggaggtagccgatgcagtcgtgaatctccaccttgccccccagagccattgcggccgccttcatgctccggtttactttatgggaggcatcctccatggcatcaatggtaaaggcacgaaccatgatttccatggtaacacgctccggcaccacatttaccaggccaccgccctccttgattacaatgcttacccgcaccttatcctcatccctgaaggtttccctcagcgcgtgaatattgttcatggccagctccgccatgttcagggcgttgattccctgctccggggcaaacccggcatgggctgcccttcccagaaaatgcacggtcttgctgatgaatccattgcctttggtgtccaggatgcagcattttcccggctccatctccatcatatggcactgaagaaccatatccgtatcgtccaggcccccacggtacataagctcctgttttcctcccagatagtggatggttccctgactcataaggcggttcctgtactcatagtccacacattcctccgcgggtatggctatgaagtcagcggcgccgcccaggtgctccataacgcctgacgtaagaattcccacggctgccccgtacaggtttgccagctgtacattatgcccgcaggcatgaaccagccctccctcggccgcatccggatgggcgtcgcacatgatgcagtccagctcgcccatcaccgccaccctgggaccgtttcccttgggaccggaggatacacggcagccggtataggatacgccggtctccggctccagcccaagcttgcgaaaggcttcctccataagttttcctgtcctgaactccttatatcccagctccggcgttttataagcttcctttcccagggcaatgatttcatcctggtgttcctcaatcacattgaggcatctctgtttcacttcttctttgtccatatcatcattccttgtcatcttacttacagttctgtcatccggctcataaccctggtagcattccagagttcatccatatccagcgcttcctgtaccgtatgtacatccatcatgccaacgcttaatataaggctgctgcagccgtacccggccaatatattgccgtcgctgcctccgccgatgaccatgggcttaggttcgattccttccttctccatggcctgggctgtcatgcggtacaaatcactgtcaaggcttacctccagggaaggatatgccagttcatgttctatttcataggcggcacccatctccaggcaggctgctttcaggcattcctccatgtgggccacttcatttttaagcttatccatgctgtgggaacgtatctcggcggtaaatgtcacttcatcagtcacgatattggtggctgcccctccctcgatccgcccgatattggatgtggtctcctggtcaatccgcccgatatgcatccggctgattgccccggacgctgccaccacagcattgattcctttttcaggttcaatgcccgcatgggccttacgacctctcaccgtgcaccttatggcctccatggccggggccttataggcaatgattcctgccgggcctgtcgcgtccgctatgaccatgttcttgcatggcaggcgggacaggtccatgtgtttggttccctgcatgcttgtctcctcagagacggtaaacatgatatagaactccttgtggggcctgtcggtctccacaatatcctcaacgatttccagtatggaggccacagcccccttatcatcgcctcccagggtggtggtgccgttcgtgcggatgatatggccatccaccaccggcttcacatccttacacggctcaatctggtccagatgggctacaaaacagaagggaggattacagggctcgcccttgacatgggcgataatattaccgccgtttcctccatatgcctttccggcttcatctatggaagcctctattcctctctcctcaaaatagtccataagccattggcactgctccttctccccgccggaagggctgtaaatctgaactaattccaaaaaacgttcctgcatccgctcgcgtgacagcatagtcatcctcctcattttataagccttcatgtgcacgcagcgcccgtgccccgggcgcttgtgcaaggtatcctatccctttttcttgtccatcccttttccttatccgtccctgcttatcagtctctgcttatcagtcaacctgcagctctttcttgtaaagaagcttgcctgcgtagatggagccaaatacagctaccagaataaccacataggatggattgcccggtataaagcttaagaagcccagcttcatgagccagttcattccgatggcgatgatggcggccaccacgcccagtttgggacgggttgcggcaaactgtccgaatacagcaccgaagagcgcgggaagcaggaaattaagcgcctccttcacaggtgcaggaagaatgttcaggataacgcttcccgcaacagctcccacggtaagaatcacgatattgacgagaatggatgtggcaataccgatagtggaaataatggagccttcctccgtccccatctccactccggctgcctcctgcgccacggaagaacatggcacacgcatgttggaggtattgcctgaaaggaaggtaaggtaggttcccggaatgcccagaatcgggaagtaggaaatgggctcaacaatgtaaaatgctccgcttacgctgatctgcataagagtacctgcgataatggcggacaccggaggcatgtagcctctgaaggccatcaccagcgcaggaaggaatcccgcgaaaatgcccagcagcagtgtaatctttccccatttgacgattccggggatatatgtaccagaataataatcgtttttcatcttctaaccctccttagattacgctgacagcatatccgatgaacatgccgctgaacatggcgattgcaaatgcccactccctgagccagccgatatccctggccctggacagcttcaccagtatcatcatgatgacgcagcccgctatggtagcgattgccggcgcgttggtaaatgtcagggagccctcggccgtaaagaagttgccggaagccaggttagcaaacgcgcccagcatggcgcccgcggaaatgatgggaaccatcttggcattgccctttgacatcaggtggttaaccttgtccatcttatcgcagaacaggaaggtgaaaatcagccagcccagggagccgcataccatggtccacacgccgcaggcaaatgccatggtatccatggtctgaagtgtctttcccatggcctgcgcaccgaatccggccgccatggcctcatagttgaccgaaccgataaatgacagacgcatccatgccaccggcgcacccatggtgaccagcagggatatcatggttaccaggattactacggacgggccaatggatgatatcacactgctcttgattgccttatgtacctggtccgtggtaagagccgactcgctggccgccttcatagacctcttcataaacagaattgactgaaacactaccaccgctaccgccaaagccgctgctgcccacatcagaggactgttggcataatccaaataattaacactttcgttcattctgacctccttggttattcccctttccaaaagctgcagtcttttggattttctagtttcggtcatgtccataacatgtccttatatttatatttactacattttctcggtattgtcaagtgcttttgttgaatatttgtttaagtgacagaatggaggttggagggtgtagtgcagaatatctcaaagaatgggagctattctgaacaaagtgccttcggcactctaaactcccctgcccctcactcatgagaggatttggggggttctctttatatctttttattgtaaaatgttcttatgtgtaaaaagaacatcctccaaactattttttctgaccactttgaatacgtccaatatgtcatccgccccggcaacaatgttttggataacatcgacaggatgatcaattgccatgctccttctttcgggggcgctttctttggctgccctcattgtggtaaccttaaatttgttcccttctcctgtaaaagccgcttctgtccttcctgtggcagcatgtataaccagaaacgggctttacgtatgtcctgtaaactcgtttcctgcaaccacagacattgtgtctttacaatccccgttaaatacatcagcagatatcttggaagacctgtcattgccacttccaggattgatgcctatgacggggattgtgtgacgttccattatcagcgccatgaggaccataaaacaatcacagaatgcatccctgccattgactttatcaaacggctgatcgtacatatccctgacaggcactttaaaatggtccgctactacggcatttatgcaaaacaccataaacaggaaaaaaatctcaggaaatgtttatcccttagaagcggcaatatctttcccgattactggactggcgtaattcgattcttctggcctttggctatgatccgctcagatgcccgaagtgtggcacttctatgttggttttagaagtttaccacaaaaaaactgcactatttgaacgctatcgaaaggttatgggatatggatagatccatacgccttatcctttctctaccgtcagatagtgcagcctaaaccaaaaacaaaaaactacatagacaacgtcatggcgaagtcacaccttcgctcttttgctatgtcattttttatctccagtctattatacaccatctttgccgatttgcgaagtttcctaataaagaaaaaaataagacccagaagaattaactcttctgagccttatggtctgactctattatccggattcagttgttacggatcatgatgccttatcaagcatatcatggatatatgtccgcaggccatcctccgtatctatgccgtatttctggtttatcaggatataatacttcataatccgctctttcggcagaagctcactggaagggatgctgtcgccgtatcctttcctcgcctccatccagggatcctcattgtgtgtgatcttctccagcacctttccgccatacatcccgaaagtattcaccacaaggtcgatcacacgcttctcatcatccgtcagtgcatcctcagttccactaagaagcgcgaaccgtgcatcatcgatcggattatatttgaaatcccggaacaggtcatacacctccggataaaccggaccgtggatccatgccctgcagtcctcttcaaagatcggttttccatacaatgcagaataaacgccctggataaaatacaggagcttctgcagcatgagaggcgttacctcttccagcttttcaaatatatatgcgatcaccctgagcatcttatccgaaacggaaaacaggctctctatgctttctgatgccgaaagcgccttcctgtatgccgcatccgtcagcttctcccggttttccatgagcttatgcttcatataggcaggggatgccagcgccgcctttacgatatcagaatattctttggaaggtacctgtccttccagataacgcggaatagtcacctctccgaaacccagcgccagggacagaggagccttaccgatcttatagattttcatgagcttttcgatatcgtcaaccgatacaagcccttccgccaccctgtactgctcatcgatttcctgaacattcttatcaataaggcctggaatgctcatttcctcaccgcactccgcacagacagccacggtgattgcaaaggtataatccttatcccttatattctttacgatgtccttcttctgcaaaaggtactcggtctctttcctgcactctatgcagaaatctcttcttcccttctctgtcataatggtcacctccgatttgcctcctgattatttgaaatagtatgtaagcggatgtttctgttcatggaacgaaataacgatcacaaaacagttctccagcttgttgaatttgatatacaaagatactgttttttcttccgtcccattcctctccaaaagtgacacatccttgccaaatacatacaggttctcatgttcatagcccttatgctcattctgcaggatttccgaaaaatccattacagtaaggctcaatatgatctcctttgcctttgcctcgtcaataacataatccagaaacagattgatgttatcctgccgtctggcattccgatcaagccggtaattatccttttcaacagcttccttcacctcggaaagatactgctctatgtctttctgatctatgctcaatactttatcctccgcagagtgcatgatgtattttttgatttttttcatcatcagtataaccctatgattgctttttgtcaatatcccatcatcaaaagcggcaggaaaatttcccgccgtcatttgacaccatattcagttgggattacccgctccggccttatactgcgttcctgcacatctcggtcagctgcttcttgatcctgcgaagcttcttagagattgtgttctgtgacacgtctttcatctccgcaatctcttcctgtgaatagccctccacataatacagacgatacaattcctgatcgtcctccggcagccttgaaagaatctcataaagaagctccttcagcggatccggctcttccgccgccatctccgcaagctgcttcgcataagtgctggtatctggattctcagtcatcatcaatccgtccatcgacagattccaattcttctccggctcttcacccggatgctgagccttccactcttccagagccttcttctgccaggattcaagctgcggtctgctgttcttgatgttgttatagacctcagcatcatcgaaggaatggagcgacttgatccagaccgccgcctcatcaccctccgcaataacggataccatcccgtcactgaacctgtacacatagttgcctctctcacttgtcggtgtttttctgaataacatcttttgcctccgtttctggcccggagacagtgagacaagacatcgacaggcttatcccccgacgtacccatgctgcaaaaagagcgcaatgaagcaagggtacatacatatcgctttccgctgctgccgtaccggcaactgtctggaatgcaatatgttcgtatcctgtccactgcgcatcatgtgccgatattaaatttgtaaatagttatttggatatccgccggatacccatcagaaccttcatccacggatgaggactctgatccgtacccaccgtcctactggtataggtatgagaaaccccgtttttccgatttccctcctatatttctctgggatatttgcaaccccctgtcttactaagcggtttttcaccgcatttttccggtatcatcatccagatctcaaattcgtctcgatcgcgtatagttcactgaaaacctcagacaaatcggatgatgcgatctgctcgattgactttgcctcgtatttttccaggacaaaattcacggtttctgcaccaatctctgactcgataaatgaagctgtattttcaatatttgcgatccaatttgttctttcatctcttgtcatttctgcatacctccgtctctttttctgtgtcttttgcctggcacgccttcattaaagcagaatggaaaaatgctgtaaaaactcggtaagttgagaagaaatggcttaaaataaggcttttcagatttgagcataaaaaaaaaagccccctaagaggctcaatcccaacttggtaagttgaaaaaaattatgaaactcttgaattctttctatctttggttccgattggctccattttgaccacttcaagtaatctattgaagtccacaatgctaatgcacgggtatcggtcaataattttcagccagatacgatccggatcttgatatggatgtagtttgcgctccgatttctgatacacttcttctatcagatccctgcgaagccctaaaccgacacagatagccatgatagttccggactccattttattggattcattatctctaatccgtttaagataattctcatgtactaatgtattctcataaaagtccagaggatccgtccatccttttttatcaatcataaatgtcaggctctggcataaggtggtatcttcatccctgagcagcctaaggaactctttttcagtctcatcattgcatagcaagaaagatcttcctgcgcatatttgtatgttataaaatgctgttcccttatattcagggcacatgtaggaagatttgtcttcgccctttttgtcagatgtatttcgccgtttttgacggtgatattcttctgtccgggacaacaaagtacccatctacaaataacaggccatatgactccacccactcttcaagaatgggattatcggaaagcatctggaatgactcttccaaagtcagaggaacaaaatcttttgtccggttcaactcagcataaacagcttcataatcttgaaagccggatattctttcttccagccccacttcaagcaatcgaatcttaacagagcttctcgaaacaatgaagaactcggcaagttggtgaatcagctcatcacaggaattgatatcattatcaagcagttcctctgccttcttccggaacatatttttaggcatcagaacccttggagccaacctatgtgcctgccattccagccactcgacctcattttgcttggtgcgcttcccgctcggcggctcaaaatttgtacgtttctcattgatgcagctcttgatctttttcacggtcttcaggaagtccgccaagcccttcatagccagaagctgagggttcaccgtcacgatcacttcatctgccgccccgaaacaggttgtcaggttagactgcggatcaaagtccacagccagaaccttcttccccttcttctgcagggaatacgccagattgaacgccgtaacagatttaccgacaccacccttcattgctccgatcatgattatctttcccataacatcacaccccctgttccgcgcaaacgccgtactccgctgttctctccgctacaaactgagcacgcagcttttccttctccgccttaaacctcttttgcagaagctctgtctctctttccatgaaagccgcctctgcttccttcagcaccgccatttccgcatccggcgtgataaccagcttgtcgttctcacagctggcagtaacatacccgccgatctcaaagcccagctccttcagccactgacctttaagcatgatggtcggggttgacttgtaattgtatccgctcattccgtagatcttcatatttctacgctctttgaatctcttcatctgatttcctccttcgattatctgtaacatggatgctgcctgcatccgaccgccttgaaagagaaaagggctcagatccgtctaggagcagactactcccgcggatcaaagccctatttgctctgataagcatcaccccactctcacgaaggcattcttcgtccattcggagcctggaaacccctctgccttcatagtagtaggtattcgattgtaaattcggcgccgtccttacatctcaccccctcttccagtaggtcaaaaaaataggacttggtcaggaagcctttaaaatcggtcttctcttgacttgtcctattatgccgtactcatcaataacaatataatcaaaacaatccctggcaaagtatgattcattcaataccggatgtgagagcactgcgcgaaacattggatgaaccaatgtatatttcccctaaatcctttcttcggaatatgtaggctttggggtgaaaggaccgttccttttcattgtaaaaccgaaggtccacccggtcccccagccggtcctttataaggcacaatgcctccggctgtgtgatccccagataatttccggtcaggattctgattttcactccgcgtttcagtgcctgttccaaatcatccagaatcatacgtactcctgactccatgaggaatgacacaatcatatcaatctgtacagccctgagcatactgagctctaactgatacagcaaaaaacgattcttatctctgcccccggtaatgacctcacagggcccgatatccctttgtatttgtttcaacgattctattttttcctcaatatcatgttcagccatttttcttctgctctccccgggcggacatcgtccgttacccacatctccatgatgtcaaatgtatttacatcttttaacagtttatccatctttctttccgtcatatccgtaaaatagcggccacttggctcaccctctgccgttccatatttaaaggaggtatacaggattccatggtgattcaacgcacgagccattttgacaaaaacatcctccagctccccataggacagatgcagtatggaagaacatgcccagattccatcataagcctctttttcatctaaattctgaaaatacatctgccttacttcaatgcctgtatattcagacgcaatcctgaccagctcttcagaaccatctatggcatctgtctcaaatcccctgtccatgaaatacctggtatctctgccggaaccgcatccgaagtccaggattccagccgctgtaattcctgctcaaatatatatatatttacaaaaagcagaaggtcaatctccgatttgtttccattctccttaggcagatatggaaaatagcatattatactctcattaagactgctacccatttttatcacgactactgtcaatcatatcatttttgggcatcacaggcaattaaaactgtttaaaaataaatacataaccaggtactatcagattggtctccataaaatcagactctctataagaccactcaatatcacgccggtataaaacacggcttccatcagccattttaatcctcggttccccatgttttattcaccgattccccccagacctaatagactatactataccaaatcatataaggagcatattgatgaaaaaagcaattagcattcttctggcagcagccctgaccgcagctgccctaactggctgttcaaaatcatccggcagtgcatcctccggcaacaccccgttggtcctcaacgaagtggcccattccatcttctacgccccccaatacgcagccattgagctgggatattttgaggacgagggcatcgacctgacccttgtaaacggagctggtgctgataaggtaatgaccgcccttatctccggcgacgcccaaatcggttttatgggttccgaggccagcatctacgtataccaggagggttctcaggactatgctgtgaacttcgcccagctgacacagcgggcaggcaacttcctggtgggacgtcagcctgaggacaattttaaatgggaaaacctgaagggcaggaaggtcctcggcggacgcgcaggcggcatgcctcagatggtcttcgagtatatcctaaagaaacacggcatggacccaaagacagacctttccattgaccagagcatcaatttcgggctgaccgcagccgcctttaccagcgatgacgcggactataccgtggaatttgaaccttttgcaaccactctggagagcgaaggcagcgggtacgtggtagcctctcttggaacagaatccggatatgtcccttacactgcttactgtgccaggaagagctatgtggagcaaaacccggaaatcattcagaagtttaccaatgccatccagaagggcatggactacgtaaactcccattccgccgaagaaattgccaaaaccatccagccccagttcaaggaaacaccggtggataaactcgctgtcatcgtaggccgttataaggaccaggatacctggaaggatgacaccgtattcgagaaagaaagctttgagcttctggaaaacatcctggaagaggcaggtgaactgtcggcacgggttccctatgaggaccttgttaccacacagttttctgagcaggcagcgaaatagcctccgctttactcacgcagtgcactttaattcccactaactataaacagccggcttataaactgttacctgcccaaatgcagtacagtatataatccggcctgtttcatttagttcacctgtttcattcatttcaaccgctccgcctgccactcttccacgccccaccgcccgtccacgccgccctaccactcttccctgtacttctcctgatacaaatacagccatggcgtattcaccggcaatgccgcgaactcatccctgtgatactcctgtaccttcccgccccggcgcacccgcaggagccggtccgccagagccagagaatctgccaggttcactgccataatcaccacaggaatccccttatttaaaaaacgttccagcagctccatgatatggatgcgcagggatacctccgcactcttaaagggctgcacacagaacacgactttaggattctgaaggtaaatgcgggtatatatgaggtcgtatttctgccattccgtcagacggtccacaggcaggtcaaatacctcctcccccaaaagttcagcatattcctgacgcaggcttttcttaacgcgcttgcttccccacacgcctctgacccggtggtccagagtaaaacaaaggttatccagatagctcaggttggaaaacagcatggaatgtaccggcagttcctggatcactgcgatgcggcggtcatttttccctcccagaggcgttccgtcaattaaaatctgtcccgcggaatgcctttcttcaccggacaggaccggaatcagttcctgaatcatgcagttatccaaatcctgcatcaccagacattctccccttgcaactgaaaacgcaggttctccctctgcctgaaacacaatctggttttcctccggccttggcctctggttcatctgctcccgcacatgacggtcaaagtcctcggtgcagtgcagaaaaaacgggtccggcgctttgtcctttgcctggaagcattttataatctgtccgttcagcataagggccgtccgaccgcatatctgacgcgcttcctcgaaatgagcggctatgtagagaaaagacatgccctttttcgcgtagtgatgcaggattccgctcagctgctccagctccgcgtcgcttatgaaggtgcttatgtcctccagcaccaccagatgattgcctgccaccactgcctttaacagttccaccacaaaccgttcaaagttagtgagctcctccacataagcgtcggccggaatctccactccgatatcctccatgaagggctttaactgttccctcagtatataaggctgcatcagccgcttcctgaatccgggacggagcacgaaaatattgtcggccacagtcagtccctccgccagacagctccggttgcgaatcacgctgacacggttcatggcagtttgatttatggcggtttggttcatgatggtatggttcatacctgtacatggaaaacgccagtcgtttaccagcctttccttataatacacatagccgtaatgcaggggaaggttttgctgcagcagacgaaccagggcagacagccccaggtggtttaccggcaccagacccagtatctcgcctgcccagattgtcatgctgaaattctccagcagggccactccctgttcccggtaagtcacccgctccatgcgcagtatctcttccctcattttaatgcctctttgttcttcaagtccctgtcattggtaatggcaggcaaattgatttccacatctgtcccaactcccggcatggaaaatacatgaagcccgtattcctctccaaagagcaggtgaatccggttgtttacatttataagggctatgccgccccgagtctctgaaccctgggacgcaaatgcctgaccgctctttcccagccgatcgttcatcctggacaatacctcctcatccatccccaccccgtcgtcagaaatgcgtatcagcagccgttgtccgctccgttccagatggatggacaggtggcctgtgcctatcttgcactccgttccatggatgatgctgttctccaggataggctgcatggtcagcttcggcagccggcagccatatatctcctccctgtcctccggatcgcattctatggacaggctcagccgtgaaccgaaccggtactgctgtatccggaaataggtcctgcagttctccagctcctcctccacggaaaccaggttttccaccttgctgatggtgtagcggaaaaatgtggccagggcctccgtcatatccgctacgctggtaagccctgcaatcaaagcctcgctgcggatgctctccagggtattgtacaggaaatgggggttaatctgattctggagcgccagatactgggcctgccgcttgttaagcttaagcagttccgatgaatccataattttcatcatgtgctccagcatccggtacaccatgggagtcgggaccacctggcacaagtcagtcaggtcggtggtggtatatccctccaggaacaggtgcatggtccgttccaaccggaggtagggcctgagtatccatttactgaagacccatatgcaaataagcagcagcgcagcgcccataacgccgggccacaaggatgcatttccccggaacgcccggaccaggcaggccgcagtctgaaacatcgctaaacacagggcggcaataagcagcgcaataacccgcaccgaaagatatctgaacctgttttgttccatttccccgcctccctcctgttccctttatccatacagtttccggtattccaccggattcagtcccgtggccttgtggaaggtatgggtaaaatgcttcctgtcactgtaccccaccttctcacatatctctgcaatgggaatactggtctcgcgaagcaatgtcttagcttcctcaatccttaccctggtaaggtatttagcaaatccttcccctgtctcacgcttgaacagcatactgaaataattgacgctgaaaccgatatcctcgcacacggtctccagggtaatgggttcgtcaaaatgctgcatcacatactgtttggcaatgcgaatcggtcttgcggcctcgctgcttcgcatctccctggcctcagacagcagcctttcctggattcgggccagctggccgaaaagctctcccgctgtcctgcactggctgcagctgttcacaaattcctgctggatttcctccacattgctcagggctgtgcgggcgatgaagaggcggcctgctgacagcaccagctccagtatctccctgccgcatatacgatccagccccagggcctctgtctccagcatacggcaggcctcccctgcctctgctgtactcaggctgtccacggtgtgctccatcacctttatgtatttatccagcaggttctgcttttctatgccggagcccggcggcactgtatccagcagtcttccggttccctgaatcaggcgctctgtcatggcgttcctggctgattccagggataagggcattttctccggagcatccacggcaattcccagtgagacggaaaattcaaaggggcccagcagacttctctttacttccaggtgattcaggcactccctcagtcctctgcgcacctcatcctttttagccgggtcgtaattcatgacgccgcagccggtgaaggactggaaatgcagcagcatgtcatggcagaccggggccagggagttgctgaatatatcctttattttctcctgcatgacctccaggccgctgcggctgacctggccactgccgccgtctatttttaccatgaacacctggtacatgccgccgtatgtctccacgtggtagatgtccctcagagcttccgccgtcaattctgtgggattcgtcatcaaatcctttaccagactctcccgtatgcggcttaaatccttttggctgttctgatgctgcctgctgatggtttccattgtctccagcctggattcacatttttccttgattttttccagtgtctccatcagctccgcctgtttgatgggctttaacagatagtagccggccccatacttcatggcgctctgggcatactcaaaatgggcatagccgctgatgattaccacttccaggtccggcatgatttgtttcgcgctccgtatcagctccagcccgtcgcagccaggcatacgtatgtctgtaatcagtatgtcgggatgcctggactgcaccagttccagcgcctccaggccgttctccgccatggccaccacctccatgcccattgaatcccagtccgccagcgtctgcaccagcctgcatatcaggcgctcatcgtccgctattattacctttaacatataccactccccctaagacagccttccaggttatacccgcgacctttctctgaccttaatcataacatgcccaattttacatttcaacaagaacgccgttcctcagagcggcgttcctgtcatatccattattgatgattccttacttcttcaatacagacactcctgtatccgtcacagctcctcctaaagcttctccttccagagccttcacacatgcttccacaccctttgagcccataacatccgggttctgggccatggtgcacagcaggtatccgtcgtcaatcaggcccaggattgcatcggacttgtcaaatccaacgccgatgattccgtctttgccggatgccttgattgcgttgcccgctccggtggtagaaccttcgttacagccaaagatgcccacaacgccttgggtgatatagttttccgcaatgctctgcgacttggcagcatcgccttcgccgtactgtgtctctaacagggtgaagccgcttccctcaaatgcggaacggaatccttcctcgcgcataacgcaggaatcggttgcagcgtttacattgatgatgccgatggaaccggatgtcacccctgcgtccttcagggccttaagcatttccccgcctgccgtcttgcctgctgccttgttatccgtggagaaggttgcctctgcttccacgttggccggggagtctacgtatacgatttttacaccggttgattctgcttcttttaacgcggaggagatagcgtccggaccgttagctgctaccatgattgcctcatagccgcctgccactgcattgttcacgcactcaatctgctgtgcgtcatcctttgtatttggagacatgaaggtcacggttacgccaagggcctctgcttccttctgtgcgccctcgttgagggttacccagtgctggtcaatggaatccatggtaatcagagcaatcctgtattccctgcctgcctttacagccgcggaagcatcgccagccgccccgttctgcgccgtaagcacagatacgcctgtgtcagttaccttgccgcccaatgactcgccgccaacagctgccacggctgcctttacgccctcgtagcccattacatcgggattctgggccatggtgcacagcatgtatccgtcgtcaatcaggcccaggattgcatcggacttgtcaaatccaacgccgatgattccgtctttaccggatgccttgattgcgttgcccgctccggtggtagaaccttcgttacagccaaagatgcccacaacgccctgggtgatatagttttccgcaatgctctgcgacttggccgcatcgccttcgccgtactgtgtctctaagagagtgaagccgcttccctcaaatgcggaacggaatccctcttcacgcatgacgcaggaatcggttgcagcgtttacattgatgatgccgatggaaccggatgtcacccctgcgtccttcagggccttaagcatttccccgcctgccgtcttgcctgctgccttgttatccgtggagaaggttgcctctgcttccacgttggccggggagtctacatatacgatttttacgcctgaggactgcgcctcctttaatgcggacgagatggcgtccggaccgttggctgccacgatgatggccttggcgcccgcggacaccgcattgttcacacattcaatctgctgcgcgtcatccttggtgttgggagccataaactggaccgttacgcccagctcctttgcagccttctgcgcgccctcgttcagggtcacccaatgctggtcaatggaatccatggtaatcagggcaaccatggtgtcggaaccagctgccggcgcttctgtctttgctgcttctgccgatgcctgcgctgcggtggtggctgatacatcctcagtcttgctgccgcacccggtaataagagacgcggcgaggccaagggaacaagccagtgctaacatttttttcattgcatttcctccttttttcgtacggtagtgtcaagtttactacctcattttttgttacaaaccttgtatttttagggattacaccactttttcaaagaaaaaagcaatgacctccctttttgtgtcaatactttaggtaaaccaatcccacaaacacagaaaggaatttcattgcttatgaatagtattacctatttattgtcactcattcaatttctttaccagcagaactgctggctcattacttttatctgcaaatatatccctctcaaacaatgggcttttgatgattcccattcccctaaataccaaaaattcagaaccgatgaactccctatgcttcagtttcatcaaaacgattgggactggcagctcctcatcccttacttcgaatataaataccataagaagattcggcctgttgcacggcgcaaggaatgcgatatctctcctgactgtacctgtccctcctgccatgctcctcagccttttctttatcgtaataatggttccaaaggacagttaaaatgcaaagtatgtgataccaacttctctactgatgataaccgcttctccaagcactataccctgcgctgtccccactgcggacatgcccttgtccacaaaaaggaccggaaacacttcatcctccacaaatgcgtcaaccagaaatgtccctactatctccataacctcaaaaacgtcgataaagaacacctggagaaagactatggcaaaaatgaatacaagcttcactacctctaccgcgaattcacgatagatttctttcgcatggacttaaactccctgccaaagaatgcctcctccctcaaattcaataagttcgattcccatgtcatgtccctgtgcctcacccttcatgtaaacctttccctttctctgcgtaagacttcccaggccctgaaagacctctacaacatccaaatctctcatcagcagatcgctaactactgcaagagcgccgccatctgtatcaagccctttgttgataactatgattacggcgctggcactacctttaccgccgacgagacctacatcaaagttcgcggcatcaaatcttatatctggtttatcatggatgccgccaaacgctccatcatcggctacagggtctcagataaccggggcgtcggcccctgtatcatggccatgcgcatggcattccgccactttaaggagcttcccaaaaacttccgctttattgccgatggctatagtgcgtatcctcttgccgcccagcagttctttcatgaattcggcgatgcttttaagttccacatcacccaggtcatcgggcttaccaatgatgacgccgtctccaaagaattccggccttttaagcagatgatcgaacggcttaaccgcacctacaaggcttcctatcgaaagaccaacggctttgacaccatcgatggagccaactatgaccttgccctgtgggtcgcttattacaactttctacgccctcataaacacaacaactaccatgtgctcaatgatgtggaaatcctgcggggagcagacaacatgccgggcaaatggcagcttctcatctttctgggccagcagaccatcctaaatctccggaaaacagccgcagtctaaaaggagcggaactgttgtcaggaggaccgtggaataccggagcacaaagtgcgaggatatgccgcgaaagcctcttgacataaggttcacggataatcctgtaaaacagaaaagggggcaggtgcgcccttttcctgccttccggcgaggacgggttcgggcagagcccgatattgggtcaagggacaggtcccttgcaagttcttagggcggcgccctaagctcccggagggcctggctcttggtatatctgcagttttcaaggttcatttgagccgattttttccggcttagttttcatagattacttgacactacctttcgtacacgcatgtacactttcacattcattttatattagcgtcagggaagctggcccgtgacgtctaattccataaaatttctaaacctttttttccgctgccggacgtttccgtatgagcattcccttccggagcaccacgtccagaagcactgcgaataccacgataatacctatgacaaggcgctggattcctacctgtaccccaatcatgttaagtccgttttccagggtctgccatacagccgcacccgcaaaggtccccagcaggattcccgttcctcccagcggcgagataccgccgatgacgccggctgccactgcgtacatctcatacatattgcctgcttccatattgcccatattggcctggccgcagagaatcagacctaccacgaaggaacagaaggcactgaccagatatgtctttgtgactgtcgccaccacactgacaccggagagcttggccgcctccgcattggaaccaatggcgtaaatatggcgtccggtcctggtcttggagagcaggaaaaagaatgcgataaacagtaccagggcaatccagaaggtattaaacacccccgccgtctttccatagtaaaaaaatgcctggaacttatctgccgcttccttgcctatgcctgaactgatggcatccgtgttgcggttcccatttaccatataagccacgcctctggctacgaacatggttcccagggttgctatgaacgggggaagctggaactttcctaccagaataccgtttaccacgccgatggccaggcagcagacaagtgtaatcagtatggcagccatgggattgaccccatgggtcataagggttgctgctatcatggcgctcatgcccaccacagaaccaatggacaaatcaatgttgcctgttatgagcacgtagctctgtccgataccgataatcaggtactttgacatggaacggaacaggtttgtaacattttgtcctgaaaatacagtgggattaattgccccgaatgctatgtaaatgacaatgagtcccgcaaaggcagtcatagcccctctcatgccccttatattcaaaaactgtctgagggctccctgattcttgtgattcatacctttctcctcctcattataagcacttagcgtcaattttcttctcaaatctggttgccagggtcagaatgctgttctgggtggcctcctctgccatcagctctccggtaatacggccgtcacacatgacgacgattctgtcagcgattcccatgacctccggcatctccgaggatacgaacatgacagcaattccctgttgctttagctggttcatcagattatatatttctactttggcagccacatcaattcccctggtcggctcatcgaatatcaccaccctggaattacgggccagccattttccaacaaccaccttctgctggttgccgccggacagattgcctgcattcacatccacattaggggttttgacctttaagtcatccaccaccttccggcacatttcatcttccctggaccggcttaccacccccatcttgttgcacagcaaatccaggtttggcagggctatattatgccgtatactcagttttgtacatagtccgtcctttttcctgtcctcaggggccagcacgattcctgcctgtatggcatcctcgggcttgtgaatggccacctctcttccgtccaggaaaatctgtccgctctccttggcatcaatgccgaatatagccctggtggtctcggtcctgcccgctcccatcagtccggcaaatcccacaatttccccttcatacagggagaaatccacatcacgcaccatcctgcctgcattcagattttttacttccaggacctttttccctttttcgcaggaaacgcgcggaaacttttccttaatttcacgtcccaccatgttggcaattatctcatccagggttgtgtcccggaaattcatagaggttatgtactggccgtcccgcattatggtcacacggtccacaatggactgaagctcctccagccggtgggaaatgtacacgatgccgcatcccttttccctcaggttatggatgattcggaataagtcctctatctccctggctgtcagggcggaagtgggttcatccataatcaggattttcgcatgggtggacagtgccttggctatctccaccatctgctgcttggacacaggcagatcccccaccacctggtgcggatccaaatcaattttcagctcatccagaatctttctggcttcctcctccatctccttgtttgacagaaccatgccctttaccttctcgcgtcccaggaacatgttttctgtcaccgacagatgcctgcacatgttcaactcctgatggatgattgccactccggcttcctgggcctgcttcgggttcatatccccgtactccctgccgaatatttccactttcccttcatcccttgtgtagacaccgctgagcaccttcatcaatgtactttttcctgcaccattttctcccagaagcgccatgacttcccctgaacgcagttcaaaacgcacatggtccaatgccttgactcctggaaagctcttacagatattctccatggaaacaattgtatcgttcattctcagccacctgtccttcttcataatccattgtctgacttttatctatgattctattataccaatcttcagtttcacaaataaggggggctttttcctaattagggggacatttttatgcatttttatagaattacagaaacgagacgcagaattgtttgttatatacaccgtattatttttattattacttgatataattagcactttttccatctcttaaaaaaggccgccctccccaggaggacagccttctaatccccatacaattaccccctaccgccggttcagcctccacgctcccacaagcttcttcaaataatccatataccctgcttcccgtatacttccgttcgtcagcacattaacctctcccagctttttgccgcccagagaatattccagcacgcctgccttctgccccggttccaccggagcgggtatggattccagaagcaccagcttcttctcgatggctcccaaatcctcacccttaaggctcaggtaggaaaatgttccctcgtaggtcagccctacctcatcctccacgcctcctgtaaccggcatctggggcagcggcagatgttccttgtcttcatagagcttgcagtttgcataaccatagttgagaagggtctgggcgtctgcaaatctggttttgaaatccggcgcagccatgatggcagcgataagacgcaccccatccttttccgctgtggccgacaggcagtactttgcaatggatgtggaccccgtcttaaggcccgtaaccgtaaaattagttgccatcttaagcagtttatttgtgttggacaagccgaattcctttgttccctgctttgtgacatgtgttatattctccatccatatggtggaatagttatgtatctgaggatatttattaatcagctcgcggctcatgacggcaatgtccctggccgtggtgtaatggtccgcggattccgtaagaccgcagcagtccacgaaatgggtattggccatgccaaggccggctgccctttcattcatcatccgcacaaactcctcctcgctgccagctatgtactccgccatggccacagacgcgtcattgccggatgcaatgacaatgcatttaatcaatgtctccacggtctgtttctcgccttcctccagaaacacctgggaacctcccatggatttggcatgagcgctggtgaccacctcgtccgtcagctgaatcttcccggactgaagggcatcgaaaatcaatatcagtgtcataaccttggtaacactggccgggctgcgtttttcatctgcacccttttcatagattacctgtccggtggacgcttccattagaatagccgacggggcggctatctggactgctgtctggttctggtccgcaggcgcctccgccgcctgcacatcccctcctgtccatccttcatcctgtccatagaggctgctccctgatacctctgctcccacggggatggcgatttccggctcctggcccagggcggcaatcccgggataggagaccagtattgctgctgagcataatatcgctgcaatccgtctcatattttcctccaataaaatcatctgctactaattgtatgggagtggacagacagcttatgcccgcaaaaccttgatttctaccgcaaaaaaatgcagcgggccgtaattataccgcagcctgccgcatttttcctatcttattttcctgccttattataattatacttccttcagggcctgtcttaagtcctctgccatcttctcgtactcagggtctgtaagcatggtccttccgctgttcatctcaaaggtgccgccccattcttcaccgccctcatacttggggacaatgtgaaagtgcaggtgatgtcctgtgtcgccgtaagcaccgtaatttaccttgtccggccggaacaccttgtgtacggcgcgggctgcctgggccacctctgcaaagtaatcattcctctcctcgtcggtcagatcgatgagctcgctgacatgcttcttatgagccagaataactctgcccttcttactctgctccttaaatacatagagaaagcctgtcttcatctcacacacaggataaccgaacttagccaccagttcgccctgcatacaatatgcgcaattaggatcctttaccatatcttccatgttcctgttctcctttatgtttattcatatcaacttaaacataccacggaacaagatgaatttcaattccaatatttgttttttctttcatagtacccacttcacggaatctatgctataataagtaggcaagtaccagatacaggagaatttctatgagcagagcagatttcagacgcaggcagtcccgcaggcgcaggcagaagcttgcacggatgtcacggcatcttcctacatttattttattattagcaatcactgtactggcaggaggcggcattttcgccctctaccggtttgttttagcgaaacagccggacggaacggtccaggtcattgcctcatcagggcaaaacggctcccctaatccgaacgggaacagaccttccgctggtggggattcccccggcggggcttccggcggcaattttggcggaagctccggcaatagttcctccggggcttccggagacagttcctccggcccatcggaccagccttccgcggaagctccccaggacgacatttcccggctcatagcccaggctgaccgcatcgccatgggttatgattacgataaggccgcagagcttatcaactccagcggcctggatttggagaactcccgcatgaaggaggcgctggcacggtatgaatcacagaaggccgccctggttcccgccgatatgaacgctgtcacccacattttcttccactcacttatcatggatacctccaaggcctttgacggggactcggacagcgccaactataattccgtcatgaccaccaaggatgaatttcttaagatactggaggatatgtaccagaagggctatgtgctggtccgcatccacgatgtggcctacgaggcgcctgatgaaaatggaaacgtccgctttgtaatgggcagcgtcatgctcccggagggaaagaagccctttgtcatgtcccaggatgatgtctgctactatccctacatggacggggacgggtttgccaaacgggtggtgattggcgaggacggaaagcccacctgcgagatggtcatggacgacggcaccacatccaccggctcctatgatttgattccgcttttggaggacttcatacaggaacaccccgacttttcctacaaaggcgcaagggccattatcgcatttaccggctatgaaggcatactggggtatcgaactgcatcctcctaccagaacagccccgcctatgaggctgaccgtgaacaggcagccagggtggcccagtgtctgaaggataatggctgggagctggcttcccacagctggggccacctgcacctgggcgtggcggatggcccgcaggccggatttgccattgatgaggagcgtttccgaaccgatacggacaaatgggaggccgaggtggaatccctcataggtcccaccgatatcatcctctatccttatggcaacgacattgccgactggcgtccttaccatcaggacaatccccgctttgcctacctggaatccaagggattccgctatttctgcaatgtggatgccagcaagccctactggacccagatgggtacaaactacttccgcatggccagaaggaacctggacggctaccgcctgtatgaggatctcatccagacagacccggccaggaaacgcctgactgatttgtttgacgccgcccaggtgtttgactcagccaggcccacgccggtaagctggagctaccagaagtaacgtcttacggctcccgctcatattgttatcacgcaggcttcctgccgcggtcaagcggcagggggcctgttttcttttttcctgctccgggcgaacggtttcccgttgtctacatataataaatcaaggaattgatttctaattgaaaggagcttcttcatgattcccaaactggaagtagacggggtcagctattcctaccattcactggatggtgagacgctggcccttgaccatatatcatttgatgtatcccccggggaattcctggctatcgtgggtccctccggatgcggcaagtccacccttctgtccatgctgtgcggactgacactgcccgagggaggcaccatcaacatagacggcgtccccctgaccaaatctccctctgccattggatacatgctgcagaaggatcatttatttgaatggagaaatattttctcaaatatatcccttggccttgaaattcaaaagcggttggacgaacctgccaggcaggaactgctggaaatgatggcggcctacggtctggcaggctttgaatatgcaaaaccctcggagctgtccggcggcatgcgccagagagcggccctcatacggacactggcccttaagccggaccttcttctcctggacgaaccattttcagccctggattaccagacccggctgtctgtgtgcgacgacatcagctccatcatccgtcagacgcacaaaaccgccatactggtgacccacgacctgtctgaggccatcagcgtggctgaccgcatactgatcctgtccccccgtcccggccgtgtcaagaaaatcctgtccattgattttcctaaaatgtgcacccgctccctggaccgcaggaactgtccggaattctctgcttactttaatatggtatggaaggagttaaagacatatgaatagagataaacagcctgtatcagcctgcaatatgtccgtggcccagcaggagtatgtggcccgagaaatacagcgccaccgccaggtgaccatatgccgcgtcatgctgctggtccttctcctggcgctgtgggaactggcggccgacatgcactggattgacagcttcattttcagctcccctgtgatgattgccaaatgcctggtttccatggcaaaggacggaagcctgttcctccacacaggggtaactcttatggaaacccttatcagctttgccgtgtgcacagtctttggcctggcatgcgccctgcttctgtggtccggcaaaagcgtggcacaggtgctggagcccttccttgtcctgttaaacagcctccccaaatccgccctggcccctcttttgattgtgtggctgggcaataacatgcggaccattgtggtggctgccgtgtccgtggctgtatttggttccattctgaccttatacacaggcttttcccagatggatacggaacagatcaagctgatttactccctgggaggcggacgaaaggatgtgctcctgaaggttctgctgcccggttcccttccccttgttataagcaatatgaaggtgaacatcggactgtgtctggtgggcgtgattataggtgaattcctgagcgccaaggccgggctgggatatctgattacctatggctctcagacctttgccatgaccatggtggtgacttctattgtgatcctctgcattgtgtcgggagtgttgtatcagattatcgcgtatgcggagatgagaataaaaaagagatagtgagtaaaacccgtctctgaactgaatatgtaagggacaggaggttacggcagaccttcctgtcccttacagcttaattttcacctcctctttcgcatccaaaaactcaaataccctttgggccgcagccatggtggcctgcatgatgtttgcaatgttggttacctggttgatgggctgggagaactggcgcagatactggatgaaggactgaatcatacctatgctcagcctgccgttgatgcagagccatccgctgacaaccgccactcccacatagccgatattggtcagcgcctgcgttaagggcatgatgatactggacgaaaactgcgctttccatccgttgtcgtagagtcggttgttgatgccctcaaaagtcccgatgatgtcctcctcttttccaaaggcggcaatcacgttctgtccgttgtacatctcctccacataccctgtaagatcccccagcgcggactgctgtccctggaaataacgctgggaatgttttaccaccttcatgctcaccaggccgccgcctccctcacccgctcatcgctggccgaatcatccccgaagcggatattttccatgatggtacccttaaacagcagggctttctgaggcacataaccgattttttggcgcagggtcctcctgtcatagtcctttacattgactccgcccaccaggacctcgccctcctgcacatcataaaagcgtggaatcaatcccaccagcgctatcttgccgctgcccgtacttccgatgatagccgttgtctctcccggctttgcctcaaagctgacatggctgacggccggctcttctgctcccgaaaaataaaagcttacatcccggaaggtgagataacctttctgtctctctgatgtcttgggaaccgccgggtcactgatggaattttcagtatccagcacctcgcagatacggtccgcggaagcagcgcatctgggatacatgacgaagatcatggaaagcatggtgaccgacatcatgatctgcatcacatactggatgattgccaggatatctcccggtatcacgggctctgctgcgattccctgtcccgcccgccagagaagccccaccacggtcaggtttaatatcagtatcagggacggccccagcagtgacatggcatgcatcattttcatggcattattcatcaggtccttgttggcgccgtcaaaacgcttttcttcgtaatcctctgtcccaaatgcccggatgacacggatgccggaaagctttcccctcataatcaggttgattcggtcaatcctggtctgcatcttcctggaaagaggcatggtcctcctgccaatcaggctgataatcagcaccatcaccggcatggataccacgagtatgcttgacattttcggatttttgctgtaagccagcatgatgcccaccacgcacatgataggcgctgtcaggatgatgcgcagaagcgcgtaatcaaagacgcggttgaaaatgtgtcaatctccgcctgggagaaatattccacctttgtgaaaatcctgctcctcacattccgccctaagcccagcgcgattctggaggcaaaaaagcctgtgataatattgcataccattcccagcatgatgaggccggtgtgaagaatgtaattcatatccttatccgcgattcccctgttgatgatatccgacagataggtgggaagccccgagtggctcccactccggccgccacactgaccagcacgcatagaagttccagacggaacgctttcagctctgcaaacacttttccagacattttaaccctttcaaaatagtctccagagcttctttgctcatggaatccttctcagaatggctgcccatctgctccatcatgccctgaaccaatgcccgccctttttctgtaaggaccacatttatgaaacgggcgtctttgtcattcttgaccattgttatatggccggcccgttccagacgccggcaaaacatggaacagtttccttatattttttgaaattaactgcataattattctgcagcaaagaaaaatttcaggccgctgatacctctaatctgggatatcaacggcctgcttcacaccttaatccgctccgcaacctcgtttccgattgcaagacgtatattgttcattccgattatcatgctgtcccttccatgctggaacacattgatggtacttccctccctgatgtcatgctgatgcatgaactccatgacctggggattgccgaacatccatttaatcgtacagacagctcctgccttaacctctgacaatgactgcataaccacacctccgttaccgtttgcgttcataccaagtatgagcaaaatggccctttatcatgccggcccttttatttatattgtaaacatccgaagggctgttagtcaacggcaatgtgggttaggcttttttaatcttttatctccattatcctctagtcctccgggtccgtaaatcccatcagcctgcacacgataaagccggccgcgtaggaagcgaacagacctacaaaatacagcgggaaccgggtggtaatgaacgccagaggaatacctgacagctcagggaccttggccgccaccttcatcactgccatgacgcttccgccgattccgccgccaatgcaggatgctatgaacggctttccaagaggaatggtacagccccacatcaggggttcccctattcccagcattcccacgggaagagcattcttaatggtctttttcagtctctggttctttgtctttaaatatacgtaaaacgcagctcccacctgtcccgcgccggccatacaggtaacgggcagcagataggtgacgccgaaatccgctataagctgggtgttgaccgcaatgagcccatggtgcattcccgtcattaccaggggcagatagatggctgaggtcagaccggccagcacaggcaccttatagataatgaagctgacaaaggctccaatggtctccgatatgaagccgccgatgggctggaataccatcaggcccacaaaggtcatgacgcagaccgtaatcagcggccgcaggaacatgtccaggaaatccggtatgactttttgaagctgtttctccagcagcactgccacataggcaataatcagtacggatatcacgccgccccgtccgggggtaatggacacatggaacagctgtacccctgccagggatgaactgttcagtatggaggccagaacagcaccgatgatgggacttccgccgaattccttggatgtattataccccacgatgatgggcaggatggtaaagaccgagtaggccagcgcgctcattattttgccgaaatccgtatcctgaaagcccgggaaaaatacataggatgattcgtagacagcaaccaccagtccgcaggcaatgaatgcggggatgatgggaatgaagatattggctatctttttcagcatgttcttgcagggtacattgttttttgccctgttttcctctttcaggagaacggcttcgtccacctcttcacttttaatatgggtcatgtcactcataagctgggccactgccgccgcagtgccggggcccagcaccagctgcacatgactgccctcctcaataacccccagtacgccctccagctttttaagctcctcccgcttcattttttccgggtcctttacggtcagcctgacccgggtatagcagtttgctatggtcctgatattggattcgcccaccagattgcagattgattgtgccagctctttctttgtcataagataccttcccctttcttatctcttgcctgttataccgtcttttttagtatcgcccactcctgtaccactgaaaaacctgccttctcataaatccttctggcaaaattggtttccgttacaaaaatcgtcatgtattccgcccccatgttcttaagctcctgacacaggctgaagaacagtacattgccgattccctttcccccgtcagccgggtccactgccagggccgaaaagaatccccgtccgtttttctcaggatacacggttccggctgtgccaatcaccctgccgtccctgtcctccactatgagaattttcttatgttcccggattccgtcccggaattttttcaggaatgactggtccctcagacgcccaaacatttcctcatatccaaaattcctggtgccgtcaaaccaggcgactctgattccctgctgcttaaactccataatgtgcttctgtacgtccgccggaatgtaaaatttttccagttgcagataataagaaacctctttttgaaccagctcatatcctctcctttgaaaaaatacgtatccgcgggagtctgtcctgattccaggcgccttgttgtgctcgtggccttcccggtctatgtaccaggacattttaacgggacatttgtgacttattcttatttcatgttttccctggcccttcagaaatgcctccgccctttccaaaaggctgcttcccacgcctctgccttcatattcctcctttaccaccagaaggaatatatatcccggcgtattgtcccggttctgccccggcaggaattccttctggctgattgccgccgcaaatcccgccagactgccggaatccgtaaaggccaggatgcatccctccgggtcaaaatccggtttatccaaaagctctgccttccattcttccggtgtatcataggctttataccggatacgcaccgcttcctctttccacagccgcaccagctgcggaagcatggcttccttatacgtcctgtattgcattccgaacataccccccagctcgatttaatcttgtctttgcggattcggcgccgcaatgcagcagaatcatggtaattgccagctttacgcttccctccgcctcctccagacagtccctggcctcttccctggtgcatcccgtggctgtcatgacaatattttccgcccttgtaatcagcttcatatttgtctgcacaacatccaccatcaggttctggtaaaccttgccgattcccaccatgcttcctgtggatatcatgttcagaaccatcttctgggccgttccggccttcagcctggtggagccagtaaggacctccgggcccggcaccggttcaatggccaaatctgcctcctttcctatctcagaatcccggttgcaggacactgccacggtcctgcatccaatttttttggcataccggaggccgtatatcacgtaaggcgtccttccgctggccgccagccctatgacgatatccgccggggacagatgaatcttttttaagtcttcctcacccagggtctggctgtcctcggctccctccaccgccttcacaaaggcagcggagcccccggccatcaggcccaccaccacatccggcgacaccccgaaggtgggcggacattccaccgcatccagtacccccagccttccgctggtaccggctcccatatagatgattctccccttttgtttcagactgtccgtacaccaggcaatggcccgggcaatctggggcagaacctcccccacagcttccaccgccttcccatcctcccggttcataatagcaacaatttccagaggggtcatctggtccagccccatggtctccttattcctgctttccgttaccaacactgacaaatctatcatggcaattcctccccttacaatacgttttggttttcatccggtccctcggatttgtctatatgggtcttcctgaactgttccatgcactcgtcataccgcttatgcacataggccgtgtacagaatatctatcatgttcagctgggatatcctggatgacatggccccgctcctgaaaatcagttccgttgcagccactgacaggttataatcagccagacggaccaggggcgactgctcaaacctggatatggtgatgaccggcgcctccctcagcctggcttccctggcacatactatcatttcctctgtaagaccggaatagctgacaatgagggccagatcgcacccccggatgtttctggcctgcaggagctgggcatgccagtcatcgcaaatcacacatggcttgttgacccgcagaagcttcagatacatatctctggccaccagcagggaagaaccaagcccgaacagatacacggtctggctccgctccagcaactccacacattgattcaagatttccagatccaccagcttcctggtattgtcaagggacactatgttcttataggtcaccttgttcaccagctcctccaggctgtcgtccttctttatctcctgctccatgggccgtgtactctccctgcgcagggctgactcatacagcagcgatttctgcagctccttatagccctcaaaccccatcttcctgcacaggcggacaatggttgccgctgaggaaaacgttttgtctgccagctgctttatgctgtatccggcggcttcctcgggattttcccttaaaaatctgaggacccctttctcagccccgctggcctgcgctgaatattcctgtatcctgacaagtacacttttcatatcagttcctttctatgcctttatattactcttttaaacacttttgtcaatatcatctgacttttacgaaaaattatttcatattttgactttttcacctcttattgcgcgtaaataatcggataggggagattttaacctccccttccacaccacgtagcgtaccgttcggtactacgcggttcaatagtttactcggactttcagatagtgggcagtcatatcgggataaccaagtctgtccactatgattcttttggtgagtgccgagttgagcattcccgccgctctccacactccctttcggcagttcgccatctcatgcaccttccactctggtaaatgtaacgcccgcaacattttatatcttgtgcgtaccttcttccattgtttccagtacaccgctcggattctgtggcgcagccactcatccgtctgttccatcaggcttttcatgtctgcatatcgataatagttaatccatccccttgcatagcttcggagtttttcttccctctcctgattgctccatttgttccctctggttgtcagctcccgtatccggttcttcatttttgccaccgacttcgggtgtatcctcatgcggcatttccctttatgccggtaaaagccgtagcccaggtattttatcttgctgacgtggctcactgtcgttttctgaagattgactttcagaaacagttttcctgtgatgaatggcacaatgttttccattgtcctctctgcgcttttcctgcttttgcacagaatcaggcagtcatccgcatacctcacatacttgtgtcccctgcgctccagttccttgtccaactcattcagcatgacatttccacataagggacttagcgggcctccctgcggcacgccctcggtcgttgcgtgaaatcctccgtcctccattactccggctttcaggtacttgtgtatcagcgagattaccctcccgtccttcaccgtcctcgacagcacctctatcagcttgctgtggttcaccgtgtcaaagtaggattgtaaatccatgctgaccacgtagacatatccttcgttgatatatttcctacatctttccagtgcgtcatgcgcccctctgccgggacggaatccgatgctgttgtcagagaactgttcttcatataagggcgtcagttcctgtgcgattgcctgttggattaccctgtctaccactgtgggtatccccagtttccttgtttttcctttctcctctttgggtatttctacccttcggactgggtttggcttgtatttgccttccctcacctgctcgaccaattcggactggtgttctctcaggtagggtagaagttcatccacctgcattccgtcaatcccaccaacgcctttgttcgttttgaccttcttataggcggcatttagattgtcgcttctaagaatcgtatctagcaggttgtccgtccgaaagtccgtgttggtgtcggggttcccggtaatcctttcatgggcgtactctcctgtttcccttccctgttccgcaggtatctctcgcaggtagtcctcaatatgaagttgtctgtacttaattccatgtccggtttccatttggtaacgacacctcctactgttcagtccttcccggtgcgtttgcgaccgcccggtactatgacctctgctgacttctcacggcaagctttactccgtgacagcgaatgttttatcgccactttcacgtccgtgagacctccccgggtactcacacgttctttcccacttatacctgccccgtttactgctggcgttccgtgcagttattggactttagtttgttaggcaacctcatccacgcttcacagcctatccggacaacttttacaggccagtggtttgcctccggcttccttcagaccccacctcacgatgacgcccttgccattggctgcacccttcccactgccgggcgggtcagggactttcacccgttagaacgtgcgcccgccgggcgcacctgaaaagccgccgcttttttattgagcggcggctggaggaatccgtcaatccccaaggtagtggacagtcccatgaagaatcccgccagcatattgatgacagggggcgaagcccccaccgccgccagggcgtttgtattgacaaaatttccttccacataggaatccacgtattatacaattgttgaaaaaaatttcctattcaaaagagggattgaaaaccagaaaatagacttaaagatactgccgtcaatcatatccgtattaccgctttgcaagacaagaccccatagcccaaacattgctggctgccattccctgttacccagtctctcactccgccgccccggcaagcctgcgctccttcttaatgctcagagcgtacatggcgcctcccgccgccagccagaacacggtatacagggccgttcccgccagctggggccaggcagcgtcccagccgattcccttcaggttcacagcctttaattccacggcaatattggcaatgggcgaaaatatcctggaagcaatgctgagccatttcggcatcaaatagtatggaaaaataagtcctgaggtaaatacaatcaggttgctgcacatcatatacagctgtgcaaagcaggccagcctcctggtaaaggacccaagcatcacgccaaaggccacggctgccagcatgaaaagcactgtgctgaacagatagaggccgatttcccctctcaggggaatattcttatacagccccaccacgctcagcgccgcgaactgggtcaccactgcgccgcccgccaccacggccgtcctgatgattccgtcctttaattcctccccccgcttttccggggcagccgctgccagggctttcctcttgcgtatcatgagaggaatgaaaaatgagatgaggaaggtctgcatggtgatggagggaaccagcagatagctcattttcctgatgtaatcgccctgtggctcatacaaggtcctgtccacgtaagaaaatgtacccaggctggtctgggccgccgaggggtaaaagttatttccctccagcatcttaagctgcattcccgcgctcatggtacccagcacagacgatgcagcccccacagcccctcctccggtgatgatgttggagcagtccgcaaaaatcactgcctggggtgatttcttcagtgacatatcccggctgaaatttacgggtatcatgacgccggcctctatcttcttatccaggatggcctgtttcaaatcctgctccgaatccgcgtaatatacaatgtccagagagggattgatgccaagctgcttcacaatggactgggacaaagaggaccggtcctcatccagaattccgaagggaatattttctgtgtaatcatttttccagatagtagtaatcaggagcatgccggccagcacggaaataaaaagaccgataaccgtgtttttttcttccttccatatcctgctcatcatatgccggccaccccgctttccgtcaggggactatccgtcagcgggcttcccgcctctgtcctgacatccctgaatttcttggccaccaaaagcgccatcaccgcgcagaatcccataagccacagaacatgatgggcctcactcaaaaagctgcgctccaccagggccatgtccctcagaggcacgatatagtgggtattgggcatgaaccaggtaagaaacttacagggccagggcatggagatgaccggaaatgtgtaaccggctaacagcatggtaaaacttatgatgctgcatttctgcactgcctcctcacagtttcccccggtacccaggttctggagtattccaaaaagggtaatgccgaagcaggtgaaaactgtcatcagaatgccggcccagggcgaactcttatacggaaacccgaaacacagggtctgggtcaccatacagcccagggcagagacgcaggcaatgccggtgatgaatccggccttcttcatcagacttccaaagctcgccctctcgcacacgcaggcccccacgcatccggctccaatctgcacaatggtaagaaggatgccctccatcatcatgtatgccacgttcttggagggattgctgatggcctttgtcacatatcccatgggcgcaatcaggttcatggctgcctggggcggtatgccctttccctctgccagcttcagcatatagccgctcttaatggttcccagggcttcggctatggttcccctcatgccgctggcaaccgtggaaagggcgccgtcgttaaaaatcatgattttggcttccctgccatttaacaaatcctctgaaaaatgctccggaatcacgattccggccagggccttattgtagtaaaatgcttccttcaggtcatcctcctcatccgtacatgcaatgacgtcaaatgtcctgttatccgaaatcagttgaatcaggctttggaccgtctcagagtggtcatggttcacaatgaccgtggggaccttctgaaaaggcaggtgaatgaactcagcgcccatgagcagactcaggatggtgggtgccagaagaagaatcagcatgggaatcgttatgtaccgttttttcacagaagatgccaggctccctgcccgtttcatccattctctcatataccatcacatcactttccaaagtcaacataggctgtcataccggaacgcagctcatcctgcagtcccgacaggtcgtcaaaggttaccttgattccgtaggtcaggatatcccagtcagcttcattggacgccttcttagtggcaaaatccgcttctttattgattcgcaccacttttcccttatatgtatcctttcccagggctgccagggagatatccacctcctggtccagttttacccggggaagcttcatttcatccacatcacatgtgatatagggggtataaatgtccgcaaccacaacggagggaagtccggaggacaccacatcaccggccttgacatttaccgttgtcaccaggccgtccacaggggaggtgaggacacatttatccagggtggtgtcaatctgtttcagggcagcccaggcctggtccaccccggcctgggcctgggcaatctgttccggcgtggctccgtttttggcttcggaaagcttgctccgggaaatctccagattggagcgtgagctgtccagggcagccttggcagaagccagggcagccttctgcccatccacggaggactgggatacggcccctgccggaaccagcgccaaggtcctctcataatccgcctccatcctggtataggatgcctgggcattttccaggtttgcctgggcaatctggaccgccagctgcagctgcttcatctgttcctctgtggcgccgtttaacaggctctgataagatgcctgcgcctgggccagggctgcctgggcctgttccctctgggccatcagggtatcactgtccagacggaccagctcctggcctttcgtcaccagatccccttcctccaccaggacatccttaatctggcctcctgtcagcgcgttgatgttgctctcatccatggtcacataggactgcaccaccagatttttcttattcttaaataacaggtcatccccggtcacatggccgaagatgagcaccaggacaatggcgcataaaataacagccgccgctgcccctatgatttttttcttggattttgccagtttcattgttattacagtttctcccttccaatatttctttcatactcccttacatttccgacgattttgcacataatctgttccagggcccgttcctcctgggccgtgattccggcaaagatgattttctcccactgatccatgatgtccttcagtgaattagctgcctcttttcccttttccgacaggcagaccagcttttcacgcttgttctcagggttaatctccctcctgatatatccccgctcctccatggccgccaataccttggctgtctggtatttatcgattccggacaggctggaaatggtatcctgattgctgtatttgctgtagcctataaccagaagcgcgattccctcggaaaaggaaaggccgcaggccctgaatttaatgcacagaaaccttcgtttgctcttttctatcatggtggctatttcctgtatggtactcacctccttgcgggtgctgccgcagacactgctaaggaatgctttgtgcggctatcatatgtatttaacaactgttgtgtttgacaaatattatatgcattttgcaaatgaaaatcaacccgtttttttttcacaaaattacggctcaacttttattatttctccgtttatttgacgggatggttcttctgacagggcgcggaggaagaaaaatgccgtgaagaagctggtttcctggtttggaatccggctgattcacggcattatcacggcgttttcgcagcgttttcatataatgtttttatacttcctttgatgacattcaacaatctcattccatcattttcataatcaggtccgcgcagccctcatatcccaatacagaggtattcagacaggcatcataattttccatatccccccagttttttccggtaaaatagtgataatagtcacttctctggctgtccctcttctgtaattcttcctccgccttctcaaaggctatgtcatccacctcgcatatacggcgtttgcgcttctccatggatgaagcgtagataaacagtttaagtacgtcgcattctccgtccagggcaaaatcagcgcatcttccgataaagatacatggtcccttccgggccagcctgcggatggtgtcagatacctccttattgatatcaaagggctcctgcatcttattgtaattctggaaccggaaggcatacagcaccaaatcatgaagcaggcttcccgtccgtttttcatccagctttttcagttcctcgatgctgattccattgtctgccgccgtcactgccagaagctccctcccataacagggaatccccaggcgctccgacaggatgcgggccacctcccttcctccgcttccgtactgacgctcaatggtgatacaacagttcctgcccatactcattccttctttcttatatatctttcttatatatctttcctatatgtctttcttatatgtctgcaaatgtcctcaaattacgcaggacatccatctgccttatgttacctcaattgcgtactttatcacatggtccctcttattctcaaacacatcataggcttccataatgttttcaagctttgccctgtgggtaatcagacagctggtatccagttttccggcctttatcagtttcatgatttcctcacagcaggaagcgtccactccgccggtcttgaaaaccaggttcttcccgtacatgtccgggagggggagtatctgcggttcttcatataaggccactacacagaccactgcattgggcctggcaatcttccatgccatctggaaggtatccctgcctcctgccacttccaatacggcatccgcgccgcgtccaaaggtcagcttccttatctcctgttccacatcctgctttagcgggttgaggccgacatccgccagtccctgatccttagccagctccagccgttcatcagacgtatcaatggcaatgatcattccgggaccgtagagccttgcgcacatcagggtacacagcccggtaggacctgcgccaatcacagctaccgtatccgccggtttgatttccgccagggacgctccccagtaaccggtggaaaggatatcccctgtaaacagcgccgcctcgtccgtcacctcaccgggtatccttgttagtccgttgtcagcaaacggaaccctgacatacccggcctgaccgccgtcaatcctgcaccccagcgcccatcctccgtgctcatgggtacagttgttgacatagccccgcttgcagaaatagcactccccgcaaaatgtctccacattcacagccaccctgtctccgggcttaaaccttcttacctcctccccggtctgctccactatgcccacaaactcatgtcccagtatggttcccggcacagcccttgggacagcgccgtttttaatatggatatcgctggaacagatggtggtaagggtcacctttataatggcatcctgcggatctttcagcctggggacaggccggtcttccagggttatggtaccattttctttatagacggcggctttcattgtcttgggctggggagtccgggactggggagccggggactgaggaaccggggattgggtcgcctgagactgggccgcctgggattgggacacctgagtttgcatatcgctttgcatctttactatacctccgatttgctgctgttttctccaatatcatcttatcatatatatataaatataaggatattatagcatatatcaggcattcctaaaaggacgtccatcctccgtctgtctgtaccgtggcccctgtcatgtgggtggcgtcatctgataccaaaaacaggatggatgccgcctgctcctctgccgtggcctcccgttccagcatggaggtgagcttctgtccggccatggactgggcctttgcagggtccataccagctttgatggctgcctctctatggttcttcacatattcatatgcctcggctaccatgggcgtggtggtgcctgcgggattgactgagtttatgcggattccgtatctggcgtaatcaagggccaggttcttagtcagtccgttgaccgcatgtttggacgccacataggcaggattgcccggaaggcctgtgagcccggcaatggatgcattgttgacaatgacgcccccattcccttccttcatgaattccctgatttcgtgcttgcagcagaaaaatacggaataaaagttgttcgccatggtgtagtccatctgctcctgctctaactcatggagcggactgggatttcccttgacgcccgcgttgttaatggcaatgtccagatgtccataagtcttcactgccgcatccaccatctgttctgcatgctcctccgcggacagatccagattcaggaaaatggctgtgcctccttctgccctgacagcattgagtacacgctctccctcctccttcagccggtcagccagcaccagcttcgctccttccttcgccgcccggatggctgtggcctcaccgatacccctggccgcgccagtcagaatgattaccttatctttaaaacggttgggataaaattgtttcatgtatgaattgcctcctgttatttggtggggttattttatcccaaatacaaaggtatttccaccacgtctgattgtgaaaaaattattaaaatttcataaaaaacacagcagtacagaattcctccatactgctgtgtcccctcactttatggtttatattatgccttatttattatgctttatttaatgaggcttatttaatccgtcatcaataactgccatacctgttctccggggcctcggccagcggaacagggtttcctccagggtaactactcctggacctgcatctgcggatacataccttctgccggatccgcctcctgagccgccgcttccgccagaacctcaccgctgtttcctctgatatccggagtgttaccgcggttccatttttcctgacaccctgtacaggctcataggacttgtacatcattccggtatagatataatggtttccgtctgtcccgtcgattgattcaggaatcagtccgttcagcctgccgtccgcttccggatcccgtcccaaagggcacctgctccagagcttactgtcaagcacattcgccggaacttccttgtttaccatctccacatttacagtatacatattgatatcccaaaccgcttcaaaggcaacattgccggtaaactcatggttgttgatttctgatgcctgatataactgatctggtttaaaacctgcatccgaggattccacgaccttccagccgctgaatccgcttccctccagtgaaggaatcaggttgtctgtaatcaccccatatttctgcaggctgtaggtcagcagcgggtccgtagaatcattcagtgttccgcctttcaaatcaaagacaactgctatgttgtgcttcagctcatcgtctacatgccgttcataagggctactgaaaaaacagtggaagtagagtcgggtttacaaaatttgaagacatgtaacataagtcaaaaaaacgggggaagtctaccacgaaaaagtaaaattgccaaaaaacaagttgaccaacccctccgcgcatggtaatattactatataatttaaacaaaaggtcaggtatagccgtaaggtgtcactggtaaagcaggcaagactgggttatcctattctgttgtatatacaatgcagcagtctgggataatgccggtcttttgttttgggaaaagggactggttatggagataataaagatcattaataacaatgtggtcagtggattggatgagagcgggcgggaaaccatctggatcggaaccggaatcggttttcactacaaaaccgaaggcgtgtttgatgaaagcataatccagaagaagtttcacctggaggactcagaagcagtatccaaatttgccggaattgcggctgggattccctatgagtacattcagacggcagaggagattatcagcattgcccacaaaaagctgcgtcacaggctggatcgcagcattcacatcggactgacagagcacctttgctgtgctgtggagcggaaaaatcagggcattgaattgcccaatgcgcttctgtgggaaatcaagaattactatccggaagaatacgctgtgggaatcgaagccctcagtattattgtggaaaagctgaacatagtcctctcggaagacgaagcaggatttatcgccatccacatcgtcaatgcggagatggggaatttcaattcaaggggctacgacattgttgtcatgacaaaagatatcatcaatatcatccagtatcatttccaaaaagatctggaccacaggtcatttgcgtttgaggaactgatggtctatatcaaacatatgctgcgaagaatcatcaccaatcagatgcatcatggtgaggatgaggagatctgcgcgctgatttgtacaaaatttccggcggcatatgattgcagcgctaaaattgcaaaattcatcttacagcagatgaaggtacagcccaacatggaggaaattgcttacatgactttgaatatcaacagagccatgcgagacaaatgaacttaagctataggaggagagaacatggcaagtaagtatgacgcactggcccgcataatcattcagaacgtgggtggaaaggaaaatattgtaagtctgacgcactgtattaccaggctgcgtttccagctgagggacgagtcaaaggccaacacggaggtgttaaaatcaaccgacgggatcgttacggtcatgcggtcaggaggacagtatcaggtggtgatcggcaatcatgtgccgcaggtatatgaggtggtttgcgaaaaagcacatatatccggcgcgcaatccgaagaagcagaaggcgacaaaaatatggcctggggggcctggatgctggatctgctgtccggaaccttccagccgatcttgggatttttggcagcggccggtattgtaaaaggtcttttggccgtgctggtgttcgttgccggagcatcggtgaaggacagcggattttaccagatgatgtatgccattggagatggattttactacttccttcccatgatcattgcggcatcctgcgcaaagaagtttaaatgtaacccatatctgggcatgagcatcgcggctgcccttttgtatccggccatggttggcctggagaccaccggcaccctgtttgagggcaccctgatggctctggattataagaccacctttctgggaatcccggtggtatatcccaagtcaggatacgcctcatccgtagttccaatcctggtggccaccggagtgggagcgaagcttgaaaaatactttaagaagattgttccggataccttaaaactgttctttgtaccgtttttgacggtgattatcattgttccgctgacttttattttgattggtccggtggccggcatccttaccaacctgctgaacgcgtttttccaggcgatctttgcgattccggtgctgggcggcgtggtaaccggtatcctgattggcgcgctgtggcagatcttggttatcttcggtctgcactgggcggttatcccgatcggaattgccaatatcagtacatatggaagcgatttattcatgactccttactttgcggcttcgttcgcgcagtctatggtagttgcggctatttatattaagactaaagataagaatatgaagacaatggcgctcccagccctggtttccggtctgttcggtgttacggaaccctgtatttacggtattacacttcctaagaaaaaaccgttcattatctcctgtatcgcggcagcagtgggcggcggtatcctgggcggagccaaggttttacgatatcagtccggcgcgttgggcttcttcggattcatgtcatttgtcaaagacggcgagcctatgtccaatgtaatctgggctgtgatcgcagtggcggtggcgatggttttagcctttgtaatgacaatagctacctatacagatgatgagccgaaggcaaaaaaaaccactctggcaaaaaaggcttcggtggatgaggacgctcccaaatccgtgtttgctccggtaaaaggcgaagtaatcccgctagatcaggtagacgaccaggcattcgccagcggagtgatgggaaaaggcatggcaatcattcccacagagggcaaggtatgcagcccatgcgatggagtggtttccgcaatcttccccaccggacatgcggtaggagtaaccagcaatgacggcgtggaggttctgattcatatcggtatggatacggtgaagatggaaggccggggctttgataagaaggtgaaagaaggagacaaggtaacgagaggacagatcctggtggaatttgatatggacgctgtccagaaagcaggatattccctggttactcctgtcatcatcaccaacaccaatcagtttgcggacattgtaaccagcgcttctggaacggtggatgtggcggatgaactgcttgtagttatgtaaaagagatatggaaggaggaaatcatcatgagcaaaatgccagaaggatttttgtggggaggcgctacggcggcaaaccagtgtgaaggcggattcgacctggacggaagaggaattgctaacgtggatgtgcttccggcaggggcagacaggcgtgcggtcatgagcggcaggatgaagatgctggcctgtgacagcgaccattactatccctcccatgaagccattgatatgtaccatcactatgaagaagatatccgtctgtttgcggagatgggattcaaatgctatcgtttttccattgcctggtccaggatattccccatgggggacgaggaacagcctaatgaaaagggactggatttctatgagaagctgattgacacctgccttaagtacaacattgaaccgctggtcactatctgtcactttgatgtgcccatgcacctggtaacggagtacggttcctggagaaaccggaggctggtggatttctacctgaatttctgccgcgccctgtttaccagattgaaagggaaggtaaaatactggctgaccttcaatgagatcaacatgctgcttcacctaccctttatgggcgcaggtcttgtgtttgatccgggagagaacgagacccaggtgaagtaccaggcggctcatcatgaactgctggcaagcgccctggcaaccaggatggctcacgagatgatgccgggctgcatggtaggctgtatgctggcggcaggaagcttttatccctacagctgcgccccggaggatgtgtgggcggccatgggacgggatcgggacaactacttctttatcgatgtacagtcccgcggcgaatacccgccctttgcgagaaaacgcatggaaaaagcgggagtggagcttgttatggggccggaagacctttctgttctcaaggaaaacacagtggactttatctcattttcctactacgcatcccgtctgaccagcgccaatccggagctgagtaagcagaccgcgggcaacgtgatggcctccatgcgcaatccgtacctgaaaatgagcgagtggggatggcagattgatccgctgggccttcgcatcaccatgaacagcctgtacgaccgctaccagaagccgctgttcatcgtagagaacggcctgggcgcggtggacacgccggacgagaacggagcgatccatgacgattaccgcattgactatttaagggcgcatattcaggccatgaaggatgcggtcaatgaggatggagtggagcttttgggctatacggtttggggttgtattgatctggtaagcgccagcaccggcgagatgaagaagcgctacggattcatctatgcggacaaggacaacgaaggaaagggtacgctgaagcgcagtaagaaagattcctttgactggtataagaaagtgattgagacgaacggggaaagtctgtagatttaagccggcacagctggaagaatcacatccagctttatcgggcatcttccaaaatacatgcaggatgcgctttctgatgctcagtcggctgcctgaaagctattttgtgttctaaagtattgagttttcaaggaacaatcccattttagctatgggaagtttgagttatttcatttgactgcaaatttgattgtaaaagaacccctgaccatattggccaggggttcctgttatactgctattttgtttttacattgactgtaatggaccgttatgaatcctcttctttacgtttcctgcttaacgctgtcaccgcaacgaagattcctgataatatcatggtcaatgtggttctcttagatgtctgacctgtctttggcagtggtgccaacggtacttcaccgtcatcgattaaggttacatctactggtaattctggaagaggtgctaacggcacatcttctggggtgatggttgtggagcctgggccaccaggtgtacttgtgtagcgtctattgcctgtggtgccaccactggttccgcctccaccgccgccggttccgcctccaccgccgttataattaaactgtgcggtaaaggttgtgctctgtgtgaactccgcagctttgatttcatctgcgttagcatagctcctgcttccatctgtccagttattgaaagaataacttccaatgccggatactgttacgttagctgatggatatacaggtgcttccatattgtagcttccatcttcattctgtggcctggttactacttccttgacagttccataaacagtaccacggtttgtgtcctcagacctatattcaaatactacctgatacttatctgggattccatctggattatccggattttctggattagttcctatttcatccttatcaaagtatactgtaaaggtggtattctctaaataggtatttgttttaaaggtgtccatattgatatgataatctttgctgcttccatctaccgtccaataatcaaatgcatacttatcatctgcatttacagttatattagcttttggacttgtaggtgtaggcttaatataattgtcattatcatctctaaatgtatgaacctcttttatctctccgtctacgctaccatttcctgcactcacataggtgaacagaatctggtatttatccgggatttcgtcctcattgtcatctaatgcataataaacattaatgacgttcttcgacacatcagttccaatagtcagtggtaagttctccacataatcaagtgcatactttgttcttggctttactttataagtcgttacttggctctcgaattctccgataccttgctccaatgcctgttcatcctctacttcatcatagaagtaatgcacactgtacttgaaagtatccttgctgtataccacgtttacgacgtctccgccatccgcgctgatattctccgctccgctcctggctccgggtactgcgtaacccgccggggcgaactttgttaaatcggctgggattgcatctccaaaggttcctgttccttccaccttgtcaaggtagtttccttcttctatgctgtccttgtagtagttcaccgtgtagctcaggttcgtcttcttgctgtataccacgtttacgacgtctccgccatccgcgctgatattctccgctccgctcctggctccgggtactgcgtaacccgccggggcgaactttgttaaatcggctgggattgcatcttcaaaggttcctgttccttccaccttgtcaaggtagtttccttcttctatgctgtccttgtaatagttcaccgtgtagctcaggttcgtcttcttgctgtataccacgtttacgacgtctccgccatccgcgctgatattctccgctccgctcctggctccgggtactgcgtagcctgccggggcgaactttgttaaatcggctgggattgcatctccaaaggttcctgttccttccaccttgtcaaggtagtttccttcttctatgctgtccttgtagtagttcaccgtgtagctcaggttcgttttcttgctgtataccacgtttacgacgtctccgccatccgcgctgatattctccgctccgctcctggctccgggtactgcgtagcctgccggggcgaacagtgttaaatctgccgggattgcatctccaaaggtccctgttccttccactttgtcaaggtagtttccttcttctatgctgtccttgtagtagttcaccgtgtagctcaggttcgtcttcttgctgtataccacgtttacgacgtctccgccatccgcgctgatattctccgctccgctcctggctccgggtactgcgtagcctgccggggcgaactttgttaaatcggctgggattgcatctccaaaggttcctgttccttccaccttgtcaaggtagtttccttcttctatgctgtccttgtagtagttcaccgtgtagctcaggttcgtcttcttgctgtataccacgtttacgacgtccccgccatccgcgctgatattctccgctccgctcctggttccgggtactgcgtaacccgccggggcgaactttgttaaatcggctgggattgcatctccaaaggtccctgttccttccaccttgtcaaggtagtttccttcttctatgctgtccttgtagtagttcaccgtgtagctcaggttcgtcttcttgctgtataccacgtttacgacgtctccgccatccgcgctgatattctccgctccgctcctggctccgggtactgcgtaacccgccggggcgaactttgttaaatcggctgggattgcatctccaaaggtccctgttccttccaccttgtcaaggtagtttccttcttctatgctgtccttgtagtagttcaccgtgtagctcaggttcgtcttcttgctgtataccacgtttacgacgtctccgccatccgcgctgatattctccgctccgctcctggctccgggtactgcgtaacccgccggggcaaactttgttaaatcggctgggattgcatctccaaaggttcctgttccttccactttgtcaaggtagtttccttcttctatgctgtccttgtagtagttcaccgtgtagctcaggttcgtcttcttgctgtataccacgtttacgacgtccccgccatccgcgctgatattctccgctccgctcctggttccgggtactgcgtaacccgccggggcgaactttgttaaatcggctgggattgcatctccaaaggtccctgttccttccgccttgtcaaggtagtttccttcttctatgctgtccttgtagtagttcaccgtgtagctcaggttcgttttcttgctgtataccacgtttacgacgtccccgccatccgcgctgatcttctccgctccgctcctggttccgggtactgcgtaacccgccggggcaaacagtgttaaatcggctgggattgcatctccaaaggttcctgttccttctgccttgtcaaggtagtttccttcttctatgctgtccttgtagtagttcaccgtgtaactcaggtttgtcttctttgtataaaggacatctattacattgtctttttctttaattatatatggccctgctggcgtctggacaccatctttatatccatccggcctttctttgttaagcaaggttggaccaagggtaactccttccccaaaagtcttattagttatttcctcacttgcgccaagataatgagcttcatctattacatctctataatagtgaatttcataagacaaatctgtccttctggaatatactacgtttacgacgtctccgccatccgcgctgatattctccgctccgctcctggctccgggtactgcgtagcctgccggggcgaactttgttaaatcggctgggattgcatctccaaaggttcctgttccttccaccttgtcaaggtagtttccttcttctatgctgtccttgtagtagttcaccgtgtagctcaggttcgttttcttgctgtataccacgtttacgacgtccccgccatccgcgctgatattctccgctccgctcctggctccgggtactgcgtaacccgccggggcaaactttgctaaatcggctgggattgcatctccaaaggttcctgttccttccactttgtcaaggtagtttccttcttctatgctgtccttgtagtagttcaccgtgtagctcaggttcgtcttcttgctgtataccacgtttacgacgtctccgccatccgcgctgatattctccgctccgctcctggctccgggtactgcgtaacccgccggggcgaactttgttaaatcggctgggattgcatctccaaaggttcctgttccttccgccttgtcaaggtagtttccttcttctatgctgtccttgtagtagttcaccgtgtagctcaggttcgtcttcttgctgtataccacgtttacgacgtctccgccatccgcgctgatattctccgctccgctcctggctccgggtactgcgtaacccgccggggcgaactttgttaaatcggctgggattgcatctccaaaggttcctgttccttccgccttgtcaaggtagtttccttcttctatgctgtccttgtagtagttcaccgtgtagctcaggttcgtcttcttgctgtataccacgtttacgacgtctccgccatccgcgctgatattctccgctccgctcctggctccgggtactgcgtagcctgccggggcgaactttgttaaatcggctgggattgcatctccaaaggttcctgttccttccactttgtcaaggtagtttccttcttctatgctgtccttgtagtagttcaccgtgtaactcaggttcgtcttcttgctgtataccacgtttacgacgtctccgccatccgcgctgatattctccgctccgctcctggctccgggtactgcgtaacccgccggggcgaactttgttaaatcggctgggattgcatcttcaaaggttcctgttccttccactttgtcaaggtagtttccttcttctatgctgtccttgtaatagttcaccgtgtagctcaggttcgtcttcttgctgtataccacgtttacgacgtctccgccatccgcgctgatattctccgctccgctcctggctccgggtactgcgtaacccgccggggcaaacagtgttaaatcggctgggattgcatctccaaaggttcctgttccttccgccttgtcaaggtagtttccttcttctatgctgtccttgtagtagttcaccgtgtaactcaggtttgtcttctttgtataaaggacatctattacattgtctttttctttaattatatatggccctgctggcgtctggacaccatctttatatccatccggcctttctttgttaagcaaggttggaccaagggtaactccttccccaaaagtcttattagttatttcctcacttgcgccaagataatgagcttcatctattacatctctataatagtgaatttcataagacaaatctgtccttctggaatatactacgtttacgacgtctccgccatccgcgctgatattctccgctccgctcctggctccgggtactgcgtagcctgccggggcgaactttgttaaatcggctgggattgcatctccaaaggttcctgttccttccactttgtcaaggtagtttccttcttctatgctgtccttgtagtagttcaccgtgtaactcaggttcgtcttcttgctgtataccacgtttacgacgtctccgccatccgcgctgatattctccgctccgctcctggctccgggtactgcgtaacccgccggggcaaactttgttaaatcggctgggattgcatctccaaaggttcctgttccttccaccttgtcaagatagtttccttcttctatgctgtccttgtagtagttcaccgtgtagctcaggttcgtcttcttgctgtataccacgtttacgacgtctccgccgtcagcactgatcttctccgctccgctcctggttccgggtactgcatagccttccggggcgaacagtgttaaatctgccgggattgtatctccaacagaacctgttccctcaacttctccaaggaaattacggtcgcttatgctgtccttgtagtagttcaccgtatattcatgggagacactcctgtaatacaattttaatacagtattattatcactaactgccgcgctcgaatactcataatttaatgcatattctttaagacttgatacactcttcagatcggtatatatgatatatgtttcaccataatacccctctatctttgtattttgcagatttccattacgtacatacccgttaaaatcagttccttctcttgtaagtacgcctaacgtagaactctccaactctcctgtcaaaggctgaccatcttcagttaaatactgtatctgcaaattcgcttcattcggtttaatataaattcttactgttaccgtctgacttgattcggtccatccaacgctaaacccattttcccaattaatttcaacattgtcgacagttaccttagaaacggaatatgcgttatccaaattaggcgtaatatatataccgcttactcccggatgtttatcatgataactcgtcaatgatgatcccatactatttccgcttagttcatcaattaattcatattcaatttttcttgtattgtcattactattctcccaccaatcggacacagcaatttcaacctgcttcgccaattctgttctctgtaggtaataaaaaactaattgatcagttgcggcaaagtctttccaacttccagaagatgtataatattggatattttcgttaaaaaaccttaacctttcgattctttgcccattttctacacggttaatgcctgcattattcgtttgatgatagtttgctggaagcactctggcatgccaaaaaataagttcatcattctctcttgttcctgtagatggagcaatctcgtctaccggcacaccgctgtctccatactgtgacaggtctgtactgctgatattctttgactgctgtccgtccgaacctgtaacttcacgattagtaatccaatactctgcattaatgccagatgtatctgtcactattattgtataggaatattctcgcccccaactactagctgcccttaccatggctgttcctggcttaagtccaactatctcaatactattcctattctgagtactgccgcttataaagctaataacatcggaacctgaagtaacgctccaatcagcatttaacagcgtatttctattattctcattataaagagttaatttttcaccaacggcaatagtggtcgaatcatactgtttattaccgctcacaaccgcataaatagtaaaatgctcagcctcaaaggaaatctcgccaactgtctgttctcctggaacatccactgtatcgcttacagtctcaacctttactatatcttctggagcaatttcactttcctgggcggctgccttttctttctcttccttattactatcctgcacggtttcaacacatacaacctcaacaacatcggcctctgcactctgttctataatcggcttacctgtgaatgtaacatttacaagccgacttccactccacatctcagcatcaagaagtttgtctccaagccacagattaatatcataagccatgactgaagatacattctttttggtatcagcactgattatctcctgaacagctgtttctacattatcattgacgcgtacagctgtagctcttactcctgctggcaacaccccttcttccgccactatgtggattaccattccgtcatccatcacaagctctgcatcaaaagccggatgtatatcagtttccaccgtatagacttcaacctcctgctcctcataaacttctggaacagtataccacgcagtctgcgaaccatcctcattatcagctatcgagtcagcttccaatacttctccattagccgtaacactctcaaccgcaaatccaatctgattcttaactccaaaggttaaactctctccttcttccacacctctggcgccatccacgatacgtgcaccagctcccggattaatggagtaagtaattttgtaaccatcaaagtcatccaaagccttcaactgattaatcgtagtggtataaacctttgcagtactgcaataccccataccaaccaaatcagttgttgatgctttattaactgtctcttccggcttaacctccggtttcgtaacatcggaaggggttcctacctgaacttcttcggttgcagcgggtgtttccgctgcatctgtcgtagtctcaggagtcgtagtctcgtcaccctctgacggagcagctgtagttccctctgtggttgtttcactcgggtctgtgctctcccctgcctcggcagtagtttcatccgatgcagccgctggggattcttcctgttttccttcctgtgcttccgtagtactttcagtctctgctggtgctaccggctctgtctctttttctgtcggagcctctgtttccttaacagcttctgtcttttcttccggctcagcctcaggttccttagcttcttcaacttttggagcttcctcagcattaccttcctcattatcagctactaccggcgcataatgacggatgatggatgccactggctcacctgttgccgcttctggctcggctgcttccggttcaggcgcatctgcttctgcagcctcctgagttttttcctcagttgtttccggagcatccgttgcttcttctgtcgtcgcttcctctgtggcagccgcttctgtagatgtctcagtcacaccttctgtcggagccgtgcttccctcttccggagcagtcgtctgttcctctcttggcgcatccgtagactcactctcacccggaacaactgtggtggtttcatctaccgttccttctacggttggtactgtggtatcaggagctatggtttcctcagtgcctggtccattgacatcttccggtgcagtggctgtagtctcctccactggcttggaaatgtaattaatctcctcatcaccatatgccgcttcaaagctctttacagtaattctcttggtctttttaaccttttctacgccattctccatccttgtgatgtttgtggagcagctgatagtatcttccccattattcacatataagaagataatctcctcatcgccggttaccatatacatgtcatcggcatcttccggcagtcgaacgaatactctcagttccgcatccatactgccgccgtccggatccgggaatacttctaatactttcccctctccgtaaaacaaactctcgaatttagcaatgtctccattggtaaagtcgagatcgcccggtgatattacattgccgttttcgattgcttcttcgatagctgtcaccaattgggaacccgtcatttcgaatgtgacagactctgacgacgatgtagccccataagctgcgttcaggtccgcaccaacattggtacaaaccatggctgccgctaacgcgaaggccaccagacgcttccgcatgttacagactgatttctttaacatgccagacctttttcgtccttccatacttacactcctctcataattttttctttctacataattccagataaatccaactggctgaaactagtatagcaaaccacagttacaatctggttacaatttaagaaagtttaaaatttttcttaaattaattatgtaattatagattccctcgctataatcatagcaaagagggcgttatgcaaagcgttatttttccatgatttttcgttactttttatttagatcattaaaatttagcctgttttttataacccttccatgtatttgtatccacacatttcatttataaaattttaagaaactatcgaatgaatgagaaaaaacctcattttcaattgtattattatcaataatatggtaaaatgattacagatacataaagctacatatttttgagattttttctcacgttttgaggtgctattatgctaatccagttcagttttaaaaatttcaaagcattcaaagaggaagttttgttggatttcctacctgcctccatcaacgaacataaaaataccctgttgaaggacccggctgacggcgaacgcatccttcctcttatcggaatctatggccccaacagcagcggtaagtccacggtcctcgatgctttatcctgtctctcctctctggtcacagcatctgtaaccgtaccaaccagaatcagagatgtgcattgtctgttttcggcagattgtaaggatattcccactcagtttgacgtgttattccgcagccaggggttcctgttccgctaccagctccagttctcaatgggaaccatcgctgaggagaatctgttctacggcagtctgggcggaagtgatacgggtattctttttaataggaaagaatccgtcatccatcccggacgtgaactcatctccttctcccttaaggccgtgcctccatccgtaactttgctgtcatggctcaatgcctatacggattccatacatgccagggccgcctattcctggttcagcagaatacagggaaacagtcccagggaacttccttccgacatggatacccggcggagactgtgcggtatccttaaggatttgggacttgatataacggattacagtatcataccggactcagaccacaaatcccctgctgcattccttgttcacagtccttatgaaggctgcacctttgaactgccgtgggaagatgaatccatgggcacaaaaaaactgctctcactgctgccttcagtcctggccagtctggatgacggaagcctgatgatggcagatgacctcgactgtattcttcaccctcacgcactccgttatctgattgcgctctatgccaatcacgagaaaaatcctcacaatgcgcaactgctattcaccgcccataacactgccattttacagccaacgcagatgcgccgggatgaaatatggctttgctgccgtcaggaagggcatgatacggaattataccctctgtccagttacaaaaaagaaaatggcctcatcccgcgtaatgatgaggcctatggaaagcagtatctggaaggccgttatggtgccatgcccaatatacatgcctagaacgcgtttaattattacattccaaaatccggataccgtattctttctatataataacaaagccgccgcagattcactcttctgcggcggcttatctaatcccaaccaatctgttctattactaatctttctgtcagcttccccttattcttcctatatcaaactctccggcatcacctggtaattgagtttcaccttcctgcccccatcccagagacgcaggttcctgtctatcctctcataaatccgcaggcaatactcattggacgtgccgtttagcatgaccagatattggcttggattatagcaggtaaataaatcgccttttctgagggacttggcgatggcatcgtgaagcttttctgacgcggtctttaaaagctcccctcctgtatccagaggttttcccctggcatccagcaaggtacagcacagaagcacactggaaaaatccactctctcagccatgcgggccaaaagcctgtaacagtcgataaatgccggatatgcacagtaataagggccgttaatccgttccctctcgtgaaggctgtcccttatatccttaagcgtatccgatgtataacgaatctgtccgctcataatgcggaaccgttccagcatcttctcggaaggaggaagtccctgttcctcaaaatactgggaaactgcggcgtcatacacctgcatggcttccttgaagcgcttcatggcaatgaggcagtcaattttcataatctggcattcctcatacggatacagctcgcaggcataattacatatctccagaaggccgttatattcccggtttttcttcatgagactgctggcagcccgcaggcagctaaagtacagctcctgatagcgcactcccaccactgatacccatttctcgccggcaagctgggccagaaactctccctgatacagaccacaggcccgctttaagagtgcctcatcatgggtgcgcagggcctcctttgccgtattctcgaaatccctggcatcaatatacaccggcagctccccgctgtcccacctgtagattcctccgtctgtgcggatatactcgcggggcggcagttcactgccctccaaaagcttgcggagccggaataccgcggcccgtaaacttcccgaaggattggagcattcaccatttccgtagagcatatccagaagctcctccctgtgtacgccctcctctcctgaatacagcaatataagtaccagctgcagtacctttcccgaaggtcctccgggaatctgcagcggcttcctgttatattccagcatgatacttcccatcataaatacggtcagaccttccccttctctggccggataacatgtgccttcccccttcatttgtatcccccttgtggtaaagcgttattttatatataacacattttactacagattcctatgtttttccattatttatctttcatagaccaaaaatagtaaggaacctcaaccaaaagcatgacactccagcctatggcgcaggcatatgcaacccccggaagtccgattccgggcgttaacaggtacacaaacactaccctgaggctggtttggacaaaggttcccaacaaagtaacgctcatctttcccattcccctgaaaaatccctggattccattggtaaatgccggaaacacataaaataacgccatcattcccagataactgctgcccaatgccacaatcccctcatttcccgccgttacaaacagccccataagcggccttctgaacaatgtaatggttatgcagatgaacacccagtaacatgcttccagcatgagccctctcctaaatccctttcggatgcgctccttcctgcccgcccctctgttctgcgccacaaatgtggtaattccatgtgaaatgctctgctcaggcgtaaacgcaaaatcatcaattcggttaaccgcgttgaacgccgcaatcatatccacgcccaacggattgacagcgccctgaatcaacagctttccgatgggctggcaggactgctgcaatgccgtaatgctgccgtaacgcagtgtctgcctgagaagctgtctgtccatgttaaactctccatgccttaactgcagcatgggaatttttctgtatacatacgttatgcatagaaaggccgaagccgcctccgccaccaccgtggtaacagcagaacatacaatgccgaatcccatccccccaataaaaatcaaatccaaaaccgcatttaatatggaagaaaaagctaaaaacttgagcggcgttttagaatcccccacactcttaagggcagccgatactgcattataaaaataagtgaacggcgcgcccagaaaaatgatggacaggtaagaagccgccttgcccagtatctcatccggcactcccagcactccgagaagaggttttgagaaaaatcctccaagtatggctattaacgctgaaaaatagcagccaaatatgactgtggtggacatttcccgtttcagcttttctttctggccggctccataaaactcgctcatcagtacggacgcccccatacagatgcccgatattccgagtatgacaatattcatcaccggacttgccgtaccttccgctgccagcgcctcctttccaatgaatctgccggctatgatggagtccaccgcattgtaggtgagctggaacatattgcccagaatcaggggaatggaataatccaccagatgttttgtgattccgccttccgtcatgttaactgccgccatatggttctccttctgtccctcattttatatataaatacctttatccaaggaaaaggcccggcaggaccttctgaatcctttcaaccttctgccgggcctgattccatgtagaatggaatgtgaatggtattctgttaataactgcgcagcttatcttcatcctcttccgtggtcttatcaatggatcgaatctccacatcatatccaaaacggtcatccacctttacatagaccttatcccctgccttgcggccccttatggcctttcccagaggcgagtcaatactgattaatccctgaagtgaattacctctgacagtggttacaagtttataccgttccgtctcatcatcatcgggaatatagacctctaccgtatctcccaggccaacttccccctccctggagttatcagatataattctggcggtttttatcattttctccagataacgaatcctgctctcattcctgttcttatcctgcttggctgccttatattcaaaattctcacttaaatccccatgggccctggcttccttcaccgcctccagagcttccttgcggaccactaatttacggtattctatttcttcctgcattttctttatatcactggctgtcagattatcatacattatattgttccctgtcctttcttttcccgaattcccgtctgtgccttcatacagccgttctacggatatatccgaagctgtccgccggcacttaagtcatacacttttccgggagccagatttccataatccacatgggcaatatatggattggccttattatagtaagcggcaaaaatacgctctacgtcctgatttgccgtggtcttaaaacaccggtccgccagggtctgaggcatcagaccggtcacggacagatccaccttataccagctgcctcccgcttccacgtaaacaaacatatggtccttatcattgtcatccggtgcacagaagcaattaaggcccatggccctggttaacatctgatatgccacggaaatgccctcgcagaccgctttatgatttaccaggcagccataggcagtaaatgagggatccccagaggtatcctctccgttaacgaacctggaatacaatcccttatcataagtacagctggaagcaatgaaaagagccgcatgctttgcccgttccagttcgctggcgtccctccaacggtaactgttcagataatcccggaccaccagggccagggcattgcgctgctgcttgtaggtatcgcttcccacattgtcctgatacagagccacctggccaagcaccagaaggctgtcgccatccacagccatttccccggttcctatctgatcgctttctccgtacaatgccttgcacaggtcgtcggaaagcccaaaataattatacagcccataattataatcctgacgcaggcgtctttccatcaccggttcaccttttgcattccatcccatgattacatccacatactgaagcccggcctggtccatataatccttcagggggtagttggcatcataggacgcttcccatcctccaaccgtccacgccccgtccgctcccacctgggaccaggctcccgcatagacagtagcggataataaaagggctgccgcagatgccgctgccagcaaccttaccacggaccggcctatgtttgattgtttcatatcggattgcttcatatccgattgcttcatatccgattgcttcatgtctgtctctcccccgccgaatcgtcctaccataatcctgtctcctgcttttataaattgtttattttccctttagtttctttattgattctttagcgtgtgctcaaactttggccatattttccctgtatagtaatacttgtaaggcgatagaccttttactatacaggaaaacactttttcatacctatgaccggcagctccccttctgccggtcccctccaaatgaaagataagtttaccgattcaggtaaacttatttttttatgcgcatatgctatataaaaatcatttttacaggagacaccatatgaccaaccaatccgtcactcctgctgacatctttgccgatttgctgcgctttcgggcccctgccgccattgcctgggtcagaggcggaagtgccgcgcccaacctaagcggcctggtaaaattctaccagactccttacggtggcgtactggtggaagccgaaatcttcaatctgccaaacaaacaggcacccggctccacagacttttatgctatgcacatccaccagaacggtgactgttctgatgacttcgccaaaacaggggaccactacaatccatccggcaagcctcatccggaccatgcaggcgacctgcttccccttcttggaaacgaaggttatgcctggctttccttctatgacaagcgcttctccacagacgacattatcggcagatctgtagtcattcacagccatgccgacgactttacatcccaacccgccggaaactccggaacaaaaatcggatgcggtgtcattgaaaaagcggattatctaaaagtatagcacaatggcaggaaaatatcatccctacagttttcacaaaaatacccaggaaatgcagcagaacaaattacagacagaaagtaccggataccgccattaatacgtgcggaatccggcaccttccataatatccagatcccggaacacagctgccgccgctgcctcgtattcttccaatctctgtgatttctttattctcttaatgtatttcccattgtcggaaaaaatctgaatcatacaggtccacagctccttcatcttaaacaggacatttctgtccccggacatgattgtccggtagccttcgtatatcatctggtggaattgccttaaggtttctttgccggttcccgccccaccggaatctgcccctgccgcaattctgtccagcagtccgggattggatatgattccacgacccagcatgactctatccaattccggataatctccgcataatgtctcgtagccagatacagtaaatatatccccattataacacaccggagcccggctgccgtcaaacccgctgccaaatgccggcatgttcggggtgtttttatagtaatccgtgcggactctgggatggagaattaattccttcagcggatagcggttgtagatttctaaaaggcccgtgaattcatccggcgataccaaccccagcctcgttttaacagacagttccatacccatcccttccatcttcccgcatacctcgtccagaaaccggtccaggctgtccggcagccccaggaaaccggctcctttatacttggacaccacggtaccggatgggcagcccagattcaggtttatctcagaatatccgtattcctgtaattcctttgccgttcgtataaaatcctctgcctggtttgtgagtatctgagggactacgtacatgccctggttgtgttctggcagaatgtcgtttaactcccggaagcttagactgctgttggcctttggggacaggaagggagtgaagtacttgtccatgggatgatagcaggcgtggtacgcgttgcggtatatatagccggtgaggccctccatgggcgccatgtaatatttcattttcatatcagatatcactcaatcctcaaaaaatcactgccctttaagtcaatatcattgggcaccctcaccttacaccttgatatcatccttaaattctgtaatattttattgatttctgctgtcattatatccccatcctcctcccgcaggcatttaataattgcattcagacttcccctgtaactcctttctaattctatggcattatctgtcagccatcgtgaaaatggatggctggcattgattatatttcggcctatgctgttttcttccgtcaaaatgcggctgtccgcctcatctgattccgcaaataacagaggaggaaatacaagttcgctttccgtgaatccatcttccctcaaccctatggcgtacaaagacatactgcatccgttactgctcattttacacttcagtctgcaattcttttggaccaatgcccgaactatgttttcatccggtctgttttcaatttcaaaagaattactgtgagacagtgaaccggtgtttaagcatatgccattatcttcatcgttctccttaagcatggtctttaatttttcaattgtcagatttatcccgcacagataaaccgattccgccgccttggaaaactcagcattattcaataatatcaaatactcacttaaaggacagttatcataatatcctatctgtccataatccagttctgttcccggaagccggcgttccaatacagacaggtatcccatggtctccacggaaaagtgcttaacacgttccctgctcatattcaacatcggtttaaaccttccctgtaaaagtacgattgtataattaacccattgtctcaaccagctgtagtctgaccaattccagttaactttaattccgttataggctgtgacggacaccccgtttatgcccctttccctgccctccatatagtgatacatatatttttcagctaaccttttcagctgaggatttctctccaggggaaccgaaatgtttactgtgctgcgatttgaaagttctgtcctctctaacccattatatatctccagccctctgtttactatttcctccagttcatctgatgcaacatccccgtcattgccgttcaattcctgcagcagctgttctttgctgtatttcttcgtctgaagcatttctccgcattgtctgtggatatggcttatatctttatatttctgaaacatttcttttacaactgactcaaggccgcctacattcaagccgctgtcactgacaccatcccagtgcatttcatatgacataagtatatgcagcattttattctcaaaacttatctcctggttcagagaacgtcccacccggatatctcctatcctgaaatccaggtcatgcgcaagctctccatcaaccgtaatcagaaaggtgccgccccttatagaaggaacaggtacatagtcctgaatattcctgcattccaggacaatttccggccttttaacccagcatatctctttgaaactccggcttatataatctatctcctcatctgtaaacggaatccgaatcacctggtttgcttttatgtcctcaatcagttcctccgccataggaaaataaatcgtctcatagctgtccttatacacaatgggcacgtccgggaaaagcacataatccttcacgatgttctttacgctgccgctattcccgtgacgaaataaattcatcctaaccgcaatggatgttcccggtgtctgacggaacggctcccgcccggattcatccatggatggcatcatttccccggtatctccattttcctcatctgcaaggctataatacccgctggtgccaatcataccgaaacggattccgtggccctccttatagtgtcttgtgcttacctctatcctgtctccgcataagaaacacgacaggattccgataccaaactggctgattggtttatagtcatagtaatccttatttctgtaatacccctgataaaattcaggagatgtatagtaagagcggccaacctttaaaaaataatccagaattatcttctcagtcataccaatcccattatcgtccaccctcagccaatcattcccatccggatccatccatgtggtaattacaacagacggcttttccttcatccaactgtcaaaaccgtaattcctgtcaagcattctgcgggtaccaatggcatccagagaattctgcagcaattcacggataaacaccgctgaatgggtatataaatcatttcccaccaaaagctcaagaacccgctcagaatccatggttaagtggtattccccggtccgatatccattactctcaattccgcttctgtcaatctggattggcagggcaaggtttctccatctgtcagagcagttattgcttattacctcggaacaattcctcagctctaaatctatatagtccaggaacatatgaataaagtgttctgtctgcatgctgttgctcacggctctaaacgcaagggcgtccctgctagcctgtttgggatacctgaatcccagtgacgactgatgcttcctccactcaattacagactgacggtcctgggcatcttcgattttctggtattcatatagaatttccggacttctggtcacgtcgaaatccaatatgtcccccaaccgcagcaacacggcacagaagcagtaatcaatctcgttgaaattgtcgtatggtatttcttttaccctttcgatattctctccatggctttggcatactttaatcagcctgtccctgcggacattggaaacatccagggagtctttcagaatctttgcaattctctcatggtgaatgctcctgaaaaaatcaacctgaatctttgccggtatttccccctcattttcaaacattaggacatccgcagacggatgctgttccaaataccgtttgaatcggatactgtttaattccgactgtttttcctgttttgagtaacacatgcctatatcatgataacatgccgccaataagagaagttcggtttccccttcagttaacttcccgattccctcttctcccagtaaattttctattgcgtgtataacgttgacaacatgtacttcgtcatgcagggtataggtgggaaatgtatcccgtactgtttttaacatggtaatcgccgcgtcgcataaggattccatggcatgctgattctttacgcttatatttccttccagtttcttccataataaagtatctttatatttcatctgacaatccccgatttccgttttaccgtatttggttaatcctggttatattatactataaaatattatccgcgtatattggtgatttgcgtaaaccagcagcagaccggaaacgcaaaccgaaagcagccagatggagacaaataaccaacagtcagcctaagttactcctcttcaaaaggaaaatagaatccccagggagctgcaactccctggggattcgtctgtgcaccattgaaacacattcgcttttctctgctaatattatattacgtcatataatcataaatgtcaataagataacttacatcaatttttctgttccaaccacagaaaattctttttccttattaaaccaactatttacaaggaggttcctagaatttcccagccttcgccgcttcctcgatgctaaccgcaatcgccactgtcataccaaccattgggttattaccagcgccgataagccccatcatctcaacatgtgcaggtacggaagaagaacccgcgaactgagcgtcagaatgcatacgtcccatggtatcggtcatgccgtaggaagcaggaccagctgccatgttgtccggatgcagagtacggcctgtaccaccgccggatgcaacggagaagtacttcttgcccttctctacgcattccttcttataggttcccgcaaccgggtgctggaatctggttggattggtggagttaccggtaatggaaacatcaacgccttccttccacatgatagcaacgccttctgttacgtcattagcgccgtagcagttaacctttgcgcgaagtccctcggagtaagactttctccacagctctttaacctcgcctgtatagtaatccatctctgtctccacataagtaaatccgttgattctggagataatctgtgcagcatcctttcctaaaccgttcaggataacgcgcagtggtttctggcgaaccttgtttgccttctcagcgataccgatagcgccctcagcggcggcaaaggactcatggcctgccaggaagcagaaacagtcagtctcttcttccaaaagcatcttgcccaggttgccgtgtcctaaaccaaccttacgctggtcagcaacagaacccggaatacagaatgactgaaggccctcgccgatagctgcagctgcatcagctgcccttctgcaatcctttttaatagcaatagcagcacctactatgtatgcccaacaggcgttctcaaaacagattggctggattttcttaacctgatcataaatgtccaggcctgcatctttcgtaatcttctcagcttcttcaatggaagcaatgccatagctgtttaatacagaattgattttgtcaattcttctctcatatgattcaaataatgccatcttcttattcctcctattcggtcttcatcattctttacgtggatcgataatcttaacagcgtcagcaacgcggccgtactggccctgtgccttctcccatgctgtgttaggatcgtcgcccttcttgatgaaatcagtcatcttgccaaggcttacgaactgataaccaatgatctgatcgtctgcatccagtgcaataccggttacataaccttcagccatctccaaatagcggggacctttcttcagggttccgtacatggttccaacctgggaacggaggccctttcctaaatcttccagaccagctcctacaggaagtccatcctcagagaatgcactctgtgttcttccgtaaacaatctgaaggaacagttctctcatagctgtattgatagcgtcacataccaggtctgtatttaaagcttctaacacagtacggcccggcagaatctctgctgccatagcggcggagtgtgtcatgcctgaacatccgatggtctcaaccagggcttcctggatgattccttcctttacattcagtgtcagcttgcaggcaccctgctgaggagcacaccagcctacgccgtgggtcaggccggaaatgtctttgacttcttttgattttacccattttgcttcttccggaattggagcagcgccatgatgaacgccctgtgcaactgtgcacatctcttctacttcatgtgaataaatcatgtgttaaaactcctttcaaaaatgaatttgatcaagtacagtgcccattcgttaaatttatcacatcatacttggttctattctctcacaaaatccgacattatgcaagtggtttattctctggtattccttatattttcgacatgatttagtatcatttttaccaattttataatctggtattttgtttattaacgattcatccggtacagcaaggctgtcaagccacagcatatcagccgcggcacctatgccttcatcctcttcataatatgaagataatacccaaagaaaataattccttttacaatgcttgaaatagtcagggcccaccaaatgccattcaggcccagggccgttccacccagtatcacggcaagcggaatgcgcgccgttgtgagaatagtggttatgacagacgcctccattgtctttcccataccggacagggctcccacagtcatcagttccacacacatgaacatttccgaaaatccgataatgcgaagataatcagctccggccggtataacctccggctcatggataaacaggctgaatatgggcgctgccccaaatataaggaggcatgtggtaaagataccccatataaacataatggcagatgccgtcatataccccttttttacccgcttcaggtttcccgcgccatagttttgccctacaaatgcattgatggctgtcccgaaaccatctgctgtcatccacgaaatggattcaatctgtcctcctactctctgggctgtcaccgtagcaacggctgcaccggctactcccatgccgtgaattggccccaggccaaagataagcagaggatccaacacaatattggcccccataccgatgcagttggccacaaagggagtcctgctgttgccggaagccgtatacaagcccgtcagtgtctgtccaataaacgcaaagagaataaggccgcatgcaattctcagatacacaattgcatctttgaccaccaaagacgaattgaggtggaaaaagcctatcaggggtcccgcaaaaagatttgttatgattccatacgcagcggccagaaccagagccagctgcaaggctccctttccgtactgtaccgcttcccttctgtttccttccccataggcatgagcagatttcacctgtccccccatcctggccagggcggcaacaccggaggacagccaggtatacatggcagccgctccaaccgctgccactgcatcgcttcccaccatgccaatccaggccatatccgtcagattataggcagtctggaccagtgatgtggccatgattggcagtgccagctcagtcagggatgtgagtatatttccatttagtaagtctatattctttttcactaatgtcacctattgccaccgtatttgcataatgcttctattactatactatttttctgctttatatgcaatatacatgacagccaggggcagcgttaacttttttgttttacacgccccatccccaccaatcccaacaaccagcgtcacacccattcaaaaaatccagaaaaaaatgtgctgtccacctcagaaaatactactatacgggtatcacataccatgcagcagcgcctgcacaatcagatattggtctttgccgtagcaagttgaaagcgttataagtttctcatccccttctggaatgattcccgtctcatagagggacgctgcccccattttctcaagatagggcagccactcctcctccataaagttagtgccataggctccggcgtcgctctgatgacggagctgacaggaaaaaatgggacattccagccactttcccctgtaaaatacctgtatgacaggattttcccgaaaaaaagcttcctcgccatattttttcaaatcagcaaacatacttccgtccttcatgttatgcccatacagcaccgtgttgtccacagccaggggaacagccgaggaatccgcaaaaacgcagcctgatatatgctgttcctgataaaagttatgattcagataatattcgttatcttcatgccgcaccaccggataatcaatttcggttccaggtacagacagccagaactggtattccggattgatggaaaccagggccgcttcattcaggtcaggctttccacaggcagaattacctttagggttttccttcccgtcagtatacctcacctcatccgagtatccctctccattaacatccaccgcctcagcagcatatccttcccggatttccttcacttcccttccataagcctcatcctgtaccatacgataccccctgcgcccatcagcatagtccaaccccgtcttaaccagaaaacgcaggctgaacacaactcccgcgaagaacatgaacatagccaccgccataccatacggtcttgtccgcttaatcatagtcagagccacggctgcaatcaataccacagaacaaatcccaactacaaacgcagttatccccgaaaacagcggccgcacactgtttttaacaacatacctctcgtcaatccctgaatatccaatctgtccgctctcgtcatccccttcgatgtcatccagaaatacgctcctgctaatctcccctccataaactgctgtgcagtccgcaaccaatttacgtccgaccgctgtcaaatttcggcacagcaccccatccttctcataaatctcaccattccactggaattgctcaatcctgtacgcttccgaatccaggcctgcctgacttaaaatttccgtctcatggcttgtcaggctctccctaatatcctccttccgtgcttcaatcctcaccccgccaacttcataaaaacctgcgtcataatccgccaccgtcaaatccagccggaacccgtcctcccaatgtttatcagaaaaatgataacttaccagtggcagcagaacattccgttcctttcctgatatatcgtctctggctaatatccaggcggtttgcgggacaggctctatgtcttccatagaggtatatatcatcttccctgagacagataaggtatccgtttcctccgccatcacatcaaaggccagataaattgttatgggtatcaaaatcagaataaataccatccatttcctgccctgactccattccttctttcgtttcatacgcagacacatactaaagcccgccacacataaaactgtcattgctgctgccgctgccacgggcaggtcgtctccggtccttaccgtatccctgtggccggacccaaaatgatatgttccttttccaaaccggtttcccgcttgatacacagctgtaatgcttcctattttcctgaccggcggcttttccttccaattatatataattattccgtcctgtgtgattataccatcctgcatcaccgcaccgtcctgcgtcattgctccacccagtatccgccccaccgcatccagtgtaaactcgtatacctcatcagccagctgatatccctgaggtgcctctgtctcacgaatgacatacaggccgggtgttgctgaatgataagtaaatgtaccgtccgcgccggttacagcttcggttcccccctcgccctcagtctccagccccttatccgcaacaccgcttactcctttttcgatcctgaacctggctcccataagaggcaggccgctgtctccatccagctttgtaattgtaaactccaattccttatccacaacctcatatgtaccccttatgacatcactgccattgactgtaaaactgaatatgtctggatttaatgcatatccgtttggcgcctttgtttcccggaaggtgtatgtaccattttcgggccttcttatgcggaacgttcctgtgctgtcgctgacagaggtaccgattgcccggcccgtctggtcataaaatgtgaattccgccccccggagtacccttccggaaacatctgttttcttaaatgtaatgtactccacctttggtcttggcctgttgcctccgccggatgaggatgctgtccggttctcaaaccggaatacctgaaccatattgtgcaataccttatcatccccccggcccatttccggtccctctgtcccggtccagtcttttaccacaatttcccgatcctcagtcctctcatatccggatggggcctgaagttcatggatgatatatgtgcccggtttcaacccgtaaaaacgctgtccgcttcctgcctcggatgtccactcccggaccacctttccgtcagacttatcaatgagctgcaatctggcgcctcccagcaggtttcctgtttccgccgacgtcttttccacatctacgatggttgtataattgcgcataaccagacggggaatctcggtcattccgtccctgatagtaaattcgacaggagtttcctgcagttcatatccctccggcgctttcacctcaaccagacggtattctcctgcactcagattctttgtataatgcccctgcctgccggttgtccattcttccgctgtcttccatcctgattctgtcctgcgctcgattctgagtactgcgccttccagcatttcctctgtatcacctgacagcttgtccgtaactacccggttggtgtcgttggcggggttatattcacagacaatgatgtctgtcagctcattcctgtaatgaaattggaattcatacggttcaagggtcagcatgtgcccgggggctgcctttgtctcactgcacacataggtatagggtttaaaattcccatcccggtccacatagccaatgggttgtggaccaaactgcgcctgtccctgctggtccgtggttacggtaccgcatatggagcccgttgtctggttcaccaggcaaaactctgctccctgcagtttttcatccggctggtccgaatcactttttataatacggagaattccatccgggatttcatctgtcatttctgttttttgcagtatccggctgtccgtaatagtaaagggaatatctaccgactgcagaaatccgtacggagttgttatctccctgaggatataatcaccttccgggatgtactccaatatatgaggttttaaatcccctggctgaaaacctggcgggataagcccttggtactcatcctccttcgtgtaccttccgtccagtcccgaaatccagaccgcctcaatatcctgatattgtccatcttctgagggttggtggagcacaagaggcatttccgatacatttcccctttcatccaccggataaatggcaagttttgcaccgtttacctccttaccgccggtgatatccgccttggagacctccagttcaagcggcttatcccccatcttaaaatattgtatctctttcaagtgccctttttcttctatattaataagtatggggtccgctgtggcatagccctcaggattttctgtctctgccagcacataatttcctacaggcagatactccaggcgcacggtcccttgctccgtataataataccgtccctgatatgtgccgggaatttcccggaaatcataatcatactttatgattggatgatttccgcctgcgtccgggaccacgcggcctgtggccgccacctcctgaccatccttatatgtagcggcccggaatgtgaatatccttcccgtttcatcgtacctgggaattccattttccagcaccggaaatcccttttcatccagtattggacggtataaggtcaggtacgcttcgctgtccccgtagattacatcaccatttcttgtgtcgtatttcagaatatcaatggatgtaaaatcatcctccatctcaaagctctgaacatcccctgtttccagtacgtcaatattcaccgcctctgactgaacatatccctgttcataaggacaaatggtttcctccagtacataatatccaactggaatgtggtcaatccaatggggttctgttgtcgttacaggttccccgtgttcatccatcttcatgtttccgttatcatcgtactggtatccgctaatccatgaggcatagacctggccttttttgtatatgccatcctgctccttaaggggggatccgtcactgtccagaccggcccggtacagggtcatgaccgctcctcttacctccttctgggtccgcacatccagcttcgcaaaggcagttttggtaaattcattctgcatgaaatatttctgtacctcgtctgtgtccctgagtataagccccatatgcctggcctggatatatccctgatcataggggacgccctgctcttcaagtatataggcgccaaagggcaggcgggcaatcgaatgtccggcgccggacgtttccggagttccgtaagagtccatgctgttgtctgttgtccaggactcatcctttgccgctacgtttttgcctgtataatagatgggcagtccattttcatcatccactgttgttttattctcataaatcgtctgtccattttcatccttccgtacctgtatggatttgaccagtatcttatttccctcatcatccactgtgtatgccagcatacgtccatagtcatcatagacatatgccatgccggtgacggaatccgcgaaacacagcgaattcccttttttatccagcaccagcagctctcccgtatccgggtcttccctggtatccacctgattcaaatcatagaaatacagatttaccggggcattatccacaatgacggtatcccacacattccacgaggccttatgtgttttcatggcgttacccggactgttttcctcaccaaccacacgtatttccttatgagtaccggtatttgtatccgtaatccccgttaccctgccgtccttgacagtagcgcttacgcccttatagacatgttcccccgttttttcaatttctatggcatggtacagggacaatcctgcgccggatacggaaatgtcaaagcggattcccctgcctgaaaaggtaccgtctggcagatacagcggttttacgccgggcatggcctttagcgccttttccgtcccctccactatatgttctgagtattcgtcaaatggcttagtcacatacccatcccactgcatggtttccggattgtaaacaatatctctcacatccccccgttcctccagcttttccttacggccgcttaccttataagccaaccggtccccggcgtcattgaccgtgacattttcctcaaaacctccgcttgtttccgccatgccctgtgcatcggtcttctgaaggatgttctggtttcccaccagggaatccccgtcctccactttatgaatttccatcctggaaggatagtcctccacctttatccggctgacagtccgggtccggactttattggtactgccggccactggaatggcatactggtatttcacagccgtatcctcttcccatccatccgtggttccgtccgtatttcttttttccctgtaaaacgatacgctgtccgcgtacacttcaaacgccaccggacggctctttacatacccttccggggcctggatctccaccagcacataggcgcctgctcccaacggcttatacgtctcaatgtatcccaccggcacctttttcacctgaccgtctataactatttccctgattgtggagtatgccctgaaaattcctgtctcattcccctcctggtcctcctgcctaatcagctggctttcatcatactgcgggatcccttccttatccagacgcacaggcaggtcgtccgtactcccattattcttacctactctcggatacagaatcctcttcccgtctgcatccgtcacgggatttcccctccagtccacagcctcgccgtacaacacatttccggaccctgcgaccgtgctcattccctttttctccacatcccttttagccgcatatatcttaaacaatgcgccgtcatggataatggaatcgcctgtctcggaatccagcttctcaatacgaagtctggaattataatactcgtcctcaaaatcctcctgggcaaaggccacgaaattaaaatccccgccagttccggagggaatcagagtctccacatttcccgtgtccggattgattctgtccaccgcgggaggcagcacggtccacggaaccagcatagaggcaaatttaccgtctatggctgtctgcatccctttcatcgctgccacctggtccctgacttccatctgtccgtctgctgtttcatatccgtcatagaccaccccgtccatgattccggcgtcttcgctctgggaggtatatccggcataatatccctttacggcattatttccgccatccatatattcttcttcatagggtgcttgggatgtcaggctgcggcccggccgcacatccttatccaggccgtatttatatatctcgaatcttccatcctgtccattggcctgtatgatatgggtctcctcattgaaacgtattttatatttgcggatcaggtcttccggcgtatccgtgctgtcataccggaaatagggactgcctgtctgataattgacatccgcttcccccgtgccctcatcccggccgatatccggcacaaacggaagggtgatctccctgggatagtccctggtaaaatgccggtttgccagctccctgtccacgtccgcgggaacctgctccacgataacgtatgtgccatacgcaagcatgatggaatgattgtaataatcatccttcccattcctggtgttgcattgcagtgtggtcacatcattgtcagcccctccgccagcgtcgctgtcccaggcaatggccagcctgtcatccagtccggtaaaaacagacagatagctcccggcctctttcacagcccgaagtagcgccttttcgtaggccgcatcgctgttaagtccaggttccgccgcaagaatttccattttataggtatctatatcatagtaatccacagcaaactgccgtatcgcctcctgcggctttttccctttttccacctgcactgccgcgtacatggcgtcaaagaattttgtgtaatcatagcttccatcttcttttgtttccaaaagccgctgtccgtttccgtccttaggaggcagaaagattttctggacatctcctttaaaatccgctgttcctatatcttctgaaatgatgctgccagcgctgtccacaaagatattttccagattactcttcagatatgccttgaatttaaactgactcagcagctttgcgccctgggaactgccgtctcccttaaataaacccagcagcacggtcagcgggtcgttgtggacagctccgtatgtatttacgccgtcataggatgactgggaaatatcttttgtgacctttacggactgcttgatgactctctgcaataccagcagcggaccagaaccagtaccggcttcctgcaccggctgattctgccccggataattcaaagcctggaatactacatagcttccttcatccaacggaggaaccgcagcaaaggcgcttaccccgactccagctatgtctgtcaggtactggctgtaaggcaattcctccccttcccagtcaatggatttctcttttgtcaccacccggaattccgtatataccggctctgtcctgtcactccagtccatggaattctccacatgaatcacatagctccccgtggccccatcataaacagcagaaaccggctccagcttatctgtttcatatgtttctgttctgtcttcatactcatagacacgctccaggagaggaatgggattcccctccctgtcaaggacaatatccccttctctgtaagtctcatacagcggctgatacacggtttcggccgcagcttctatattgctcccaaaaggaatggccgtgtttatttcccgtttttctcctactgacacaacggcgcttttcaggctgtattcacccttttgatactcaatccagtaaccaaccatcccggccagcccccctgacacctctgccgtttttcggacatacagtttacggttcacggagtcatagaccgcggggaaggcggcatcggccaatgaataatcatggcgcagcaaagcaaagaaactaccctccatctcatatatatcctccacagacccgcagtcaaagaagttatggaccgtgtaccaatccatgatttcctctgccgcctgtgcgttggtctggcccgaaagccggatttttgtccacggcgaagtgtctgaaaccggtctgtatccaatctgttccaacatgccattaatctgttctgacagataatgtggttcaatggcctgtccccatttactcatatcagccggtacagccgtaccgctgggatatggggctgtcctgaaacggtagggcagggtctccccatagggaatccgctcctccgtgccactgcccgtagcagtatccgaccggataatgggattaccgtcagtcccaatcttatactcacctccttttgccgtctgatagacagggcggccctggtcatctactttcatctgaagggaacttcccaaaaccgccctgtacgtttttgtctctgttcctgtttttatttcataaaactccgccccctggggatatccggtcagggtgatatcatatccattttcagttttgtagctctctacaataaaattattccaggagccgtctgcatccatggaattataatcggacaagccgcctgatatgcgggcctgtccggcctcatgtatcctgctgaccgcatcctgagtccggttgctttcctttaaggaaatgccgctgacagacaattcatatccctctgacctgctaagctccataacataatagctgcccataataaggggccgcccaatccactgttctccatttaaagacacatagtcgggataaacatctgtgccgaatccctggtccgatgaggtgatggacgaaccattataaagattttcaggtccggcggcattctccggtgatattatgtttccgtcatcatccagcctggaccctggtttttccgtgtatgccaggaaagaggcatttccctgtttatccgtggcggctacggctgtcaaatcattctggttataaacagtacctgatttgccatccgggtgaatgatatcctgggccgcaaacaggccatagacagcgccctccagtgtggcatccccctgggtcagtccgtaacttctgtccccgtccgcgcggtgcagctctaagtcccttttattgatgtgcagcctgccctctgtccgatgattccagaccttaaaggtgtagagtatagtatccggtttcccatagcccgatacatccatggatcccaggtcatcgtccataaacgacggcagggacacggttatggagtcgtcgtcatcctcttctcctgaaaacagggacctgataaaccgcactgcacggttttcttccccatccggttctccggtatctttctcagtgtcttccaggaaatattcaaattcaaccgcgccataggatggtgagactggctttctggcatattcatattcttcatatatttcactttgaacgccatcctctccatccctatcaccttgaacggctctgctctgattttctttatcagaattcctctcagcttcatccaggatatccgcggtatctgtggtgttgtcttttatgtcctgcatatccttatctgtgctgttttctgtgtcctcatctatattttcccttgcaatgccgtttttctgagtttccgtatcttctggtttcttttgggtttgatgtttgaaattatctgtgtgtgcttctgatgaaatgccggaaaatagaatggttctcccatgtcctgattttaatagatttggtggtggggacaccggcgatttggcctgaagattcccgtttttatccgcctcactttcctgactttcattgccgtcctcatcctgccccccgtttccgggtgtgccttcatcctccccttgtgttccatctccatcctcctgttcccccgcgctgccggaagcattttcctgttcctgagaaataccgccgtcaacggcttcctttaacggaacatctgccttcttcttttccttcttatctcccaataggctgaatatactgcgctgttcctcaagctccatctcctgaccatccggaaccggatatttgtaagaccttctttctctcattgccgccacatacgtgtatacaggctcaattgcctttcccacaaacgagctgggcctatatacagctgcacgggcatttcctcccgcctgggcggatgacagcaggacattttctatctccttgtcatcgctgtgctttccgtggagaatatatcctgtccgcgccgtcttttcctgtaaatgataactgtactccaattctatgaaccgttcatatgtctcatccctgtccgccagcatggcttccatagccgatgtgtcctgttcacggttatcctcatcatggttcggggcatggaaatcgcatgtggctgcgcacaattcctgttctgccctccactgcccgcgaagccggtcattttcctcatcacagctgcaatcctcatcctcctcgtggtcgcattcaatccattccggggcaggatggcccatgcagtatgttttgctgtaattataatatctggcatcgctgtgcctggcatatccatctgtatccgtggtcaggatgtcacagatataattgttttccggttccggcgacatgcagtttatatagacctgtccgctggtcccatccggttcgccttcctcatacccctgctcatttacctgggaaaaatcaaaatcttcccacacgttgaatacagttccctctagcggctgattcgtctcggcacaatatttctccaaatcgatgttataagtgctctcaaatgtttcagaatggcggtataactccaaattaccgctgcccggcatgaccgcatctgttccaactgaaaaggagacagatgccatggggcggctaaaatccagccatcccaactgcttctgaaagttttcggaagcggccggggtaaatatataagcgtaaaagcggttttcgattccctggatttgtgcagactcaattgttccctggggttcctggtttccattgtactgaaatgtcacacttctgccatccggcgccagttgatatgaccactgattatccggaaaggaccaggaagcactctgaagctgcggacagctgctgatatccaatgttagctcataatgtccgtctttcaggaccattttctggacagaaccagcccacgcaggcagtaaagaactgcccgtaccattatactcggcttccccttccaggatgtgggccttcatttcctcaaaataggccataaccatgggatccccattcattactgcctggaacttttccatggcctgcttctgcaatgcccagttatgttcatatccattcatgcatccccagtaatagacctggacgaccccatagcgcgccggaacataatagttatccgataccagccactcataggcaagcaccatgggcagataacgctcaaacggcccaatgacgggaaccggcttccccggctccacataatattgctcatatttcgccggacttccgtccggaagtttgtggccttcctgtatgcataatgccggcagggctcccgcgccttcccccacctggtaaatgttcatatcccggtgtgtccttccaaatgcattcaggttcttaccccggaacacctggcggtatgggttcaaattaattagatccccggctccgctggtggtccgtactgccgtacataccaatactgttgcaagaaataacgccatcacgcgtttcaatgtattccttatcctcattttttctcctccggtaaaaaaactttgcactacatgcctcctctgtcccggctgcgggatttcccatccattatccaggctccatcgtcattccgccaccaacgcccgttgccaacctgcatccgctgaccggcataaactgaccggcataaaccggctttactgccataattctctcgatgtttttcttttcgttatttttcttcctgttattcttcttcctgtatccctttgcccgccgctgcccttaagtttgtttctggcaattcatcccttcacctgcagaggtgggaaatttccgcttcttctgttaaaatgaatattccgggcgcacaaaataatttcaaagcgtgcaaaataatatgcttcaattttaagatacatataatctctctgattttttcaagaatattgatttacgaacgtgactgactactgataaacagcgctgactttaggaaactgagaaactaacagatatcataaaaacacacctctatatcctgaataacacacgaaaacacacaccaccacctttttcaattattcctgcgtgaaaaacggctgaaccagccaaatgaccataaaactgcaaataagaatcctgcacagagatttccatgcgattttatatagaataccatatatacccttaaaacgtcaatacccaactctttttctttctctcttgtttccatagccctctttccgttgaataaatgtaataataaattccgttattttttcaaatggaaattaactcccctgcctgcccgccccagctattgacaaagagccaaaaagccggcatccagggtgttctgtccgctacagacagtccccggataccggctctctacatttcagattccatatttacttatttatttccattgagatactcatcgattcctcttgcacctgcacggcctgcctccatggcaaggattacggttgcagcgcctgttacggcatcgccgcctgcgtatacgccttccttggtggtcttcccgttgctctcatctgcaatgatacatttccacttgttggtctcaaggccctctgtggtggaagatataagtgggtttggtgaggttccaagggacatgatgacagcgtccacgtcgatggtgtaatcagatccggcaacctctaccggtctgcggcggcctgatgcatccggctcgcctaattccatcttgcgcactaccattcccttaacccagccgttgtcgtcggtcagaatctctaccggattggtcagcaggttgaagatgattccctcttccttggcatgatgtacttcctccacacgggcaggcagctcggcttcacttcttctgtacactatatgcacctccgcacccagacgaagtgctgttctggcagcatccatggcaacgtttccgccgcctacaaccgccaccttcttgcccaggtaaattggcgtatcgtaatcatcgcggaaggccttcatcaggttgcttctggtcagatactcgttagcggagaatacgccgttggcgttctcgcccggaattcccataaacttgggaagtcctgcgccggaaccgatgaatacggccttatagccttcctcatccatcagctcgtctatggtcacggattttccgatgataacattggtctcaatcttaacgcccagcttccttacgttgtcgatttcaggccgtactacgccggacttgggaagacggaattcaggaattccgtatgtaagcacgccgcctggctcatgaagggcttcaaaaatggttacttcgtatcccatctttgcgaggtcgcccgcgcaggtaagtcctgcagggccggaaccgattacagctaccttgatgccgttggttttctccggcttagccggtacgaatccgttttccctggaccagtccgccacgaaacgctccagttttccgatggagataggctcgcctttgatgccgcggatacatttaccctcgcactggctctcctgcgggcatacacgtccgcatactgctggcagggcgctggattctgctatggtatttgccgcatcctcaaattttccttcttttacttctgcaatgaactttggaatgttgatggcaaccgggcatccctggatacatttggcattcttacagttaatgcagcgggaagcttcttcctgtgcctcttcctggttatatcccagacatacttccttgaaattcgttgccctttcctttgggtcctgttcccttacgggtatcttctttaatacgtccattattcctcacctccgcagtttccgcatccgccgtgatgggtagctccctcacgcagccgtaagatggccctgccctcttctgtcttgtacatctgctggcgcttcatagcctggtcaaaatctaccagatggccgtcaaactcaggtccgtccacacatgcgaacttcacttccccgccaacgcttacacggcaggcgccgcacattcctgtaccgtccaccatgattgggttcatgctgacgatggttggtattcccagctccttggtgagcctgcagacaaatttcatcataatcataggtccgatggcaacgcagacatcgtacttcttgccctggttctccaccaaatccttaacaacgtcggttaccatgcccttgcgtacataggaaccgtcatctgtggtaatataaaggtttcctgcaacggatctcatttcctcttccaaaatcagcatatccttggtcttggcgccttctactacatccacgtcaatgccgcgctctttcagccattttacctgtgggtaaacaggcgcgctgcccacgccgccggccacaaagagataacgtctcttcttcacctcctccaggtcatccttcacgaattcggaaggctgtcccagcggacctacgaaatctgcaaagctgtccccggccttcagtccggccatgcgctctgtggatgctcccacaatctggaatactatggttatcaggcccttctcacggtcatagtcacagatggttaacgggattctctctcctgcttcgtccatcttgacaataacaaattcgcctggttgacaggccctggctatacgcggtgcctccacgtccatcagatatatcttatctgccaggcattctgattttacaatcttatacatggttctcctcctagtaatatatactcgcgtcctcagctggtgttccgccgcgcgtccggacgtgacattcattgttattccacccgtatccggtagctcttctgccagttttcccatccgggcaacgatatgattccccttctgtccttcaattcccccttatatccatctgatgcgcagataccgtaccatggttccagacatacaaagggatgggtggcctccattgtccatattcccaaatacgggaaatcgctgcattccaacgtcacataggggcttccatccacaatcaggcttacgctgctgacctgtgcttcatcaaacatatatgtaagagctgtatcgaaaaatccttttgtcagcggcacccggccctctgacagctttaaatctccctgaagttcttccttctcatagccctttgcattaggcgcaagataatggagacaatccgtaaactgcccctccctgcaccctctccggttaaattcaaaggtgaaatcgtatatgctcttcccttccggcacctgaaaagcaggatgtccgcccatcataaacagcatctctcccgaatccgtattggtgaccttccacatgacctcgatggtcctgccttccagcctgtgtccaatctccacctcaaaatggaacggatacttctcatatgtctccggcgtgtccttcaaacggaaccagcattcgtccatatcacagagaaggggttcaaaatccatatcccttgcaaagccgtggggcgtcatgctgtattctttcccatcatggacatacgtcccctcataacattttcccacaaacggaaaaagcacaggtgcgtgtctgtcccacacagacggttcagcgcgccaaagcacttcgcggtccgccttcttgtcataaatcctggtaagttctgcaccgtggcgggcaacagtaactagaagcttatcattttcaagtgtaaataatgttccatcctgtttcactatatattcccccgttctcctgttttttaagaagcttgtgagaatttaccctcgcacaagctttatattaacattttctgcttcatgttacaaccggtttttaaatttttccaaaaattattttctttttttcagcgtgttgaacaatttttttattgctcctttctctggaacctccggaaggtataacagaggtcaaaataagtctgttcatcgccctcttccgccaaataccatccctcttccttttccaagtcaggaaaatatgcatccccgtcataggtataatcaatactggtcacaagggccgttgtacaataggggaggaactgccggtaaatgcttttccctcctatgatatagatatcactttcgtcgtaattctccagcgtcttaagcgcctcctccaggctgtggcagactaccgcgccctttaccttatactgcatatcatgggtcaggacaatatttacccggtttccaaagggctgccctcccggcagtccctccagggtcctgcgccccataagcaccaccttgccggctgtctccttaaggaacatctgccggtcggccggaatggtcaccagaggccttccgtccttgccaatggcccaatgcctgtccgctgtcacgcaaagattcaatgtcccctcaccttacccttctgtatactctgaattcaaacgaaataccctcatgctccttaccatcgctgaccgactccagtttccagttttcatcctgatccagattttcaaaatccgtgtccacatcaaaggcgcggtgaatgtaggtcacatatgccttactgcaatatggaagaaactccctgtatatcatgcctccgccgatgatgaacacatcctcctcacggcagtcccttaatgcctccagcacatcctccacactatggtacacccggacgccctcaggggcatacgcctcatctctggaaaggaccatattcacacggttcttcaggggctttccccccggaaagctctccagtgtcctgcgtcccatgaccacggtccttcccctggtcgtctccctgaaatacttcatatcctccgggagatgcgcgaggagaccgccgtccttaccaattccccatttttcatccactgcaacaatcagattcatatatgagtacctcccattttcttctaatgtctgttcatccctgccccgttcaccggtcttgacagattatatcatgaaaccctttgaaagaaaaggtgtcctctgttataatggttccatatttaaaatggaggacaatgaacatgagctacgcagaccagatattcatacaaaactgcaacgatatattagagcacggcgtctgggatacagactatgacgtgcgtcccgtatgggaggacggcaccccggcccacaccatcaagcgcttcggcatcgtgaaccgctacgatcttaccagggaatttcccgtcatcaccctgcggcgcactgcctttaagtcggcggtggatgagcttctgtggatatggcagaagaaatccaacaacatccatgacctgaacagccacatctgggattcatgggcagatgaggacggcagcataggcaaagcctacggctaccagctgggtgtaaagcatcattataaggaaggggattttgaccaggtagaccgcatcctgtatgatctgaagcacaatcccttaagccgccgaatcatgtccaacatctacaaccaccatgatttatgcgagatgaacctctatccctgtgcctacagcatgacctttaatgtctccggaaaaaccctgaacggcatcttaaaccagcgctcccaggacatgctgacagccaacagctggaatgtatgccagtacgctgtcctgctccacatgctggcacaggtaagcggtctgaaacccggcgaactggtccatgtcattgcagacgcccatatctacgaccggcatataccgatggtaaaggagctgctgaagcgggagccttacccaggtccaaccctggccatggatacttccatccaggatttctaccagttcaccactggcagcttccggctggaaaattatcagtatcacaccttcggcgagaagattcctgtggctatataaacaggctgtaaacaaaagacggatggccaattccagcggtccatccgtctttctttatttccgtctgccttcccccggcgcatctgacgccgtatgttcctaaaacagcccctcattcttctgctccagcaccttgattccatggtagaacatttcattataaggcgtaggcactcccagctcacggcccatgcggatgatggtgcctccgaacatctccacctccgtcttgcggcccgcctcaatgtcctggagggtggacggcttattttcaggcggcacatccctaagaatgctggcctgtttttccatatccttttctgaaaggctgattcccttctttcgggcaatggctataacctcccgcatcagttcctcacggatgaaattggcatcggcgcttacgctccaggccccgaagggaatgcccaggacagcggcgctctggttctcactgacattgcacatgtatttataccagatggcccgttccatgtcctccgggacaacggtacgtatgcccgcccgttcaaacagttccttcacggcctgtaccctgggggacattgtctcattgtgcttttctcccatttcaatccgggcagcctttggattaaaggaggcgcagccgtccttcatgaccacgcttacctttgccagggaatacagcagattatcccagccaaatacctctgccaccttatcctctgcctccaccccgtttagcggagccataataagggtatccggcccaatctggtttctcatgtcctccagagcctggggcagcgccggaaacttggtgatgataatagctaaatccggataattctgaccgcagttttcctccggtgatacaatattgaaatggtggcggaccccattgactataactccctcccgctccaggcgctcgcggcggcttcctcccgcaatcacgcgcaaatcactccccagcaaatggcccagatgactggccaggaaacagccgatggctcccagtccaatgagggatacggtccttatttctcttttctgtttcatcctgattccttctttcatacgttaatactcatctgaagcgcaagggaataaataatgcgctcctttacatgtttcccagtcagctgtgtcaacgcgcgctcataatagtccagctggaccctgtagcgctctgccagcatctttgctccctgcttcggatctccttccggcacatggtctgtcttataatcaatcaggaccagtccgtcctcctcctccagataggcatcgatgattccctgtatgagtaccagctcatctgagtcacccagtcccatttccctggcaggtatacctatgataaactgctgctccttatggatacgtccctctgactgtgccttcgccatacgctttcccaagggactggacaggaaattccaaatgaccttgggattgatgaagtcatgggcctcctggtccaggaacccgccctccagaagcttatccaccaccggctttacctctgccaggccgtgtatctcatgaaaatggatgtgctccaggactgcgtggtatgcggttccgcgcagggctgcccggtttggaccggccgagactgtttttttctgttctccggattccccggggccggagcctgtcatatcccggctcccggtcagcgcctttaactcaccaagggctattccctccagattaccactgtccgttccaatggcatcctctgtccgtcctatctggctctgctttttgagttcggatacagacaccatggcgtacagtccgatatccgattcatacgggtactcatattccagtacttccctgagacgtgttccgaatgcagcatcgtacactctcttcccatccaggttcagaagatcttcctttttcatcttccgtatgatttgccgggtgatttcctcgccaatcaggtcttttacctgaatctggcgcatttccatatgggaagccgggattgcgggctgcgccataaggagccagtccagacaggagttggccgaagccagtatggtatagggcagctggccctgggacagggggatatccttccattttcccagcttattctccagtgacttatccgcggctgtcataatcagcttttcctttgccctggtcatggccacatagagcaccctgagctcctcccccattgtttccagctccgtccggcgcttaagtgcctgctttttaagagttggcgccttgacccgcagctccaaatccaggaaatccgccgccgcccctaaatccgcatccagaagaatctggccgtacgcatcctgcttgttaaaccgcttgcccagacctgccagaaataccacaggaaattccagacccttgctcttgtgaatactcatgatgcgcaccgtgttgtcctgctcacctgccacactggcctctccaaagtccgtatcaaatttcttcagtttttcaatgtaccttacaaaatgaaacagccccttgtagctggtggattcataggcagcagccttttccaccagcatgtccaggttggcccgtctcgtctccccggccggcatggcggatacgtaatcgtaatatccgctctccctgtatacccggtacagcagctcatggatgggcagatgtctcgcctccccccgcagccgttccataaggaccgacagccttcgggatttaaacgatatagagtgggcagtctttacaggtatgccggataagcccactgtgatccatccttcctccagccagagcttccacgccccgtataccccccggtcctggccctttttggaattccgcttgtagacggccatcatccaggccatctcctcatcgtccattcccacaatgggcgagcgcatgactgcggccagcggaatatcctgcatgggattatcaacaacagacagaaggctgagaatcgtctccacttcaaccgtattgaagtatccggtcctggtctgggcaaacgccgggatgccttcattcatcagcacatttacaaacacctctgaccatccgctcatgcttctgagaaggataaccatgtcgccgtaacgtgccctgtggtaacctcccctggatttatcccacaccaaaatcccctggtcctcgcttaccagctggcgtatccttccggcaatcagccgggcttccagctcctttgccgtataatcaagggaatcttcatccagctgtctcagtgtgtccgcgcccgtatccacaagaagaagctccgtaggcgttccggcttttaaggaaaccggtgctgcttcccggctgccggactttcccgcatccgcctccgggtccaaaaccgttttcccgctcacctcctcaaatttcgcgccgggataaagggctgtctcaggcgtataggtgattcctcccaggttctttgtcatgatttgataaaacacatcattgacactggtcagcacagactccctgctccggaagttctgctgcagttcaatcatctggcgcggtcccctttccctggaatatgtttcgtatttatccatgaacagctccggcctggccagacggaacctgtatatactctgcttcacatcccccaccatgaacacgttgggatggccggaccgttccctggaaatgccggtaatcaatgcttcctggacatagttgctgtcctgatattcgtccaccaaaatttcttcatactgccggctcagctcgtctgccacctgagacggacggcggaaaaccgtctcctccccgtcccctgtttcctcccgttcatacagaacctccagcgccagatgctccaaatcattaaaatccagtacgttccgctccctcttggcatccctgtacgcctggtcgaacatacctgtaagccttaagagttcccgtatgaccgttctggtccctctcatgctttccaccacttcctccgggctctgctggccgtagagttccctgcattttgccacggccttcttgacccggtccctgcatgcgcttacaaatgccttcttatcaccgtcaatatccttgctccgtatggatgccagacggccgaagctcatattctgaaggctgttatacagggcttcaaagcttcctgtggccgcggcccttcctatggcctctattttactcctgtcgcttatgagcatgggctcatatgccagggggccgttttcctccaggcacacctgaagtgcttcccccaactgcccggaaagctcctccatctgtctggccacatcctccatcagaaaaaccatccaggggctttcctccatttccaggatgctttcctcctccagctccttctgacaggatgccagccattcccccggccatggatggctctgggaaaactgccacgcctggagaatcacatcctcaattccccggtctgattttccgcggccgaaatgctccacgaatctggcaaattccgcatccgcctcatcgtagcagttttccagcatttcacccatacagtcccccctcaaaagggacagctccccctcatcccccatgcggaaggccggatctatgtccaggctgttataatggctgcggatgatattcaggcagaagctgtcaatggtggtaatctgagcctggggaatcagggcggcctggagccacagatgctcgtcctcaggacgctccttcagcttctgctccaccgcggcgcctatcctctcccgcatctctgccgcggccgcattggtaaacgtcattaccagcagctggtcaatatccagtggacggtctccttcgcttatcatctggatgatacgttccaccagcacggccgtcttgccgctgcccgctgccgcggacaccagtaggttccggttcctgctgtctattacctcttgctgtttactggtccaattcactgccatctgtttcctcgtctccttcagcttccaattccgcccagatttcctcaggcttaagccccttgagcttgcggtatccatagcctgctgtcttggtgtcaaaaccgcacacagcatggtagggacagtagtcgcaggccgtcctgtttccctgtttgtaaggctttaagtccacatttcccatcaggatatcctgcccggcctccctgagcttccggttcacgaaccggcgcaggtcctggaagcgtctggtgctggccacggacgagcggctttcctggacataaccgtccttgattgctacgggtatcacatcggattccttctcaatctccctgtccagatgatggataatatccagttcactgtttaccagcccgttcatcctgagctgctttaatatctgtttctcgatatccttttcatccatgccttcctgcttatccgctatcgggtcacctatgtggtagtagaagatgccggcaggcaccacctccttgtccgggtgtctcctctcctccatctccaccgccgcgtccatataaaccaccagctggagctgcaatccataaaacagggcggccaggtcaaaggatgtggttcctgacttataatcaatgatcttcacatagacatgatcctcgtccctgcacaggtccatgcggtcaatgcgcccccgaagctgcagctcctcatcctctgacaggccgatgcgcatggccttcaggttatcaatggctgaaaaggacacctcgaaccccaccggctcaaaatcgccctttttcacctgctctgccagagcccatatggtgcggtccgtaatccgctccacccttcctgccaggtacgcgttgcgggctgagctggacatgattgtgttgccgtattcctccgtcacctgggtcacgcattcctttacaaggctctttctcccctcttcggtcaaatcccgccaatcctgccccctgtccttcatacaggcaaagcacctgtcgatggactggtggaacaggttgcccatgtccaccgcttccagctcgtactcctgcctctccatcaattccagtccataccgcaggaaatgggcgtaggcacaggaggcaaactgttccagacgggtcacgctgccctgtagttccctgccgtaaagggccctggcagccgcccggccgattcccctttcctcataggaatagaaagcagcgtccaccagctgcctcaccttatcccggtgctccgccgatgtataaaaatgctggaaaagctgcataaaggccgcttcctcccgctccctgtcatcctcacccggctcctgcattccccggagtccctttataagcagctccctggcatccctcccggtccgcaccggccactccacggaatgctcgtccaggatttccattcccggaaacagctttcccacttcgcccatgagattggagggtctctggctcttgccgtccgatgtaagtccggcataggtgatcaccagctgtccggagggctttgacatcataagatacaggtaaaatttctgaatacagccatcctctttcactgtgggagccagctctatatccatttttctgagagccgccctgtcacggtccgataaaaggcttgctccgctctttctctgaggaaccgtaccctcgttcacccccacaaaaaacagtaccttcactgcctccagacggcttcgggtgatatcccccaccatgacctggtcaaccgtggccggaatcactcccacctggatttcctggaaaccggcgtccagaatctggatatagttcttcatgtccgccttttccgcccccagcagtccttccagccgttcaaacagttccagaacacggtcatagacttggccgtattccctagccaggttctcatcccccggctctcctcgctccagaaagaaatccctgtattcctccagcttttccctcagcctcatatgctctaaaaattggcgcagggctgccgtgacagaggcaatggtggcttcctctgccttaaaagcctcccgcagcggccgcagcggctccagaatccacatacggtatccgttcagctccttcatgttcagcttttctccgcctctgtactgccgttcccaacaggaatcccagcgcttccacccccggatgcccagagcccgcacataattttccagccggtccgtcatctgctccacatgttccctggaaccgtcaaatatgttctcatcatctgcctgtgcggtgttcccgtccgcttctgactctatccgcttcccatccttctcatacaccagacctgtcttcagataccggaacacgctctcgtaggagaaatccttcaccatctccagcgctgcccgtatcagctccaccatgggattttccagaatactcttcttatcatccaggaaataaggaatcccggcctcatcgaactggtgggccagctcccgtccataggatggaaggtccccggtaataacggcagcatcccggtaacgcatcccttcctcctttatcatctgctcaatcctgctgcacacataggctgcctcccctgccgggttgcgtcccttgtacacctggatgcgctccacattcccctcccaggttctgccagaataccggtacaggttctgttccagaaaatccagctccgggctctcatcataccgccaggccggacgccggttacagattatgtcctccttcttcggtattccatgccgctttgccatggaggccacacggcacaccgtatggcggctcatataaaagagatgctggatactgctctccttgtaggcgttttccctggaatcaatggtaaccgtgcacaccacatccctggcgtgcatcaggaacagctccaccagtctgtactgaaccggagtaaagccagtgtatccgtccagaagaatgatactgtccttaaggggctcccaccttggaagctccctgcacagaatgtccagaatctcctctgccgtgatgtagtggctctctatatactccctgaaaccgctgtaaatcacctccagatcctccagcttctgggccagaagaggggcgtccgtctccccccgcacctctctcagcatgtccggcgtgataccgtactgggacagctccgaaatctgggacttaagctggctgatgaagccggactgctccagatggcccttatagagggacagctttcctctctttaatcctgccaccttgcgcagcaccatggattttcccatatcatccagaacaaccgggattctgactcccaggtcctcgaatacccggtaagccagacgcttaaagctgaggatgtctatattcataatcccgtgtctggggtggagccggatgatttccttctgtgtctgcatggtaaactgctccggcaccaccaccaggtacttttgttccggatgctccatggactcccttatgaccctgtcatagagcatcctggtctttcccgagcctgcccctcccaatatgaactgtaacgccacgttttctctctccttccggcaggcgggacaacgaaaacttctcatattttcccgctctgccacataagctttaacaaactatcttagaggtcctgactatgagctctaaaaccaaaattgtggtactaaggatgaaggaaatcatctacaccgcaatcttcgtaggccttgccatccttttaattaccctctgtttcatcatgttccggcctgggaaggacaacgtttccgtttccgctgaacctgcaggctacctgccgggcgtatacagcgcggccctgacccttggcagcgaagatgtgaatgtaaaggtaactgtggatgccaaccgcatcacctccattgacctggttccattaagcgaagccgtcacaaccatgtacccgctgatgcagcccaccctgaatgacctggccggccagattataagcaatcagtccacggagaaccttacatatcccagcacctcccgctatacctccacggccctgttaaatgccatcaatacggcgctggacaaagcaaaagtggattaataaaagcgggcggatgtatcccaaagcactccggcacgtcttaaagctcctgccccatatcatgaaggcgggggcttttctgacgtaccaaaatgtaaaaaaacggcagattgctctaccgtcttatcctgcaaaagaatatgttttatcgtaccatgtttcccgacctgtgtcaagttagcaaacacacgtttagtccctttcccagccgtgcagggacgtttaagcccctggacccagatagatataggggtacatggttccgtcctttatgcgcacgcccataagcctgggagattctttggcaaaaacagcttcctcttcctgccctatgccaggcagacaggcttccatacataaccgtcagttaagaaaatcctcccgctgtttaacggctcctccattgcgcagcgcctttctatggtctatactaactatatccggccggacaattatgttatacagaggagattattatatggaaattaaattaggcccgcgcattgcatcactgcgcaaatccaaatctatgacgcaggaacagttagcccttgccctgggcgtgtcgcctcctgctgtcagcaaatgggagacaggtgcctcctgtccggacattgctcttttatgccctctggcccgcgccctgggaaccaatgtggataccctgctgcagttcgaggaaacccttacagaagaacagattgatgcccggctgaatgaaatcgttgagacagcccggaatcaagggtatgaagccgcggacggcatggtacaatcgcttctgcatacctatccctcaagcatccccttaaaatccagggcagttaccttgtttgacctgttcgcgatgctgtttcccgcccagccccagcagattaaggatggctggattaagcagaagaaacagcttctggaggacgtgcgtgcaagcggtgccgcggccttctggcaggcagcggtatcccacctggcttccatcaccatagtggaaggcgagctggagaaggcagagagccttttaaaggaactgccccagcacagcactgactccacctctatctgggcaatgctgtacctgaaaaaaggagaagcaccccaggccttggaggtcatacagaaacgcctgtatgtgctgacacgccaggtacagagcttcctgactcagatgatgaacccggaaatgacccctgacaccgcaaggacactggaactgtgcgtcatttaccgccagctggaagaactgctgggcgtgggaaatggcatgagcccgggcttctttgcccaggcttaccagcgggccggaaaagaccaacaggcattggacagcatgattcagtttgtggacgccatcaccggcacggtccagaagcctaatcccatcctgttctctcctgcggtaaagatagatggggaacatcctgccgccacaaaggaaatgcgtgaactgctccttaagggtctgctggaggatgagtactataaacagtttctgaatgatgaacggttccaggctgcagtggataagctcaggggcagcatccaagaagagacggcctgagcatccgatatagcaaaaggacagccgcgcggtaaaaataccctgcgggccgtccttttttacatcttttacctatttgcattaaaataagaaactttcttactgtgtcaattccatcctggtgcccctcctgctgcgtcacaatccctctgagcaggattgtcttccaaagactcaccatggatttaatgaaacaaatcagcagcggattcccgtttgcctcggctatgcagataagggagcggcggtccgcgtcattcccgacaaatccccatcctctcaccaaagatgtcttatcaggaattcctattatctttcctttcggaatttcttacttttaaacacatacacatgggcagccaatgtggctccgaacacaaccagcaaaatggtttccaccccatccggaaaccggttaaatcccactccgaagctgcaggcagcgtccacaaggaagatccatttctccatctggaacaccttcttcaggtcgaagtcctcctttttggtggagcaatacatccatcttccagcccttatgcctttactgtacttgtatggttctgctccacaaacctgcggatgttggaagcattggcaaacttttgtacgatgccgtcgctgacaatcaccagggtaggcgcctgcatgatgccgaatttttctgccaggtcaggacgctcctccgcgtcgataatctggtaatcctgtcccttcaggaactccttggccgatacacagttggggcaggttttggtggtaaagagatacaggcgggctgaggcgcctcccttttccttcccctggtgggaaacctctgttctggcactgttggcccgttccctggtatctgccacgattctggacacgccatgctttaactgggatcggcctatgttgtagttggtacggttcttgtactcctgggtcttgccttcgttccagttctgaaccggacggtagtagccggtaatacggctgtagacctctgccttctccccgcagataggacaggtgaaatgctccccaatcaggtatccgtggcacttgcagatggaatatgtaggcgacagcgtatagtaaggcagcttatagttctcagccaccgtgcgcaccaggttggccgcggccttccagtcaggcatcttctcacccaggaacgcgtggaacacggttcccgatgtgtacagggtctgaagctcatcctggatgtccagagcgtcaaatacatcctccgtataatccacgggaagatgggagctgttggtgtaatacggcgtatccccctctgccccggcagtgataatgtcgggatagcgctgcttgtcatgcttggccagacggtaggtggtggactcagccggcgtagcctccaggttgtaaaggtcgccgtacagctcctggtaatccgacagccgttccctcatatggttcagcacgttcttggtgaactcctggcattccctgtgggtcaagtcctttccgacccatctggcattaaggcctgcctcgttcatgcctatgaggccgatggtggaaaaatgattctcaaaggtacccagatatctcttggtgtaaggatacaggccctggttcaaaagctttgttatgacctggcgcttggtctttaaggaacgggcagacacatccatcatgtgatccagctttgcatagaagtcagcctcgtccttggcctggtaagcgattctcggcatgttgatggtcacgacgcccacggaaccggtgctctcgccggagccgaagaatccgcctgtcttcttgcgcagctctctgaggtccagacggagacggcagcacatgctgcggacatcgctgggctgcatatcgctgttgatatagttggagaagtagggcgttccgtacttggatgtcatctcaaacaaaagccggttgttctctgtatctgaccagtcaaactcattggtaatggaatacgtggggatggggtactggaatccccgtccattggcatcgccttcaatcatggtctcgatgaacgccttgttaatcatgtccatttccttcttgcagtctttatacttgaagtccatctccctgccgcctacaatggcattcatctctgccatgtcatttggaacagtccagtccagggtgatatttgagaagggcgcctgggtgccccagcggctgggggtgttcactccgtagataaaggactcaatgcacttttttacctccgggtaggttaaattatctgccttcacaaagggagcaaggtatgtatcaaaggaagaaaatgcctgggctccggcccattcattctgcatgattcccaggaagttaaccatctggttacagagtacggacaggtgctttgccggcgaggaggtgatctttcccgtgatgcctcccaggccctccataaggagctgctttaaggaccagcccgcacagtatcctgtgagcatggacaaatcgtggatgtggatgtccgcgttgcggtgtgcctccgctatctcctggtcgtaaatctcgctgagccaatagttggctgtcacggcgcctgagttgctgagaatcagccctcccacggaataggtaaccgtggaattctccttcacgcgccagtcctccaccttcacatagctgttcaccacatccttgtaatccagaatcgtgctgttcatgttccgtatcttttcccgctgcttcctatataaaatgtaggccttcgccacatctgtatatccggtctgttcaagaacgtgctccacgctgtcctggatttcttccacagaaatctttccatccttcatcttattctgaaaatccgcagtcaccctcaaggataataactccagaatctcattgttgtaatctttggaggttgccctgaatgccttcttgatggcctctgttatcttattcagactaaactcggcaacttccccatcccttttaactacctgaatcatgccacttgctcctttcaacccacgtacactttattcaactctttttccgcgtctcttaaacccggaatgacacagctgtctcacggctgtgaaaacgcagggcccgccccatatggagcgagctacgcactcattatagcagatggaaatgcaaaacacaatatctatgaataacattttatattatcccagatattgtgtcttattaactgtacttataaccacttttcccagatccccgcaaagtcgcatacctgcgtggttttccggacagggggcattttaattaaattccactcaattcagtcggaataaagctttccaaaaagctctgccggcacatatgcctttaccgcgattccgtcctcctggtattcctcctccagaagctggccatacttacggatggtctgaatgcgtccggcccggctgtatgggaataccttttccagcagaatccgtctgctgcgtataatggcctggagcaccttctgcagctcttccatcccctctccggtcctggctgaaatccgcacctggtagtccgataagaaatccctgggtatctgcatgacactgctgtcccccatggcctccagctcacggaaccggtccaccttgttgaacacagtgactatggtcttatccacaatctccagttccttcagcgtctccttcaccacatgcatctgcatgtccatctggggattggagcaatccaccacatgcaggacgatatcgctgtagcgcgcctcctccaatgtactcttaaaggcctcaatcagatgatggggaagcttgcggataaatcctacggtgtctgtaagcagtatctgctgtccatcctccagggtatagcttctggtcgtggggtccagcgtggcgaaaagcttatcctccgccaggattcccgctccggtcagacggttgagcagggtggactttcccgcattggtatagcccacaatcgctgcggaaagagcaaaattcttctctctctgctgcctggtcacctcccggtggcgcttcacgtccgccagctcttccttaagctgcccgattcgctggtggataagcctgcggtctgtttccagttttttctcgccgggccctctggtgcctatgccgcctcccagacgggacagggaattacgcatgcccaccagacgcacggctctgtattttaactgggccagctccacctgaatcttaccctcccttgtactggcccgggaagcaaagatatccagtatgaccatggtcctgtccataaccttggtgtccagggcatcttccaggttcctgagctgggccggtgacaactcatcgtcgcagatgacgcctgtggcccgggtatcccataacagctctctcacctcgtctatctttcccttccccaggtaagtacccggatggaccttttcccggttctggatgattctggccacagtcacggctccggccgtggaggccagctcctccagctcgtccagggaagcaggcgtgtcctcctcctcagcagtgctcaccgccaccagtattaccttttcctgaagttcactcaaatcaattaattccgccattcctacctcgtcttcaaaaatgcaatctcatgctccgcgtcttcatcggaaccaaactccttcacaaagtcctcaaacattgccagggctttatcatactgctgtaagtgttcgcaggcaacggcccggttatacgaaagctccttcaaaagttccctggaaccgtccgcctgcgccactcctgccggcgcgctttccccgtttaccgtttctccgctttgcgttgtcccggcgtccccatcctttgtttcttttttgtcagtctctttgcctgttttccggtctttctcctggagagccgaagcctgggcagcagccgctacctggtaccctttgtcaaatgaatcataagcactctggtaatcctgcgcagccatctggcatagacccatttgattatagatttcaccatgttccatcccatccttaagtgcattttcataaagcgccatggccttatcgtattccttcgcatccacgcaggcgcttccggcggccagaagggcctcctgcctgccgggcaccggcttgtccttcttatccagcgcttccgcctcctgatagcgcttaatggcattatccgtatctcccagccgggcatggcagctgctctgcctgtacatatactccggtgtgtccggcctcatctccaggagaagatcataggtgtggatagccgcattataatcctttaacaggaactctgcgtccgccctgtataagagcacatcccggttaaactcctctgctcccttgccggacttttcaagggccgtatcaaaggatccgatggcacctgcatagtcccctgcatccagcttctctatgccctctgcgcggaactggcgtttcctggaggtggtcatgtgtgccaccagccggaatgttcccactgcaatcagccccacgagaaagatgcagattgcccatgcaatgactgccctgataatccggtttttcctgcggcgcctgcgggctgcgttagagaccggccttttgcctccgtatccagggtgctgcccctttggctggggctttcgcccgctgctgtatgacctctgtccacgacttcccatatattctacctaccttgcatccgtacttccaaaaccgccgttgcgcacatcactgcattcatcgtccacggtgatgccgtagggaatgaaaattccctgggcgaatcccacgccctgtcccaattccacggtctttccctccctggaatcattggttaccttaatgaacatatgaccttcattatctgaataaaaatagtcgctgtcaatgattcccaccgtgttgttcagctggagcctgaatttaaatcccaggctgctgcggggaaaaatctgaagcacccagcccgcgtcaatctctgccctgatgccggtggggaccttcatgttctcaccaggagccagggtaagggggaccggggtaaagaaatcatatccggcggagccggacgtggccctggccggaagccggattccttcataaatatgtattatctcttcctccggcgtatccgggaaggtatcggcccaatctgccttaaactgttcaaaactaactttatgaaatttcgcgattctctgcataattttctcctgtctctttcatacttttacaagtctatcataatcccatggaattttctactttattttttattccttctttattagaaactttgatatattcattttcattacaatcatataggaacttcacttttagaagtattacaccgaacagagggacatctatgaaaatttcctacaattcccagccacagagaaatctgattggcaatcagatttttaagctgcgcaagagcaaaaaactatcccagaaggaaatggctgcccagctccaggtgcagggctattatttcagcgaactgaccatcctcagaattgagaaaggcaaacgccttgtgacggacattgagctcaagatactttgcgactatttccatatcacccccaacgacctgctgggatacggagatgacggccgtctggtatagcaatgcactgtacgtgtatttatgcattatatagtgaattcccccactactacatttcagcctaatgttttttttacctctgggatacaataatacaaaagattttgtagataatagacaatggtggtgaaaacatgatgagttatgaactggagcgcatagaagaactttgcagagagcgtgggtggagtcattaccgcctggcactggagatggatacttcccctaacaatataggcaacctgttcagacgtaccacggttcccagtataccgaccatacggcgtatctgcgaagtcatggggataaccatggcccagttctacagcaccgatggcgtacaggttaccctgaacgaacagcagaggcggattatggacctgtatgataaattggaccctttggataaatcaaaggcagaagcctacatggaaggactgtcggccaaggcaaaggatatatagcggtaaaacggcagtcaaaagcagccccggaccggcgtatgggaattcccccatgccggctgggctgcttttttcgtgttttatatgtttttttgcactttagcttcgtttttctgttttccttacctgtctttctcactggtaaaatcatggtaatatatccataaatcggcaaataatcaggataaaacacatcatggggcacggtccaaaaacatcctcagccatcccgccgcgtcaaggaaggaccttcatcagagccagggccatcagcagaacgccgctaatccatgacaggtcgcaccggaaacgtgaagccaccttgcgccccagccacaggccgccgtacatcatacaaactcccacggcaaaggacagagccagggttgcggccacgggaatatccaacagagccgccatggttccggccaccagactgtcaatggacatggccagagccaggaatacggtctccttccacccaagggactgggagccgtccacgtccgctgccatggggtctccgtaaatatttactataaccttcagtcctgacagggaaaagctgagattacggcggatacagcaatggcggttgatataggccttgatgctgtaatccaggaacttgatgaatcccagcagaaacaggcttacaaagcagatgatcctggtcacatcccccggaaggacagaacttataacgctgcccagccccagagccaggcccaggcatccgctgcatataccatttaacaaaactacctttccccagcccacatggacccggttggctccatatgcgaggctggccacacaggtatctgtacagagagcaaatactaaaatcagacttccaagcatgatatcaactttttctttttattttagtatattcctcatgtactgctttgggaatctcctccgtgtacaaacacggggtatcatacattcagacttcagacttcctctgctgtcacggcagcctcctctgacgcttcccctgacgctccctccaatccttttgcagcctcagccgtcagctcctccagcttaagctgcaactcctcttccacctctgccttgatttccgcttcctgctcaggacccaggtccggcaaatcctggaccgatcccacgccgaacctgcgcagaaattcctctgtggtggcaaaaagggccggccggcccggcgcgtccagacggcccgcctcgtagaccagattatattccaccaaacggtttaccgcatggtcagacttgacgccgcgtatcttctcaatctccatcttggttacaggctgcttataagcaatgatggacagggtctccagcaccacttccgtcaacacctgcttcttaggggcggacgccacccgtatcaggttttcatagtaggctgccttggtacacatctggtagctgtcctccagctgggttatctccatgccgcttctggctgaccggtaccgttttatcaggcgttccaccgccttcctggccacttcctccggctggccgatggctgcggccagctgacgaagctccaccgaccttcccatggtaaagagcacagcctctatgactgcctcctgctctttttcatcctctgtggggggaaaggcaagctccatcttcccttccttctcctttgcttctcttttctcacttccggccagctttccggttcgggtttcaaccacaccggccccggcctccagtgcctctattctgtcttgacctctcatacgcttccatccatcatccttcaaaatcacccagctgggccaaatccagctcctcttcctcgccttcctgctccagcgtctctatgtccatatccccaaaggtctcctcctggctcagatgaatctttcctatcttcatcagctccagcactgccaggaaggtgaccaccacctccagcttgtccggctggccctccatgagttccctgaagctgaatctgcgcttcctcctggcgtagctcagtacgttgcctatcttctgttccaggcttacgggttccctgtgtatggttccgaaattgcttcggatagggtctatcttatcctccttgcgcttcattacctgctcaaagattctctgaagcttagccagcgtaagcccgtccaaaagcttgtccaggtccaccggaggctcgtatttcgccacctcaggcggcagggtggatggcttgtagagatgcttcagggccccatcctcccggtcagccagttcatctgccatcagcctgtatttcttatattccagcaggcgcataaccagctctgccctgggatctatttcctctccttcctcatccacttccttgggaaggagcatcttggccttgatgtcaagcagagtggccgccatcaccaggaactcgctgacaatgtttaagtcctctcgctccatatggcgcacataatccagatactgggccgtgatttccacaataggaatatcgtatatgtttatcttatttttctcaatgagatggagcagcaggtccagaggaccttcaaaatgctccagcttataggatatggtttccattctttcacctgtcagtggtattcattttatggtattatgcctgtcacgcccttctcaaacggattaacaccagctggggcctgttgttcaggcggatgttgatggagtgggttcccagtccccggctgacaatcatccgcttcccgttccgttcaaaatccccggcgcaccagggtaaaaagaactggtactggggcgtcatgactccccccagccccggtatgcggatagtgcctccgtgaaaatgcccggccagggtcaaatccgctccccagcggacataggaatcaaaatacaggggggaatgggccagaagtatggtaaagggctcctctttgcagacagaaggtcctttgcccagtttccgttccatatagccctcaggcatgagaggcgccttctggtacagggccttccggtagaaacagggcgacagatccagaccggcaatcctcaggtcccttcccaggaaggcgaaactgtcctccagataatgaacgcccatggcagtcatggcatccctgtactcctcgtaaaggtccccgtataagctgcgctcccacaccatgcggttctcatggtttccgttgccgcagtaaaccggatagctggccgccagctgacggaacagctttagcgggacctttatgtcccgctttcccttgcagaccatcatgtctccgccggataataccgcgtccggatgcagacggtgaatcgccgccaccaattccccgttgtcccggccgaactcgttgttgtgaaggtcggacaggaataccaggttcctgtccttttccagtttaggggaaatgatttctgtcacttccactgaaaaatgttttttttcgtactcagaccgcagcacacaggcagcgcctgccgccgcggccaaggaaacagcttctttccacatatcgttcattcctttatcagatgacagcttctttcatagggctgctacggctgttgcaatgaaagccttccggtctcaaagaggccgatgacatctgtaagactgtcacagcaggcagtgagcagcttgcggatttcttcatccggctggtcctggtcaggaatcatcacaggattaaaaccgcctgccgcggccgctttgattccgttaaagctgtcttccaggacaacgcatgcctccggctccacccccagccgccgggctgccagcaggaagatggccgggtttggctttgcttcctttaccatgtccccgtatatgtaatcgtcgaaatagttttccaccccggctcccctgacattgccctgggtccagctttcactgctggccgtggccacggccgtcttaatgttgtggcccttcaggtatataagcagttccttaaggcccttttttaccgggacaccgtgctgtgcaatccagcggtaggagtattggcgcttttcttcccggaaacggtcatagtccttcatggcgtcctcaccgaactgctgcgtgcagacctgttttaccttgtctggtttgcatccccggattccccgaaggaaattgccgtccacatggattccgtatttaggtcctacctcaaaccaggaggtggcggccagactttccgtgtcaaacataagtccgtcctggtcgaaaatgactgcttgaattggttttggcatttatctgttctccttaataggtgataatcagtcttccgtctcatttgccaaggcgcggccggccctgatttggctgtgttccatcagggccccgggctttgcctgcgtggacattataccacccactcaccctctttgtaaaatcttattttgcctgtccccctactttgaccgattattctccttcaaataccatggcgccagctccctgcgggcaaaatagccctggtcgtggcggcagaccggacagtactgagggggttcttctccttcatatatatatccgcagttggtgcagatccaggtctccttctgctggctgacatacaggttcccggctcccagcaggtctgccagataccggaaacgctctccgtgggtcttctcaatctccgcaatcatacggaaggtggctgcaatctgggaaaatccttccttctgcgcaatgtccccaaaggatttgtacaccacgtcatgctcctcgtattcgttgtgggccgccgcattcagctgggccagggtgttcttttccaaatccaccggataacctccgtctatgaatatggtttccttatccagcggcttcagataatcataaaatatttccgcatgctccttttcctggtccgcggtgtaggaaaataccgcctccaccatgggcatcttctgctcctttgccagccccgccgcaaaggtatagcggtttctggcctggctctctccggcaaaggctctcataaggtttttagctgtctcgctggttttaaaatcagtcatggattctcctcctaaattatatatgaaaacagtgtgacatatggtcattcctactattcccattttcctctcttttattcccatttctgccaatagtccttgtatttatgcctgcttcatggtataatccatttactgataatatccatcaaaaagcccggttttacggactctaaaagccaaaaggaggataagccatgatacgctatgaccggctgtgggcaaccatgcaggcccagggcatgacacagtacagactgatcaaacactacaatttcagtgcgggccagataggacggctgaaaaaaaacatgcatgtatccacccacaccctggataccctctgcacactgctgggctgtgatatcagcgatatcatagagtacatcccggaggggcagcccgccccggaggaacagccagtctccgaagttgcctccgcagaaaaggaagcttcctccaaatccaggaaatcagactctcccaaaggcgataaacccaagaaatccgaaccaaaaaaatcctcaaaatcaaaaaagagcgataaaaaggctgcaaaagacgggaaagagggcaagaaggggaaggaaggcaagaaaaacaagtaaacattcagctatatcaacagatggagcggaaattttcaatcatttcactccgtctgttatttattttccacctttttgtgagattgtcggatttactttccccacccaaatgctaaaattaagttatgaaaaacgtggcgcagcaaaaaaatatgtttaagggaggaatgttcatatgagaaaatttcaaaaggcaaccgcagtcatcatggcagcagccctggcagccaccggctgcagcgcaggcggaacaaagaccagcgccccgcagcagccttccggcacagaggcagccaagacagaggcagcagccggcgctgataagacagaggctgccaaggatactgcttccggtgaagaggagcctgtgctggtggtctatacagccagaagcgaggccctgaacaacgccgtgattcctgaatttgagaaggatacgggaatcaaggtagaggtggtggtggcaggcaccggcgagctgttaaagagagcccagtctgaaaaggataaccccctgggcgatatcttctgggtagctgaccagaccatgctctcctcctccaaagaactgtttatggagtatttttcccctgaggatgaaaacatgctggatgcgttccgcaataccaccggctatttcacccctgcatttgcagacccaacggtcatgattgtcaataaggacttaaagggtgacatgaaaattgacggctttgaggatttgctgaaccctgagttaaagggcaagattgcattcggcgaccctgtaaactccagttccgccttccagtccctgttagccatgctctatggcatgggcaaggacggagacccgttatctgaccaggcatgggattatgtggaccagttcatcgcaaacctggacggcaagatggccaacagctccagccaggtatataagggcgttgcggagggcgagtatgtggtgggcctgacctgggaagatccggctgccaactatgtgaaggaaggcgccgcggttgaggtggtattccccaaagagggcgccatattccccggcgagtccgtacaaattttaaaggactgcaagcatcctgaaaatgcaaagaaatttgtggactatatgctctccgagaagattcagaacgcagtgggctccaacctgactgtaaggcccctcagaaaggatgccaagctggctgactacatgacgcctcagtctgaaatcaaactgtttgatagctacgacgagggctgggtggctgagcacaagacggaaattaccaacctcttcagcgagcatatggagacatccatggactaactctttgcccgcccatctgacagaacacacggcaccggcatgaccatgcctccaaaggactgcccattacgctgaccacatgattccatcaccgcgcatcacctcttggcggtctgaaacggtcagatacggcagtccttttttcttcgcaaaaacaaaaaaacaaggagggttacaaaccatgagtgtagctatcagcattgaaaatgtaatcaaacggttcggaaaggataccattataaacggcctgtccttagacataaggcccggtgaattcttcaccctcttagggccttccggatgcggcaaaaccaccctgctgcgcatgattatcggattcaattccattgagggcggtgaaatcaagattgacggcaaggtcatcaacaacatccccaccaacaagagaaacatgggcatggtgttccagaactacgccattttcccccacatgtcagtccgggacaatgtagccttcggccttaagaaccgcaaggttccccaggaccagatcgagtcccaggtggacgaaatcctgaaggtggtaaagattgaccacctgaaaaagcgaatgccctccaagctgtccggcggccagcagcagcgtgtggccctggccagagccattgtcatccacccggaggtgctgctcatggacgaacccctgtccaacctggacgcaaagctgagggttgagatgaggaacgccatcaagcgcatccagcagcaggtgggcatcaccaccatatatgtgacccatgaccaggaggaggccctggctgtgtcggaccgcatcgcggtcatgaacggcggcgtcatacagcagattgacacccccaaaaacgtataccagcggccctccaacatcttcgtgtccaccttcatcggactgtccaacatcatggacgggcgcattgaggcaaaggacggacagacatttcttcacatcggggattacagcgtgcccatggagaacctttcccgcagcgcggacgacggccaggccgtgaaggtgtccatccggccggaggaattcatcatcaaccgggagggcagcgacggcatacctgccgttgtgcgaagcagcgtattcctcggcatcaccacccactactttgtggagaccgcagacggcagggagatggaggttatacaaaactccgatatctgggatatcatcccggaccacacccccattcgtctgggcgtacagccccataaaatcaacgtgttcactgaggacggaagtcatagccttattgtcaggagggaccattcatgagatatgcgggagagaaaaaattaaatatatgggttgcaatggcactgggaatcctggccctgttccttctcttcgtggtctatcccctggtgctggtgctctataaaagcgtcctttctgaggacggaaacttaagctttgcctatttcaccaaattcttcgcaagaaaatactactggagcaccctggtgaacagcttcaaggtcaccattgtctccaccctggtggccgccgttctgggactggccatggcctatgtgctgaggagcgtgcagattaagggaagcaaatacctgaacatcctgattgtcatttcctacctgtctccgcctttcatcggggcctatgcctggattcagctgttagggcggaacggattcttcaccaaaatactcaacagcctctttcacataaagctgggcggcatctatggttttgcgggcatcgtgctggtattctccctccagtccttccctctggtgtacatgtacatatccggcgccctgaagaacctggacaattccctgaacgaggcagccgaaagccttggctgtaccgcattccagagggtgacgcggatcatcgtcccgctggtgatgcccactatgctggccagctccctgctggtgttcatgcgcgtgttctctgactttggtactcccatgctcatcggagagggctataagacctttccggtgctgatttacagtcagttcatgggggaggtcagcacggacgaccattttgccgccgcactctgcgtcattgtcatcggcattactctggtcctgttcttcctccagcgctatctgggcagccgcttcacctattccatgactgccttaaagcccatggcggcggaaaaatgcaccggcacccgcaacatcctgtcccacctgttcgtgtatgcggtggtgctcatcgccatcctgccacagattacggtcattgtcacatccttcctggcaacaggcggcggaacggtatacaccgggggcttttccctggaaaactacagaaacaccctgttctccaagaacaataacacagctatcttcaacacgtacctgttcggaatatgcgccatcgccatcgtggtggtgtttggtatcctcatatcctatctgaccgtcaggaagagatccttcctcacgggcatcctggacacggtgaccatgttcccctacatcatccccggctctgtcctgggtatctccttcctgtatgcgtttaacagcaagcccctgctgctcagcggcactgccattatcatcatcatatccctgtccatacggcggatgccctacaccatacgttccagcaccgcaatcatcggccagatcagtcccagcgtggaggaggcagccataagcctgggatgcaccgagaccaaatcctttgtgaaggtgacggtgcccatgatgatgtccggcgtgctctccggggccatcatgagctggattaccctgatcagcgagctcagttcctccattatcctgtataccagcagaacccaaaccctgacagtggccatctacgcggaggtcatccggagcaacttcggcaatgccgcagcctactccaccatcctgaccctgaccagtatcctgtcccttctggtgttctttaaagttaccggcagcaacgacatcagcatttagtctctatctatgatataataggaggtacagtgtccaaagggcactgtacttcactacttccgggaggtacccgccatggcaggcaaccagtacagggattatatcaagcgttctttctttaaatacgcaatctccatcatctcactgctctttgtgctgatggggctgtttctgttcatcaatgtccagtggatcagcgtgggaagtaaccgtaagaacaacgccctcctggcatccatcctggacagccaggtgacatcatataaggaaggtttggaacacttttccacggattaccgcttttgggatgccctgaagcaggaaaatacagatgcagccacccaggtcaaccggctgctctacggctttaccacgtcccagcccatacggagtacctttgcccttacggatacagagggacgcatagtgagctccagccttttcgagggcaaccgcgctatcttcctgaacagcgctgtctataagagcctggtggaaaaaatgcaggaagcgcctgccctgacccacaccatgcccagccgcctgaattttgcccacggacaggccggggatctgcttttggcccactccctcgcggacgcggacggtatctgcggatacctgtttttcgatctgatggacgaacagatttatgaggcggtgcgggaataccccctggacgacgtggtcatcacagaccggtacgacaacctgatttttgcagtgggaaggcagaacgcagatcccatggagaaatatcctgccggcaaatacaggatggactggcagaagggtaatattgtgaaggtcaacaacaagcattaccatatacacaaggaagcccttcctgagagctccctgattctatacacactggtatccatggaattccagcgcagccttgtgacctacggcattctgtttctggggctggccggaattctaatggtcatcatgattccgcccctgaccctgcgcatcacaaaaaagaacctgcaggccattgacgaactccagtcctcggtggaggaaatggggcggggaaatatggactaccgcttaaagagccaggttttcgacgaattccagatgctcaacgacgcgttccgcaacatggtgattcagcgcgaggagctgatgcttcacaacaacgagctggcggagcgcaagcgcatcatggaaatcaaacagctggaggaacagtttaaccctcattttattttcaatgtattggaaacactccgctatgagattgccattgactctcagaaggcctcggaaatggtcatggcctttgccaacctgatgcgctacagcatatattacgggagcaccatcgtgcccctgcagaccgacgtcgaatacatcaacgactatctcctgctccagaagatgcgctataaccgcaggctgaattaccatatcgacatccctgaggagctgatggatttaaggattccaaagctgctccttcagccggtggtggagaattccctggtccacggaatgaaggataagcacagtgtatccgttaccatcacggcccgtatggaggacagtaccctggtgctgtgcgtggaggacaacggcagcggcatcagccgggaaaaactgacggagctgcgggaagccctggagcaggaggatatttacagggaacatatcggattatataattcccaccgggtggtgcggctcctctacggcccttcctacggcctgaccattgagagctcccccggaaacggaacgcgggtgagcgtcacacttcccgcggatatggaggaggatacatatgtataaagtcctgattgtggaggacgaggacatcatacgcaaaggcctgctgttcatggtaaactggcaggacgcggactgcgtggtggtaggggaggcagcggacggactggagggactggaaaaaatccgggataccagcccggatatcgtggtggtggacatcaacatgcctgtaaaggacggcctttccatgctggaggacagcatagaagaatacggctatgacgccatcatcgtgtccggctacagcgattttgagtacgccaggaaggctatccgcctgggagtcacggaatacctacttaagcctgtgaattttaacgagctctatgacgctctcggaaagattaaagccaagcagctggcagcggccaggctcaggcatgagatgaagcagctggacatggaaaaacggaagttaggcatactggacgagccggaaacaggggacagccccgaaggaaaccgccatgtggatcacatgatggactgcatccgaaaccactacagctcccacctgtctcttacggatatcagcgaacagtgcggcatgtcctgcacctatctgaactccaagtttaaaagcttcaccggctataccttcaacgactatctgaaccgctaccggatgcagaaggccgtggacctgctgaaggaaaataaatacaaggtctacgaaattgcagaccttgtgggcttctcggattataaatatttcatcaaagtgtttaaaaaatatgtgggatgctctccggtcaagttcatggagggcggcggcgccggaggctggtaatcaggcgaatgggccggtattcctcttccagaataccgctgttgagctggcttacattatattatctggtaaatccattgtctatttaaggatttattactttattccctaccggcaccataaccttgactatatactgttcatacgccttcaccgtcagctcgtccagcatcaaatcctcataccatatcttccccagccggattccccgctcccctgcaaaggcggtgatgagacggtaggacttttccatgttccacagatggcccctgctgtacaactccacgtaggttccctccggccgattctgaacccggtgggagacagttttcttgtccagcctggtatacaccttcacgcagcggtcatatatgccacgttccaggtcctctcccagataaatggatcccactgcgcccactgcgccgttgtacttttcctgcattctgacatgctccgcaatctccaccgcggccttccgctccgatcccgcgctgatgtccgacaccagcagatattccctgtccctctccaccagccttggctcgtccaacgcggtgttcatggccagcctcaccgactcttcctcatgaaggataaagcgcttcatattcttcagacgccgtatctcctcgtcaatctggcgcttctttccgtctatcatggacatgaaccgctccggggaacggttttccatatactccttgatttcccccagggacattcccaatttctgcagggcgcgaatgacctcgaacgtgtccatctgccatacaaaataatacctgtatccgttctcctccttgatggccggggaaaaaaggcctatttcgtcgtagtgaaataaagtgtgcttcccgacccccagtattctggcgaattccccggtggtaaaatatagttccgactgtttttccattttcgctaatctcctcttgactatcgggttaccctatagcatatgataatacctgcagctgaaattatcaagttccaaccatacttaacttattgaattaaaacaggagtgttaacatgagtcattcattatccaaaaaatttacattcgggtctctgctgctgtttgcgctgcccaccactgtcatgatggtggtgatgtccctgtacaccattgtggacggggttttcgtatcccggttcgtcagcaccaacgctctttcatccgtcaatatcgtctaccctgtgattaacatcgtgctgggcatctccgtcatgctgtccatgggaagcaatgccattgtggcaaaaaaaaatgggagaaggccggcctgacagcgccagggaaaccttcaccgccattattctgctgaatatcataatcggactggcctttgcaatcatcgggaacctgacggcagtgcccctttcccgtatgctgggagccagcgacctgctcctagaggactgcgtcacctacctgcgctggcagctggcttttgctccctccctcatgcttcagatccaatttcagatgtattttgtcacggaggggaagccaggcatcggactgttcctcacccttctggcaggcattgccaacgcagcgctggattatgtgctgattgtacccatgggaatggggattgccggggcagccattgccacggtcaccggctacaccataccggccctaatcggcctcatctactttgccgccgccagacagagcctgtggttcgtacggccccgcttcgtaaaaaaggagctgggagaagcctgtctcaacggctcctccgagatggtgacgaacctttcctccggcgtcatcaccttcctgttcaatctgctgatgatgcattttgcaggtgaggacggggtggctgccatcaccatcatccagtattcccagttcctgttaaacgcattgtttatgggattttcccagggcgtgtctccggtcataagctttaactacggaagccggaaccataaacagctcaggcaggtatttaaaacctccctcattttcacggcagcctcatccctggctgttttcctcatggcccagctgggcggcagtctggtggtggaaattttcgcccgcaggggaacgccggtctatgaactggcaaggcacggattcatgatatttgcatgcagcttcctcttttccggcttcaccatcttttcctccgccctgttcacggccctgtccgacggacggatatccgctatcatctccttcgtgcgcacctttggcctgattatcaccagcctgctggtgctgcccttcatcatcgggatggacggcgtgtggctggccattcccatagcagaattcggcggtatcctgctgtgcctttattttctgcgcaaatacaagaccagatatcactatgcctgatggtttaactgccccgtaaaaaagtggttggcccggcgctttgatacaaagcagtccgggccagcgtcatttctgacatatccagcataaaccatggagccgctctaaggtcaaggcaatttcatccatggagataattgtaaggtttcttacgaaatttcacgacactcctttgataaacttggtgggagatttggaggtatattttttgaacacggagcaaaaatgcttgtagtccgtaaatccggtggcctctgatatctcactgattctgtactgtctggtgcccagcatcacgatggcctgctgtaccctgtatttattgagaaagtccaggaaggtctgccccgtgacctccttgaatttcctgctcagatagctggcgctgacccccaggtcatctgagatggattctatgctcagcttcctggcaaaatcctcccgtatggcctttatggccctggatacatactggttctccgacaaatccagctgcatgtagtactccaggttcaggttgcccccctctatctccgcctgctccatcacatgctccacctggcggctgttcacgatttcctcccccagccgttccatgatatctgccagggcttcctcgtccacaggttttagcaggtactcgcagaccctggcctcgatggcgcgcctggcatactcaaaatccgcgtagctggtcaggaggatgctcttaaaccttacctgctccgaggctttctttatcatctctatgccgtccataaagggcatgcagatatccgttatgaccacatccggcctgtattccagaatcttttcatatccgtcccggccgtcggcggcctccgccaccaccacgcagtccatggacagccagtccgtggtatagaccagcccctttcgtatcatctcttcgtcttccgcaatcaacacacgcaacatccgtctgattcctctcttttcaccggcagggtcaccaccagggtggtgccgtgcccctccgcgcttctgatctccaccccgtaggggcgtccgtacaggatatcgattcttctgtgaatattatacagtcccgaatgccttctgggattttccttctgttccagcagggctgtcagctcgcttaaggtgcactgtgggattcccaccccgtcgtcccggcatatcatgattaattttcccttatggatataggctttcagctccacggtcaggttaagctgctttccaaacccgtatttcactgcattctcaatcatgggctggagcaccagcttgggaatccgcaggtccatggtctccggctccacgtcaatcctgcaccggaaccgttccccaaacctgcgctttaatatggtcagataggattccagatgctctaagtcctcctttaacgtcacctctgccttgctgccgtccaggctgtagcgcagaagattggacaggctgaacaccatcctctccgctgttgcaggctccagcttgcacatgtaccggatgttctccagggtattgtacaggaaatggggattgaactgggattccagctgcttgttctgggccatggacaccagctccgccatcttccggttgttctccatctggattctcaggctctgtatggtctcgttataggcgtcggcaatgattttgaattcattgtcgctctgtatccgtatgacaccttccaggtctccgtccctggcattctccatcacatccagaattttatagaaatcctctgtttttttctccgtcaccttcctggagttgagaagcatccacagggtcatgagcaccagggccgtgatgaccaggccgctgcccaggcccagtgaaatgacaatgttctggatatcggagatggaatacacggcaaaccctcccctggaaacccgctgcctggagaccagatacatctgtttcttttggctcaaatacctgcccgactccatgaggaccttcatgacctggttgctgctgtttaagaagctgtaattactgctgacataggcccagccaaagggatccgcgataatggtctggatatccggcttgtccacaagtgccttaaactggctgctgggaatggaacacagtatatagccctgctttttgttcccatccatcacgctccgccctatgacaatcgtactgccgccgtttttccatccttccgccagcttaagagccgtcctgttgggctcccggtccatatcgtcaaatatgccccaggacacgccctccggcacatccaggaacggagggaggtcactgcggctggacagaaggatgctcctgctgctgtccatgacaaacaaatcaccctccagtcccagactgttggtgatgccgtaaaatttcccagacagctcagcctttccgtcctggtcgcggactctgtcaaagaggccgggctgggaagccatttcctccacaccatcctcataccgcgccagcacgttgtccagcagaccggccacataccggttgtgctcaatattgccgctctttttcccgtggagcagcaccgtcataaagagcaggccgcacaccagggtaaatacaaccgccgggacaatggcgtaggcgataaacatgcgctccagttcatggcggaaataccgttctttcttcactggctccccacctccccggatatgcctgcgtcctcctcaagcaccctgttgtaaatagaggcaaaatgctccagccacgtcccctttctggaattcacctcctcctccctgctgtatatgatgtggatatcctccttatccggcaggtaggaaggttcctccacatcctttctcacggaacggcggtccagcctcatggagataacggtctgggcgtccttacccgttacaaagtccacaaaatccctggcctcctccacatggcggctgccctttacgatacagacgctgtccggcgtggagataaccccctccttcatatacaccagctttaccggccccttgtccgccacatagtgggcggccgcctcctcaaaggtaaggcccacggcgtattttccacgggccaccccctggtacacctccccggatccgcctaacaggataccgtccagattccggcagaagtcctccacgtaatcccagccctgctccggctccccgtcccccatggcataaagcatattgatgagatgttcgtaggccgaggacgacgtggcagggtcgcacatggcaattctgcctttcagctccggctttaacagatccccgtagccctccacctccacatcaccaatcaggtttgtattcaccatgattacgctgggaatatccgtgaaccggctcatattgccttccctgttcttaaactcatcccgcaccatatcctcattgcggcttatgtagggctcaaacagctccctcttgggactggtagtggaaagggaaccgccccagaagatgtcgcagggaggatcgctcccctcctccgccatcttaagtagctcccccgtgcctccggtctggacaaagacccgtattccggtccgtccctcaaattccgacacaatggggttgatgaactcaaggggatgagggcagtaaatcaccagctcctcatcccctgcatggtccccgcctgccgcataatccgcacctgtcacatggtccccgcctgccgcatggcccgcagccgcagaagtcccgctgcctgcgcagccggccaggcagagggacatccctatcactgtaatatatttgttccaactcttcttcatacccatctgattcctcatactgcctgccaaaccacatcctccggccatgctgtccggggggcgcatggcccggcagccgaccttcttccggccatccggaaccaaaccggcccgggcattatacctttcgacattataccaatgtgtctacaggatgtaaacccccttgggatcgaaatccaggtatgccttctcccccacctcgtatatcctgcggttcacgggattgtaatccgtaatctgaatctccatgttccccaccatgacctgatagtactgataggatcccatgaaggtggacagggtgacagtgccttccaaaagcccctgctccgccagggttgccccctcgggccggataaccagcacggcgtcatcccccggccccgcctttgcaaaattgttgaccgtaagctcctgtcccacaacgtcgataaccgccttttcaccgcttgcggacctgaccttagcctccagaaaattggcctcaccgatgaagtctgccacgaacctggaattgggatggtagtaaatctccctgggcgtcccaatctgctccacctttcccttgctcatgataatgattttatcggaaatgctcatggcctcggactggtcatgtgtcacatagatggccgtaatgcccaccttctgctggattttacggatttccgtcctcatagtgaccctcagcttggcgtccaggttgcttaagggctcgtcaaagagcagtacgctgggctcgatgacaagggccctggccagtgccacgcgctgctgctggccgccggagagctggttggtcatgcgggactccatgccctccatctccaccagcttgaggatgctcatgaccctctcataaatctcctccttggggagcttgcgtatcttaaggccataggccacattgtcaaatacattataatggggcagaagggcgtagctctgaaacaccatggccgtatccctcttattgggcgtcagagcattgatggcctcatcccccaggtaaatatccccctcatccgggctctcaaatcccgcgatcatgcgcagggtagtggtcttgccgcatcccgaaggccccagaagtgtcacaaagctgccgggctcaatatccagggtggtatcctgcactgcatagaattccttccctgtctttggatctgtatatattttggaaatgtgttccagacgaacaccttttttctgtttatccatatcaactttcctcctcgctatgagcacttagcgtctgtcttttagacgcttacgtgcgatgcatgccactggcgcttggcgggcgtcctttgaccgcttagcgcagcggcccgctatgagcacttagcgcctgtccttcagacgcttacgtgcgatgcatgccactggcgcttactcctgctttatcttcctgctgactccgaagaacttcatcagggtattcatgataagtaccgcgccgtaggttatgataatcagtacggttgcataggcgcatgccacgccgtaattgcccttctcagcctgctcattgatctggcaggtgatgagtaagaagtcaggcgtcaccagaagaatgatggccgaaattgccgtgatgctccgcacaaaggccgtcaccaggccgctgaaaaaggaatccttaatcagaggaagcgttacggtcataaacaccttggcggagttagcgcccatatcgtaggcggattcctcgatggacttgtcaatctggcgcagggctgagataccgctcctggtgccggtgggaaggcttcgcacgatgaatacgataatcaggataaggccggttccgtagaggccgctcatgacgccggtcctgaacaggccattggcataacccctgatatatccgatacccagcacggtgccgggcaccgccatagccagcatggatacgaattcgataaatcccttggccttaaaccgtttctttaccaccaggtaagagatgaccatggacaggaaggctgtcaggggagctgcaatcagggacaggacaaaggagtccttaaaagccttaagtccgctggtcttaaacatgtactggaaccatttaaggctcaggctgtaatccctgccccaaagggtgaacagcgcgccaaagggcaccataatgtacatcagcatgacaaagactgacacggcgccgcagaaaatggtcaggggaaccgttacgctcttatcctctatgagcatcctcatgcgggaagcctttcccgtaagggtggctgcggttttcttctccagataatacttctggatcaggaacaggaccacggtcagggacaaaagcactacggacatggccgcggctccggtggagtcataggctcctgtcacctgcagatagatggtggtggccagtgtgtcgtaggaacctccaatcagcatggggttggcaaaatccgccacagactcgataaaggttaccaggaatgcattgcccagtccgggaagaagaaggggaaatgtaacgctggtaaacaccttccaccgggtagctcccatgtccctggtcgcctcttccagggagggatcgatattctttaagagtcccttaagcatcagatagcatacggggaaaaaggtcagcgtctgcacaatggcgattcccttaagcccgtatacattggaatcatagattcccaacagggatcgggtgatgatgccgcttcgtccaaacagcataatcatggacagtgacagcacaaaaggaggggaaaccacgggaagcatggaaaccatggcaaacagcttctcaagcacctttgtcttaagctttacatacacctccacataggcgaacagcagaccgatggcagtggatgcgattcccgtaatcatgcctaacaccagggtgtttttaaaagccttctggaaccgctccaggctcagcaccctcccgaatacctccagggtaatcttaccttccgaataaaagctgtctaccagcagcatcagaagggggtacaggatgaacaatgccaggaataccagcagtaccacaatcatgcttaccagtatggggtctgaaaaaaatttcttgcgctccagatcagcgctctgttttctggccacaatgaggccccctttcccgaggaattctttcctcttgatttcttacagtcctttctgccaagccaggaccataatgtaacaaatgctgcgtaatgaatgatgacaaccattacgcagcacccgtttgcaagctcacactacattacgtttccaagtgccggacaccggcaggagccctgcctattctgtcaagaaacggctggagtccgcgctgtcggaggagcttccaagagctgcgaagaagtcctctacatacttggcactgttttcctttgcatcctcaaaatcatagtcaatggtattgttcatatccagaccaaatttcgtagcttcctcaggctgggtggcattgcttaataccaggaactgataggagccgttctccttggcgtggtccacacagtcaggagacaaagcatattcaatccacagcttggctgcgtttggatgtgcgcatccgttgaagatggcggtagcgcctacctcaaaggaggttccgtcctcaggaacgatcagctggatattgtcatagccctgaagaatctggtaaatgccgtcatgaaggaatccgataccgattacgcactcgcccgggcctaccatcttggatgggccggaaccggacttggtgtactgggaaatgttcttgtccaggaccttgaaatactccatggcctcgtcatgtcccttcatctgaaccatggtgttgatgagcagttttgccgtaccggccgtgttggggttggacagcatgatgagtcccttgtactcttccttggtcaggtcatcccatgtcttgggcgcctccaggcccaggcggtccagttcttccgtattgaccatgaagcccaggatgcccttgtagatgccgtaccagcagttggtcggatccttgtactggtcgccaatcaggttcttggcattgatggcgtcatactccatcagaaggccgtcagctactgcctcgttataggggtctgtggttccgccgaaccatacgtcggcagatggtttgccggcttcctcggatatcttggtataaacctctgatgtggaaagtctctggtattttgtcttgattccgtacagcttctcaaaattctggcaggcggcagacagatattcctcctcgcaggaaccgtatacagtcagttcgccttcggccttggccgccttgatgagggcatccatatccccgcccgcagcctcagccgccgtggtttctgccgcgtcatccctgctctcctcctttgcagcctccgtagcagctgccgtggtggtctcaggcgcggccgtggtttctgccgccttgttaccgcctccgcaggcagtaaggcttaaagccatggagcatgccaacaaaagtgccagttttttcttcataataataccctccttctcatttctgatgatttcatcatagcagaaaagaaggagggtaaaaaccgcatttcaagtaattttgtcgtgatttctgaacatgtctactgtttttttatctaatatacacaaccatatctatttacagacaggcatccagcattcccagcagctccagggcgcttctgcccatacggcgggcatattcctcacttacggactccgcaaaggaaagggggaagaattcgccctcctcctgaaaatcagcgggcgcggaggcgtgaatggaagtcactttaaacccttccgacgtgcggacacaggtggatgtaaagcgcactcccatggcaaagttcctgccgtcgggaagtgtgcgcaccacagtaagcctgccctgcatgacgccgcaggcagccctttgcgtgtattgttccgatatataaaaacattctaacacattcctgttaaaataaaaaggagaataccattcccctttttaataccactcttttacgctctcttccttttcaccgtcacataaaagcagttcatcccatccctgtactccactccaatcctggccctgtggctcctggctgtctctgccgctatggccagtcccaggccataaccgtttgtgctgctcctggcgctgtcgtccctgtaaaaccttcggaaaattaacgtgcgcttatcttcaggtataggttctccctggctgcacacccacagcctggccctgttccggccggccggctccagccttacctccgcccgcccccttggcacggaatatttcaccgcgttgtccataagagccttgattaactgtcccatccgggatgggttacccatcatcagcacatcatcctctatcttatattccagcaccttctcctcctgataaaacacaggttcaaagatcagtatcttctccataaccaaatcgctcaggctgaaccgggtaaattcccccttccccggtacacaggaatcgttcctggccagaagcaggagactttccaccagggatcgcatttccctgcactcctggttcacatgctccatccacttatccgcttccgccgatatgccggcataccgctcctgcaaaagctccgcattggccgtaatcacggtcagcggtgtctttagctcgtgggaagcgtccgccacgaactgcttctgcatgcggacagactcctccaccggcttcacggcccaccgggaaaagaaataggacagcgcgaagaatcccagccagatagccacacaggccatggcgccgtatttcatgactccgtttctcaatgaatcctcataggtggtatctgcaaatgcaatcatatgacctgcgggctggctgatccttaaatatctcagatgatacgcgtccagtatccccatgtcctcctccccggtcatgcccagcacagccatctgctccaggtattccggttcccagtaagcatcgtatccttcccccagcgtcaccgcgccgtcctcccccaccagaacagtgacgaacggaatcctggccggagacatggcggcaaatatcagggactgctcctccccggacaccaccctggacagggccaggcttccctggtcatttaccctgtgcttcaccacagaggtcaccgcacagaaggttatccctatgaccgctgtcaccaccagcatattataaataataaacttaagccgaagcctgcctatttccctcattacagcacctccctgctgttcttttccactatcctgtatcccagcttgcgtatggtgacaatcatcacatccgccttgaggaaatccagcttctttctcagaaacgatatgtaaatctccacattgttctccactgcctccgcgtcatttccccataccctggacagaagggtttccttggaaaccaccatatcccggttcaccatcagaatacgcatgatgtcgtactccttttttcccagctgtatgctttttccaggccctcttaaggtatagtccgcctggcttaaggatatgtttcccaggttcaggctttcgggtatcatctcccccctgcgccttaagatggtcttcatcacagccagaagctcctgcatgtcaaagggctttgtcaaataataatcagcgccgctttccagccccgtcaccctgtcctccagctcgcttttcgctgtcagtatcagaacgggaacctggcatcccatttttctggcttcccttaacagggtaattccgtccattcccggcagcatcaggtccaggacagcggcgtcgtagccgccgtcctttaggagccagcagccggtagttccatccccgcagatatcgcagtcataccagtgcttcaatatatcacggatggactctgccagccgcctgttatcctccacaatcaagacccgcatctatatcctctccctgttttgagtcatgtctgaaaaatccacctgtattctctctcaattcggtacgaaccgcaagagaacagaggtggatttcacagataattcacaaacccgtatgcgcttttacctgctgcgtatctcccttctcatgaagctgatgtaggaagcggcgaacaccacagccgtcagcgccagcaggcccgtcagatggggccacactaacaggcagctctgtcccagtgacagatatccggtgatggcgcccgacagctgctggggcaggatgatgttggtggagcgcaccatgggattcatgatggtggaaaccgcctcactgtacaggtaatagggcgacaaacggttcaggctcatctggcagctgtaattgtccagaatctgccctgccgacgcggtctgccccatgggaaacagggcattggccacaatgctcaccaccagcgtcataaacagcgcaaagaagatccacaacgcaatcacgatcatggctgaggtagctgcatggcggcacagcacggaacataggatggacagagccagccagaagcagatgtagacagaggtgaaaaacagcagcaccagcacccgccccgcttcctcggcagcaggcggcaccccggtggccaaaagccccacggcgcctgcgataagtcccatggaaaagaccatgataaagatgattgtggcgccggccaggaatttcccgtttataaccgcatcccggtaaacgggctgcgccaccaggcggtttaacgtgccctcagaacgctcgctgttgatggcgtcaaaccccaggctcagccccacaaaaggccccagcagagcaatgaaggaggtaaaagacgggatggagcttccgctcagggtgaacagcttcaggaaaatgtagctggcatcagacgcaatggcgtccgaaaggctggtcagagccccgtatatgctggcgcagctggtcagcagaatcagtcccagcacaatcaggaaccgcttgctgcgtatgtggtccgacatctccttgcggtacagggccgtcatgccgcccatacccttacatggtctcacccgcgcacctccatctgacatattcttaccgctgttcccttccgaaagaaaggaatcctttatttttcttttgattgagaccaccatttttctgctctcctttctcaaaatatctgcggtaaatttcatccaggtcattccccctctgtcttaagtggcgcagggtgtagcccttctccagtgccctgcggtttaattccctgcacaggtctgctctggaatggaccacgtagaaatcgccggaccgctccacctgctccacattgccaaggcttcttaacagctcctcgaatccgctgtcatcgggaaaggcagctgcctccagggcataatgcccttcacggcgtatctgccctgccagctcgtcaattcttccgcaggcaatgagcctgccctccacgaaaagccccacccggtcgcaaatctgctgaatctgataaagctggtgggatgatatgagaatggtccttttatcatcctccgccaggccgcgtatcagggtcataagctctctcattccttccgggtcgattcccagagtaggttcatccatgatgaccaccttcgggtccttcatcagaacatcagcgattcccagccgctgccgcatgccccgcgaataggttcccgccttctggtcggctgcctccgtcatccccaccttttccagcagttcctctatccgcctgtctgtcacatcgccgggcaggccgtttagctggcctgtaaaccgaagattctcccgacccgtcatgtcggaataaaaccccacattatccggcagataccccaccatccgtttgacctcgatggcctgcctggcgcagtcctttccgtctatgtacgcactgccgccggtgggctccgtcagccccagcagcataagggtggtggtggtctttccggctccgtttggtcccagcagcccgaatatctctccccgccggatttccagtgtcaaatcacagaccgcttccttctccccgtaggatttggacaggtgttcagtccatatcatcatttcttcctcattatccataacaatgccccctttccagcgaacgatccataaggactaccttctgccatatttgcggaacacatagcccaggcctccggccgtacccagtatgatgatgactgccaccacgccccagaccgtctttgtcttaaccgataccctgaagtcggcgtttgactgggtctgctcgcaggctgccgtaaatgtgttcacatagtcccccgtgattgcttccgaggagggctttacatgggcaatgacttccgtggtgcttccggccggaatggacgtgatgacgttgttctccgtattgtaggtcacggtccagccagtgggcagggatgagttaagggtcacattttccagatccacgttgccggtattggtgatgttaagcgtcacatccgaggtccggcccgcataggcgtcaaagctcaggcggccatccggggtggaaaccttaaggccgtagctgcctgtaatgaccaccttcaggctggtgtccaatgtctcctctgccgacacagcgctgcaggatatgtcatattcccctgccgcaaccccttccggcggcgtcaccgacacagtcatgcccttgctggcgccggactccacctccagggcagccaccttggcagtctcaccggtgggggtaaagcttactccccagccggacggcgcattggatgacaagctgtaggactgtgtcttaagcccgttgttaatcagagtggtgctgaaagaaaaattagtgcccgtggttccctcctgctgggggtactccgaagtaaagcttccctttcccgcattcatctcatttaccataaacgagataggcagactggctgtaaggccctctcccgctgacgccttcacctccactgtataggttccctctgtcagctcctttggaaccgttacatgaagggtcacctgggagccgtcgtctccgttctttacatggatgcggcttacctgatagctgccgccctggagataaccctcccatccctcaggcatggcagagacctccagatccgcatccagactggcccctgtgtggttctccagcgtgatgggaatattcaggttgtctcccggcttcacggatatgcccggatagtccgtattcaggtccaggccgccggccccgtaaaccgtatgagcacccataaataccaggaacacagccgccatgaggaccgccagaagtccaaaccgcttacctgtcccgccctttctgattaccattgcttcctccataatttcctccttttgcccggtacgggcatctgtattttctaccagctatcataacggagaaacctttagccaacctttaataagtttgaaaatactgtgaaaaagcatgggaaccatgattcttccgaacgcgccaaaaaggagccctgcggtaagcgcggccccttatgtactggaatgactgatatatctttgttctgtacctgggtaaattacggctgaatgtctgataaaaatgatggtgtgtattgataagtccgggatatatcaccatattagatgcgtcaatcacatcctccgctgtctcctgtccgattccgccaatgactccgtcccggattaatacgcccgcaccgtcaggcagtctgtcatccccgtcacatgtaacaagatgcttaacgttctttacgagtaaggttcccttcatgattacctcctgatgtaaattcataaacaatctttgtctcatagactatatgactggtatactgccggcggcacggatgtccacgatgcaccctcatacgggttcagtatatatgatacctggatgccaagaataaatacggctccccgcttctcatcgacctggaccatttccgtgaaattatcaataaattcggttacagctttggagacaatgtcctctaccgcttcagccggaagcttaagctcctgtgcggaccggaccgcggtgtctaccgtctggagggagacgagtttatcatccagtctcccggcggttccagaaaggacaccgaatccctctttgaagaaatcatccggcaactggaatacagcggagatatacatgtggtagggcgtttcatcgtagaccaggtattccaaaaagccagaaagtggcagaccgattttccggaactgatggctggtttcaatgtatcctatcttcagtttaaggattcggggtttgtggattacctgattcagaaagccaatgaatatgagctgaatcccggatatctctgcattgaactgacaaagagttcaagggcagacgatttcgacaccctggccgggtgttttgagaaactgcggtcatttggttttcgcatttccctggatgatttcgggattgcctactccatactgctgttgatccgaaacctacccgtgggttccgtaaagcttgaccactcctttaccctgcttcagggttatttctttgaccggcccatgccggccatccgccgcttgatcttcagagcttatcctagtctgtcaacaggcaggtaccggtggaaatagaagatacctctgtaaaagcctgtctttcaagcaagaaataataatacaaaaagccctgcgcggcctgcccttttaaggcagcccatgcaggacttataaaacaacggattacatacccgtaccataaatcatattcggcaggaacagcaccaaatccgggaagaatacgcagatagccagcgttgccaggatagctatgaacaacggcagcgaatacttcgtggtctcctgcaccgaacagtccatgatattggaacaggtgtacagtgcaactccaaccggaggcgtggaacagcccatggtaacaatggtcatcatgatgatgccgaagtgaaccgggtcaatgccgtactgtgtgataattggaatcagtatcggggtaacgatcagggtgatgaccgtagtctccataaacataccgaacacagtcagcataattaaaatcagtagcagaagcacgtatttattgctggtcagacctaccagcagagttgtcaaagtctttggcagctggtcaaatacaacgccgtagctgaatatgccggagaaagccagaatcatggtaatcacggataaatcctttacgctgtccacgatacacttcttaaacttctcaaggttcagttccttataaatgaagatacctacaaacagtgcatagaacacggcaaaggcaccggattccgacggggtcatgacgccgaaacgaatcagcacaatcagcaggattgggaacataagcgcccatatactctcaaaacaggacttgatgataacccctggaggtgatggcttatcatggtccggctgatatccgtagtggcgcgcggaccaggaggtggcaagcatcatgaagatacacataatgatacctggaaggaatccggctacgaacaggcgtccaatggaaacctcgcccacggttccgtacagaatcaggcccatggacggcggaattgtggctacaatcagtcctgacagacagttgattgcagcggcccagcccggtgcatagcctctctttgtcatctcaggcccaaggatacggcattccatggctgcatccgcaaccgcggaaccggatacgccgcccatcagggttgagagaaccacggaaacctgtccaatggaaccgtacatatggccggtcagcacgtttgccagctttaccagacgggatgtgatgccggtgttgttcatcaggttaccggcaaaaatgaacagcggaatcgcaagcatggtaaaggactgggtggtggacagggatttctgcaccagaatggtccacggaatctccggcctcattaggaagaaggaaaatccggacaccgctatcgcaaaggccaccggcattccaaggaacaggagaattaagaaaaatccaaccgcacttaacactaattaaccccccattctttcattggtttcctgatatcaccgagcaccttgcctatcatgctgaaaaacatcagtagggagcccaccggtaccgccagggtacaccaggcatagctcatcttcagggtattaaaggtacggttccagctctgggacaccagcaggaatccgtaaacaatcagaatcaataaaaacagcagcatgaaaaagtcaaacaccagcatcagagtcttctggaccgccttggggaaccggttggacagcatgtcgattcgaatcaggccgccgctcttgatgatgatatcagagccgataaaggtcagccatccaaatgccagcagcgaaacatcctgggcccagttcaccggcattccgatggttctggccactgcggaccagaacaccagaacggcaatcatgcataacattgcaccggccagaagctcctctgtctttaaaataacagcagaaatttttttcatttaaaagcttcctttctgtattgcggaaagtacccggggattaattggtcttaccaatctccttgtacagtttatctctcagttcagcatagccaagtttctcatatacaggatcaacggctgccttaaatggcgcaaggtccggctctacgatggtcattcctgcctcaaccattgccttctcagcctcgtcagcctctgtcattacgtcagcagctgtttcctggccaacctcgatggaggtctcaaccagcagtgtctgtaaatcttccggcaggctctcaaaccagctctggccgcagattaatccctgcatcagctggaaatgtcctgtcttggactgatacttacacacttcatacagtctggatggatatgtagatgtgttctgtgcctcgcagccctccaatgccttggactggattccgttgtaaacctcgccccatgacatggaaatcggagtggcgcccatggcctggatcgtctcggtacatacttcctgtccgatggtacggattctcatgcccttcaggtcatccggcgtattgattggcttgttggtcatgaaatgacgcgggccgtcgtagaatgtaaaggacaggattttaattccgtgatccttggacagggaatctgtccagcccttaaatgtatcggtctgtgttatcttatagcactcatcgtagttatctgcgaagtagcccatcatcagaatggagaaatccttcacatactgtcccatgcgggaagcatcggtgttaacagccacattggcgccctggatggcctgctccagcacgtcctcgtcactgccaagctgaccggacgggaacacggttaccttcagcctgccgcctgatttctcatttaacacatcagccagcttctggtagttcctggtaatcagggcctgctctgtctgggaagtggaaatctttaactcatataccttgtcatcacttgcggcagcctcactgctgtcccctccccgggcctgtgttgcagctggctgagtatttcccatacccggcatgccgttgcatgcagtcattgccatcattgccgcggtaagaacacctgctaataatactatctttttcattgttatcccctttccttaagttgtccagcgtaacagctttcgctaaacgtttacatattttcctcatttagtataaacgtttacatattttccatcaagcattttctgcaaaaaagtttaacagaattttaacgttatttttatgcagtattcacaattcaaattattttttaaaagttcccgctttttttccgctttcattttgacattatttcaagaaacctttacaatagctgtgtatacattttcagagaatcacagggaggtggaccggaatatggtaacaatcaaagacgtggcaaaaaaatgcggctattccgtctgcacggtatcccgcgccctttccggcaaaggatacctgaaagaagagacaaaacagaaaatactggaaacagttgcagaactgggataccgccccaacaccctggccgtcaacctgaagaccggacgccgacaggccctggccctggtcctgccttccctgaccaatatctactacaccaagctggaacagtacctggagtcctgcgcgtcagaaaaaggctatatcatttacctgaacaacacggaatacagtctggaaaaagaaaaacagatattagaaaatttaatcggaatggacatagcgggggtcatcattacccctgtcaccagccagcatgaccatatcatgaacctggcaaagtatgacatcccctatgtgtatttaaaccgttcttacgaggatgacatggaacactgtctccgcctggacaacaaaaaagccgcctacgaggcggtttcctacatgattaagctggggcacaaaaatatcggcggcatcttccagagctttgacaacctcacctaccgggaacgctatgacggcatggcccaggccctccgggagcacgggctggactgccgtcccggccacatgctctttgacgttaacccggaggatatggggactactcccggccggatcctgcagctgctccaaaaacccgaccgccctgaggggatctttgcctgcaatgacatgaccgccttcaatatctaccgggcctgttatatacttgggctgcggattccggaccatttgtccgtattcggctacgatgactgtatcatggccaattttgtgacgccgcccctgtcaacggtcagcgtccctgtccgcaagctggcgggaaccgccattgacttcatccatggttatctggaatccggcgtccgggcagagcttcccatattaaaagcttccctgattatccgcaattccgtgcgcaacctgaatttggattagagcgtgttcatatcctttcccggatacaccatcaccagctgggcgctgccttccggccggatttggtatgtctccaccccggctgcaatcaggaagctgtcccctgccttcagactgagcacctgtccattctgttccatggcgcagcttccggcacacaccacacccagattgaatttttggttatatcttaccaaagccggtgcggtcacctccagtttttccacaaagaagcaggaggtcagggtttcatccaccaggcgcacccgccggaaggcgtctgtttcctccagtacccggggctctatcctgcatttttccatgatttcttctttggaatactctgtataatcaaaaatatccaggcaaaaatccagcccccgtcccatgaaccggccgtcctccggcacaacgattccctcacgttcaaattcgcaccgcaccaccaaatcagatggctccataatttccagcatggtaattccctcgcctatggcatgaggcattccgcccggaatataccagacctcccccacctgtaccggaatcttctcaaagcagccgtccattcgggccttgtcctgtttctccacaatctccctccagccgtcccttccgggcgtatgctggaatcccaggcggatgtatggactgatgccctcccttacattgagaatatagtagcactcaagctttccatagggcattcccatcacttcattggcaaaccgggtggcgggatgggcctgtacgtggagccgcatggctgaatccagaattttaaacaggaagctgaggcgccagcctccctccccgcaggcggcagtgcccaggtaaaactcccggtcatcgtctattatgtcccgcaggaatctgggtccatccgcggtctccaccacggccagtccctcgtgtgctatgggttccattcccggattggaggcttccaccatggagcccacccattcctccggcatattgttgtccgcccaccgggcttttccatggagccggtcaattcccgctccccctgtgtaatttctccgtaccctgttttcgggcagtttcataagtcctgttgccatcgcggccttcctcctgtcatagtgtatgtgtctatcgtatctgccggatcttttcaatcaggtccagatattcccctccgtatttccggtataccggctccattgcctggatccaggcctgcggatcctcgggctcaagaatgatgaccccctccttctccagcgcctcatatgccttccggtccgcttcctctatggctgtcctgttatactcctgggtctcctttgcagcctgtaccagcgcgtcctgatattcctccttaagatttttccaggtgattttgctcaccagaatcactccgggcgtataggtatgcctgtccttcacataataaggggcaaccttataaaacttattataataatagctcaccggcgggttctccgccccgtcaatggtccctgactccagggccgtatagagctccgcataggcaatgggcactgcctccgcccccagcgcttccacggtgtcgcccatcatggacgccacctggacccggattttcagtcccttcatatcctccagtctgcggaccggcctgtcggtggtaaagaagttcctggccccttcatccagataagccaggccaatcattcctgtacagtcctggatattatccagtatttccctgcccaggtcactgccgcacaccttccagaagtggtccctgtcccggaaaacatagggcagcaccagggcagacatcatgggattcccgctgtccgccagagacatgctgttgccccggtacaaatccaaagctcccatctccatggactggtaacagcgcgcatcgtcccccagctggccggagggatagatttcaaccatcaccctgccgcctgtgagttcactgaccctgtcagcaaaatactgggccgaatctgtcagcacatggccttccggattcacctcgccgtagcagagcacgatctccggttcattgtccgctcccgcggctcccttatttcccaaaatcccatagccgcccgccagtcctgcaatcagcacagcagccgcggcccctatcaacaactgttttttcaactcgttcctcctgacccgggccaatcatttcctgattcttccaaaacatcattccctctgaatcttcatttctgaaaaatagtccacatgatactttaaattatccccgttaaaattcagctgtcccagcttttcaaaacgtctggctgcctctgaggtcttgacccgtatacccggtatctggttaattccccggataatggtcatcaggctgcggccaaaattcagctttaccgaaacatcctgatatcctaaaagcgtctccagctcctcaatcatctctgtaagaagatcgctggtctggctctggttctcccttgacagggaccggataatccgttcctccaggccgcagatccgtttcatgcccttcgtcatgctgtcaaaggcaaggcgcgcctcctgcgcggaatattccctgataaaggacgcagcctccccataagcctgcgtcagccgttccatgccttcataagcgccgctgacaccgcaggccacaggaatcttcctctcctctgccaggtaatccctggcgcgggtaatacagccggtcagctccgtaaacgcatcctgctgctgtgaatagaggcagataaccatctggtccatccagatgctattaagcacagtcacccctgccatgtgaaaataatttttcagcacctcctgggaaaatcctcccatgttaatcagggccggactggaaatcagcactaccttaaaccacccggctcccaccccccacatggcaaactctttttccagcttatccctgtcccttcggccaaagaacacatcccacagcaaatccttttccaaatcccggtagaaatcaaaagccgcctctccatcctccgccagataattggaataggacagcatggataaggtgtcctcccgttcccttacccgtgcaatgaccttatccagtgtctctctcagctctgagtccaaatagggtttcagcagataatccgtcacccccagcttgattgcctgttttgcaaaggagaaatcactgtaggcggatatcagcacaatctggatatccggataccttttgcgcacctcctccgctgtcttaagcccgtccatccgcggcatcttgatgtccaaaagcacaatctggggcttgcactcctccagcttctccagcaaatccataccatccactgccttgcagacaatctccagcagaccgggataactctcctttatgaccttctccagataattccgctcgtactgctcgtcatctgccaatattacacgcaacataaccctttcctcctaatgcctgtctgatttataaagcttcagcgtaatcttcgtaattccctccgtcctctcaatctgcagcacgtcctctttccgataaaataaccttaaccgttcctccacgtttttcagtccgatggaggttttggggatgggcgtctcccggagcgagggctggtccgggttcttcggaaatcccacgccgttgtccgccaccacagcctcaatataatcaggcttctcagtaatcagtatatccaccttccccccgctgacccggtccttcagcccgtgctggatactgttttccaccagaggctggattgtcagcggcggaatcatcacatcctcgcccataaatgacttgcgaacatccagacagaaggtcacccgtccctttaaatgcagcttctgtatatacaggtatgactgaagcagctcaatctcctcgtccagcgggatggataccgtattgatctcaatgctgcttcgcaggattttggagatggccttgaccagctggatggaggtatcccgttctcccagctggatactgcggattaccaggctcagggtattaaacaggaaatggggattcatctgcatctgcagctcccgtatcttcgcctcagccagccgttccttcatctggtgggtctcatgtaattccgtaatcatggtcctgatctgccgcttcatctggtcaaatgtggcggatacctggttcagctccgcataaggcgtctcctcaatatccgctgcctccagattattgttcataatttccctggccgcgtccgtcagccgcttgatggaattcaggatactggtactcatctgatggttcagcaccatgccaaagaggctggctgccatgaaaaacacgatcagtatactgtttgtaagtcccagcgtcctgctgtggctggcaaaggcagtgttcaggtactccaggtactggctcatcaactggttcaggcaccgctcaatctccaaatccacctcgtccaaatcagccatcaggctgggataatagtccccgtcaggccggatgtaggactccgccatctcccgcctgtactcagctacctgacccacaatccggtacatcatcttgcacttccggtcattctgcatcttatcatccagtccccgcagctggctgtcaaacaacccgcactcgtcgtaatactgcttaagcgttccctcgtcgtggctcttgctgtacagcttaaaataggtctgtctcctgttattgactgccagcagcccgtttacctgctggtaatcctgtaaaagcccgttgtagcggcgggaggagtccacattcacaagggcattggaggctatgaagataaaggccaccagcagcagaatcagatggttccttgttatttcttttcgtatggatttcatgaatcttttctcacttttctgtaggggattttttcttgggagatttttcttctgaggttattctacaacgggagtggaagaaaaacaagtcagactgagtctgacttgttggcggcttgccggcggacatgaatatccggcttcatactattttgtcttttgcaatctccatctcataaggctgagtccagtaaaacgccgccccatggaatttcagtgttatcttcgttcacgttcccatccgcccccgcttaactttctctggcagagcagaccctttaacgcaagctccttatcttcatgcgctgccgtcacatcgatgtataccgccggcctgtcccccactttagcatttccctgtcccttccggttttccgccgtctggggctcctatatctggtgatgcccagtatacgcacagaaccgtctctccacggaatggtttcgcttaattctttataatcctccggaacaggcagagtgacgggcgcggattcctcactgtccaaaaacgtgattcctggaatataaatccgagcagaactatattttgtacgatgctgtacttccgattttccctcagtacatcataattgaaaaattcggcagatgacttttcaaccatctaccgcacatataatcatagtaatatataaagtctactgcacccacgccccgctctcatccacccgcgatccatccggtgtggttgtattggtcagcatggcgccgtccgcgcccagatagaaccactggccgttttcttccaccttttcccactggttcttggccatggctccgttggagcgcaggaaataccatttgccatttacctggcgccatcccttggccatatatgtattggaatcaatccagtaggaaactccgtctaccgtaacccactcattggcggccttggctccattatccttcacatagtaccatccgttgctgtcctgtacccagcccttggctgaggatgttcccggaccggcatttcccgtgccggaagaactgcccgtcgtgcccgcgttatttgaactgcctgtactgcttccgctgccgcttaaagcacctgccttcaccagttcatatccgtaatcgaacaatgccttcgtatccgtataatgagttgatttgctcttcatgatgacggcaatcaatctgactccgtccttctccactgccgtcaccagtgtatttcccgctttggacgtataaccggtctttcctccgataacgcccggataatacctggcgtcgttggggttcagcatcttgtgtccgatggtcacggtcagcccggaaggattctttatggtagcaggcagcgtatatgtacgcgtggacgccaccgtcttcaccacatcattctgaaacgctgcccttgcaatcagagccatatcatggggtgtggtgtaatggttggagtcattgaggccgtgaggatttgtaaaatgtgtattggtacatcccaaggccgctgccttggcgttcatcatctccgcaaatttggcgttgctgccagccacatgttccgcaagagcatttcccacttcattagctgatttgagaagcagggcataaagacactggcgcacagtcatcacatcccctgccgtcatattgatggatacagcgcccgcttccaggttcgtggtagctgttgctgaaaatgtgaccttgtcatccagattgcagttctccgccaccagcagggctgtcatcagcttggtgatacttgcgggatagaactgtttgtccccgttcttggaaaacaggacggttcccgcggcagcatccattagcacggctccctccgaagctatctccggcttctgcacggaagccgcggctgtctggtcaaaagtcccggacgctgttcctgccgtttctccaggtgatacagcacccccgctgttccccccggcagcctggccagctgtcggattccgcgacggacttccggataaagacggactccctgacggagacgggcttccggttggggacggacttccggatggggacggacttccggccgaggatggcccgtcagatgaaatgacccctccatcacttccggattccgaacccggtccctgggacgaaaccgctgcctggtcataggtctggttcccggactgaaaggaagatacctgactttcttccaaaggcgtgatggcggccggattagctgaagctgctgtactcattaacagggtgcagctggtgcatatacataaaaatgatttccatttcttaagtctcataatatctctcccatatagcaggtcattctgaacaaaactagagatattataccatacttcatggttacaaaaaacatctatttctgacgataaacttacgatatatatattttttctttaattgcacaggcagatatttttctttccatcctcccacattccgttatacagtggttccccatgtcttcattccattgtttcgttatgccttatcctgccctcctgccggaatgtgtttcataaccgctccggagcatagcacagacatgccttagttcacggatgtcatatctctataaaagtctatgtatccgcattccctgcatacatgtgcgactgttggccccagctggtttttggaatcggaaatacggtccggttcatccacccatacaaggtgtgttctgattcggtttatttccatctggcctgaacattttggacatcgcatctgcacttacctcctttgtgtttttttcattatacgacggtttaggtgaaaataaactcccctcggcggtatgcctaatgtccattcgcgctccctgtatcctgttatctactatttctcctggctccggcacaaataccgttcaatcatctccagttcatccagatatatacaattgggaatcccgtgatttttcaccgcctccacacactggccaagttccatccacatgacgctctccacctcttccttctgaagggtaagctggtccgcgtccaccgttttcctgtacacatacacagcactgacttcactgtccctgaacatatttccgtaaaacatgtcttccatatatcccttgtgaaaccccgcaaattccaggtcctcctccctggcctcaatccccagctcctccttcagttccctgatggcggacggcaggaattcatctccggcctgcacatggcctgccgaggaaatgtcataacatcccgggtaggaatcctttccccggctccgcttctgcaacagaaggtcgtatgttttatcctcatttttcctcacaacccatatatgggcggtcccgcggggaaccccgtccatgtggaccaggctccgttcccgtaccactcctgttttctttccgtcctcatccagaacatcaaacagctccatctgttttccgttcaggacagcctcagtcagccggtctcccttataagccagcttcagtgaaaaaaagggggcatcctcattcagcagcttaaaaaagattttatccccctcccacagattcagtgacagcacatcctccttcctcacccactccagcgtcccctcgttgcaggtaatcatctctccctcatatttgtccgctgtatacagacacatgtattctgtatcccagccctcagccttgaaggttaccaaccccctgaaccgccaggaggtaagggtgaggcctgtctcctccctcacttccctgagcaggcagtcctccggactctcgtccccttcaaaatgcccgcctactccaatccacttatccttattcacatcgttctttttgctgattctgtggagcatcagatatgccccctcattttctatatagcaaagcgttgtcagcctgcttttttgttccatatgcctgtcctcccgttagagtccgcccataccggcgatctaaaatacccgtcggagcagtttcgacgggtatcattataaacctattctccttacgcttcgatctttattcccacatccctattcttcaattgaatagttgggagcctccttggtaatatggatatcatgaggatggctctcctttaaggacgcagcggaaatctttacaaaccgggctgtctcctgaagggtcgtgatgtcctgggcaccgcagtatcccataccggagcgcaggccgcctaagagctggaatacggtatcctccaccattcccttataagccacgcgtccttccacgccttcgggaaccagcttctttgcatctgtctggaaatagcggtccttgcttccgttttccatggcagcgatggagcccatgccgcggtataccttatacttacgtccctggtacagctcaaaggtacccgggctctcatcacatccggcaaaaatgcttcccatcatacacacgctgccgcctgccgcaagggcctttgtcacatcgccggagtacttgattcctccgtccgcgataatgggtacgccgtactccctggcaacgctgtagcagttcatcactgccgtaacctgaggcacgccgatgcctgccaccacgcgggtggtacaaatggagccaggtccgatacctaccttgacggaatcagccccagcctcaatcagtgctctggtggcctctgccgtggcaacatttccggccactacctgaatgtccggatatgcgtccttaatcattttcacgcagcggattacattggcagaatggccatgggcggagtccagaaccaccacgtccacctttgcgtccaccagtgctcccacgcgttccagcacattggcagtgattcccacggcagcgccgcacagaagacgcccttgtgcgtcctttgcggacaatggatatttaatctgcttttcaatatccttgatggtaatgaggcctttcaaattaaaatcatcgtccacaattggcagcttctccacccttgcctttgccagaatggcctttgcttcctttaaggtaacgccctccctggcggtaaccaggttctttgtggtcatgcactccttaatgggacggtcaaaatcctcctcaaactttaaatcgcggttggtaatgatgcccaccagcttcttgccctctgtgatgggcacgccggatatgcggaattttgccatcaaatcgttagcatccttaagggtgtgctccggcgagaggaaaaacgggtctgtgataacaccattctcagaacgctttacccggtccacctcctctgcctgggcttcaatggacatatttttatggataataccgatacctccctgcctggccatagcgatggccatgcggtgctctgttaccgtatccatgccggcgctcatcagcgggatattcagtttaatcttcttggtcaaatgtgtggtcaggtctacctggttgggaatcacttctgaaaatgccggtaccagaagcacatcatcaaaggttatgccttcgccgataattgtacccattataaatttcctctctttctgcgtgtttggtttgatatgttttgccagaatattgatagtccgtgaactgtccgtttcttattagtatcttatactagcaaattttatctggcttgtcaaaccaaaacagagagaaatattcattgattttactaatagggttccatcagccattctaatatcctcccacggaaccgctccggggatatctccatcaaagagggcatctccgtcaaagaaggcatctccgccaaagacactacagccaggccgcctccaggatgactccgaagcggctgcacaggataccggcagttataatgacaaacatcactgctatctgtgtcagggttgtacaggccagatccatatccatggtaatcagacatggcaaatccatggcctgtatctgttcatatccatccaggtcctgtctccctgatttccaggacattggatgcatggggtattcccagccactgggccacctccggcccaacccgcgccgtatccccatccgtggtctgtttgccgcagagaatcagatcatactcccccatcctgcgctctttcatcccaagagaagattccatggcataaagatcatatggattcagctttgactgggctccgtcccgcttaagcactccggtcaccgggtccacctccacattggcggtatccggcacctgcttaacgcacacttcacatttcgtaaatccctctccttaaaaaatcggtacatgtatcacctgtttccaatacatgcaccgatatcataaatgaccgtaccctattacattttcgtcaattactccatgtctgcaagtaatttctcgatctttttcttattggcgtcatccagttcgcccaatggcttgcggggcagacctacatccaggccctgtgcctgtaatgtgtacttgcagatttcctgccagtggggaaccccgttgaccttatcatagaagaaataatcaatgtatggctaaatattgttctgggctgcgatggctgcatccacatcttttgcgaagcaggcattctggagtctgcggcactgttttggaagtacggccgggaagcctgacagccagccgtcttctccggctaagaggccttccatggcagcatagtcatgtccgtagaatacagtcaggtcatccttgcagtggtagttcagttcatgtaccctgttgggatcgccgtgagctgccttgatgcactgtatggtaccgtcatccaccagctcctttgctcgtactatcattataaaggataggttgaaaaatataacttttgctcttaaaaaagggcgcactaatacaaggtatcctacaaactgaaaatttcaaactgctgttggtatggattcagaagaaatcactccttctgatacgagcagtttcagggcttgttttacagctttggctttctgcttatcctgcattttctgcggcatatcagttttatataaatcgcatggattccatgtttctccagttgaaagcatctggtaaacagcagtcaggagcatccttgcgatggcgatttttgctctctttttacctcttcttttggcaatgcgttcgcatttgtttttgtagtaaggagtagtcgtggattttacggcagcatggacacattgcaccagtgctggtttgaggtagactccggcacgtgtaatccgaacagacttcttcttaccggcagattcattgttgccgggcgtcaggcccgcccagcagcataaccgctcggaagagttaaactgtgtcatatcagtaccaatctcggaaatgatggtaatggcggaagccctgtcaattccgggaatggtacagagcaaggaaatagcattttcataaggagcaaccaactcatccagtttggagtccagggaatcaatggactgctgcacaaaagcaagatgagaacgcaccatgagcatacgttccttttgggaaggggtcatctggtaaccttcaatggggttcgaccacggcattggctttcttctttaaggatttctgaagaaaagatttacacgtatcagggtcaaattcatcagaagtgatcaaataatcagtaatagcagatgcagatttgccaaacatatcggtaacaactgcatcaagagcaacattacagacggtaaaagcgttttggaaacggttcttttcgctgcgtttgcagcaggtcagcttaaagcggtagcgggtgtattcgcggaggatacggatgtccttacagggaataaaactgccggggacaaggccgagccggaaaagatcgccgatccatttggaatccttggtatcatccttgttgccttttacggctttaacccacttagggttggcaatggtgacattgatccggtcacaattcttaggttgcggactcgaagtaccacttatttgtgcttgaaagatatgacttacactgattagattgctgatttaatccctgaaagaaagccttcgactcacctcaccgtgctttgtagtgtagctcctgtaacaattataaacaaagtggtggaagacgcaccccctttttcatgactatttgtgccgccagcgtcagcggtggaatggatgatagaatgaaataatgcaatattaaatttttaatttatttttattactaatatacattcttcccttgtttatctcgttaatctttattcaatttacaaattgtcatctttattccgcactgatatactggtcataatctataatccagcgctgtattgtatgcgtaacagtgataagagtgcctgatatcaccggaattcacacaatccagtgcgcaccaacagaagcggaggattttgtatgaaactggaaatcaagtcaaagctatcccagtatctttccattgccaatatgtgttccaacggatatatcaaggaattggaactagtggttcatgaaaaagaggacatggaccggctgattgaattcatgttaagcggtgaaaacccgaaatagattagaatgtaatacgggccgccagggcagcctacattccactgtccccgacggcccgttctctcccggccggtcccatatgccgattgcattacatcacaagcttccgcggaaaggtcctgcgcatagctcctatcattctctcattgggttcaatcaacaccttaaaatggtccgtccccttctggtatatgagggcgtacaccttggcttcctttttgcccgacgaaaaatcctttaccttcatgccctgcttctcataatccttaagcacaaaggaatcagccggcgccacgatctggatgtcgtccttctcgcagtcaaatatcttctttctctttgcccttcccagaatgcggtccaccgaaagaccgccctctgcaaacagatattcaaactccacgctcaggttcaggaacacgaaataggtggccacacccgctatggtcatgacaattactccaaacacggtctgcagcgccgaaaggacggaaaatatacagaccacaatcatgagtatctttacaggaacggcatatgccggatcttttctcttcacaagccactccacatagttatcatcgttcataatgtctctccttttatcattttgcatattacacattatacaatactttatcccatttttccagtaatatcattcttaggccgaaggaaagagagcgcctgctccatatttgccaccgtcctgtgattgataaaatgttcaatcttttccaccagctccagttcatcctccgtatgattgagagtacagaaaaaatcctggagcacctggtgtctgtgcagcaggtatctgccctcctcgtaccccttttccgtgaccatgatggaaccgtacttcttaaaatcaatgtacccggcttttttcagattatctaacattttagaggcggatgagggcctcacgtgaaggctggcagccagggagctgacacggatgggttccccctcttcctccattctgcataccatctccagataatcctccatggacgaggtcatctcatcggaggcagagcgttcatatcctttcatggtatagaatccatctttatcagtaaccaaagtgtccctcctgtaatactataagagtaagaaaaagtttccctatcctaaatctattgcgaggtattgtaattatgaaagaatttctatgtttaaatgatataaaaccaggaaagagggcgcgggtaaaagagcttacttccataggcagcatccgcaggcgtcttctggatatcggtctggttgaaaatacggaggtagagtgccttgggcaaagccctctgggagacccctgcgcctacctgatccgcggcgctgtcatcgccatacgctcagaggactgccgcgggattctggtccagccctgcactggtttcaacgaacagaaggtaatggagggctgcaccagcctgtgaggtatctcccacaaaacatctgtcttaagaaacatcatctgattccggtcagatgcagaattgcctaatataaaatcaagaaaaaaggagtattaaaatgggtctgaccaaacaatccgtcggaatgggggctgtggattccggactggagataaaaaaacagacacctgatgataaaataatcgccatagcaggcaaccccaacgtaggtaaaagcacccttttcaacaatctcacggggatgaaccagcatacaggaaactggccgggaaaaaccgtgaccaatgcccagggctactgtaagacaagagaacacagctacgtgctggtagatatccccggcacctactccctcatggcccactccacggaggaggaagtggcccgcaacttcatctgctttggcggaagcgacgggattgtggtggtttgcgatgccacctgtctggagcgcaacctgaacctggtgcttcagaccatggaaatatcggaccgcgtcctggtatgtgtgaacctgatggacgaagccgcacgcaagaatattaccattgaccttaaaggtctgtcggaaaagctgggagtacccgtggccggcaccattgccagaaaaaagcaaagccttgaccagctgatgaaacagttggatgacctggtggaaggtacccaaacagcctccccctaccaggtggagtattcccccattattgaacaggccatcgccatggcagagcctgccgtaaagggcagggtggagggaaaggtcaattcccgctggctcaccttaaagcttctggacagcgacccgtccctaatgaaggaattaagggaatatctggatgaggacatactggaaatgcctgagataagccttgccctgtcacaggccagggagcatctggccaaatacggcattaccaatgaaatcctaaaggaccgcatcgtggctgccctggtggcatcggcagagaaaatatgccgtgatacggtccagttccacaaaaccggatacaatgaaggtgaccggaagctggataagattctgaccagccgtttcacaggttatcccgtcatgatcggaatgctggccgtggtattctggctgaccatcacaggcgccaattacccctcccagatgctggcggacgccctgttccgcctccaggaccagctcacaaaagccttcctggctgtgggcgctcccccatggcttcacggtctgctgattttgggagtctaccgggtcctggcctgggttgtctcggtgatgctgccgcccatggctattttctttcctctgtttaccctgctggaggactcgggttatcttcccaggattgcctataatctggataaaccctttaagagctgccatgcctgcggcaaacaggctttaaccatgtgtatgggattcggatgcaacgcagcgggcatcgtgggctgccgcatcattgattctcccagggagcggctcattgccatgataaccaacaactttgtgccctgcaacggaaggtttcccaccctcatcgccattatctccatgttttttgtgggcgtatccggaggtgcctttgactccatgctgtcagccctgctcctgaccctgttcattgtcctgggcgtatgcatgactttcgcggtctccaaagttctttccatgaccgtgttaaagggaatcccttcctccttcactctggagctgcctccttaccggcgtccgcagattggaaaggtgattgtccgttccatctttgaccggaccctgttcgttctgggaagggccattgcggtggccgcccctgccggccttttaatctggattatggcaaatgtgcagctggacggcatcaccctgttggcccacttttccggctttctggatccctttgcaaggcttcttggaatggacggcgtgattcttatggcatttatcctggggctgcctgccaatgagatcgtaattcccatcatcatcatggcctatatggcacagggaagccttttggagtttgacagcctggcgcagcttagggatttactggtgaataacggctggacctggattaccgctgtcagcaccatgctcttctccctgatgcactggccctgcaccaccactcttcttaccatccgcaaggaatcaggcagccttaaatggactgtcatgtccttcctggtgcctacggtctgcgcggtcgtactgtgctttgcctttgcaacagtggcccggatgtttgtataaggaagaactacccggcatgtacggcaggagagcaaaaaggatgggacagcagcacacatattcctgtgctgtgccccatccttattatgcttcgtcaatcaaataccgtatcctgcggattagtacattccgcccatgtcaggtgctgcggggcctgccggagccggctccttgatgttggcaacaactgtctcggttgtcagcagtgtggaagcaacgctggtcgcgttctgaagtgcgcttcttgtaacttttacgggatccaggatgcctgcttcaatcatatccacatactcttccttgtaagcgtcaaagccgtggcctacagaggactcttttaccttatttacaataacggatccttccagtcctgcgttggctacgatgtggaacagaggagcttccagtgcctttaagatgattctggcgccggtcttctcatcgccttccagtccttcaacaacgctctttacttcctcagctgcgtgtacataagcagaaccgccgcctgcgatgatgccttcctcaacagctgctcttgtagcgttcagagcatcttccatacgaagcttagcttccttcatctctgtctcggttgcagctccaacacggataacggctacgccgcctgccagcttagccagacgctcctgcagcttctccctgtcaaagtcagaggtggtttcctcaatctgcttgcgaatctgggatacccttgcggaaatggcatccttgtcgcccatgccgtcaacgatgatggtgttctctttctgaaccttaacggattttgcacgtcccagctgctccatggttgcatccttcaaatccagacccagttcctcggaaataacagtaccgcctgtcaggatagcgatatcctgcagcatctctttccttctgtcgccgtagccgggagcctttacagccactacgttgaatgtgcctctcagcttgtttacaatcagggtggtcagtgcttcgccttccacatcctcagcgatgatgagaagtcttgcgcccatcttaactacctgctccagcagaggaagcagatcctggatattggaaatcttcttatcggtaatcagcacgtatggatcgtctaagttagcttccatcttatccatatccgtgcacatataagcggacaggtaacctctgtcgaactgcataccttcaaccaggtcaagctctgtcttcattgtcttggattcttcaatggtgatgacgccgtccttggaaaccttctccatagcgtccgctaccatggttcctacttcatcgtcggaagcagagatggctgctacccttgcgatctgatccttgccgttgattggcttgctcatcttcttgatagcttccacagccgcgtctgtagccttcttcatgccctttctcaggacgattgggtttgcgccggctgccaggttcttcatgccttcgtttaccatggcctgagccagaacagttgctgtggtggtgccgtcgccggccacatcgttggtcttggaagcaacttccttgatcagctgcgcgcccatgttctcatatggatcctgcagctcgatttcctttgcaatggtaacgccgtcgtttgtaattaacggagcgccaaaggacttatccaggacaacgttgcgtcccttcggtccaagtgtaacacgcactgtatctgccaactggttaacgcctgcttccagcgccttgcgggcttctacgccatacttaatctgctttgccatctttcatcaacctccaatattctatgttctactgttttatttattattcaacaactgccaggatatcgttttgctttacgataacgtacttctcatcctcaatctctacttctgttcctgagtacttggaatagattaccttgtcgccggccttaacctgcatggttacttccttgccgtcaataactccgcctggtcccactgcaataacctctgcctgctgtggcttctccttggcagcccccggaaggacgatgccggacttcgttgtctcttctgcaactaactgctttaacactaccttgtcaaacaatggtactaacttcatgattaaattcctccttgcgcgatattctgatttttctttcttgttttcatttccttactgctttcttttgctcacatgatatgttatatcaccagttattagcactgtcaagagttgagtgctaatttcttttaaatttattgtttttttacaattagctgtttctttttttttccattcgtattacaataataacaataaggcataatatgacccagaggggagcttttatgcatcaccattacaagaaaggggtttttggcatggcaaagaaaggtttgggtaaattcgtagcatttgcagcagtaaccggtgctgtggctgccggcgtttcctacgtacttcagtataagacataccacagggagctggaaaaggatttccgggaattcgaggatggcggcgaggacagaaccgacgaggacggcacggagcgcaccattgatgcacgcagcctggaccgcaattacatctctctttcctccagcaaggacgaattcaaggtagctgccaaagatatggcccaggcaacgaagaatgtccttaaggatgccggaagcctgttgtcggacactgcccacgaggctgtttccgctgccgtggacacggctcagattgcactgcagaccgtgaagacaaagaaagcggatttcatggatgagcactccagggataaggctgatgattctgatttgttcgaagatgagggcttcctggacgacgactatgtggacgaggacgacctctatgattaccgccgtatggacggcagttcctcctatgattctggagatcttacagaagatgattacgatgacagcagtgaggagcctgagaaacaggaagcaggcccctctaccgccatcatcgaggaagatacactggaataacacagcggcttaataccaggcgaactatccaaaacagtgtaaaaagcggaaaggcttggggaacataaggatttcgtgttcccggagcctttctgctttttatattttattctgtatttcattcatccttttattcctcccaggccagaaggttaatccacacaggctgtccggccagcttctcgtccatgatataggcgtggctgtcatcctcctgggacatgagctgatactccccacgctcctctatatgaatccaacggtcatccagctgtaccgtaccgtcctttacttccagcttccaggtggatgtctctccctcctggttcagggtggtataggtcacctccccctccagcctgtcaccggtaaatctcccggtcttgcacacatccctggcttccccctgggggctgttctcataatagcagtatcctgcatggccatcgccctccatttttccatccttccacaatccctgggagtaatcatacctgggggcatccagttcaaccacctgaagggccgtacaatctccttccggtctgccggccttaaaggcgccgtaatacagtgtcttaggcatggtgagcaccagccccttaccctctatggacaggctgaatgactggccgtcatagagataccgcgttccgtccatgacctcataaaacagcgtaagaagctcctcctcaccgcggtccatgacccgcgcggcagactccagatcctgcgcctctaatgcctccatgatttcgtccagaaccgccttctgggattctgtcacgtccggaagtatctctgcgtcttcccctccgggccgggccgggttctcccctgggccctccgccgcctgtacagctcccgcggtatccggataagcgtcagccttgctcacgggatttccattttcatcctccggacctgcctgttcatacatccggccataggcgctgcccgtccggccatgggcctggtcataggccctgtcatgctgcccccaaaaggcgctgattcccagtaccaccgcaaacgcggcggcagcagccatatctgtccgtgtgtcattcctgcccttcatggtataccattcctttcatgttgacctgctcattatcttcgctatcttatcttctgcagccaataaaacatattttccgtcagacacaccctttatgcctttagcatcccaacagcgtcttagaatgtccaggcctttgccagaagtttagtgcctttccggatttcctcctcgctgagacttgcatatcccagcataacggttgcccccagcaggttcgcctccggctgtatgaaacatcccgatattccatagaccttcactcccagggcagccgcacgggccaccaggcgttcctccgcctccccctgcctgtgggtcagcagcacatgcactcccgcatattctcccctgattaagaaccggtcctccagttccttaagcccggtcatcagcgcatcatgttttcccttatacagggccctcatgcggtttaaatgtctctcataatatccctgggttataaactgatagagaatgttctggtcaatcctggacaccgtggagagatagaaaccggccctttcccggtatgcctccagcaaatgctccggcagcaccatgaagcccacacggatagccggagctatagatttggaaaatgttcccatataaatcacacggcctccccggtccatgccctgcagcgcgggaatgggtttccccttatatcggaattcactgtcatagtcatcttcaatcagatacctgtccgcaccgctgtaggcccaggccagcagctcctgccgccgcttcacaggcatgacgatccctgtgggatactgatgggaaggcatcacatatgccacatccgcgctgctacaggcaaggcgctccacatccattccgtaccggtccatatccacgggaatcacagggtatccctcccccctaagcactctgtatgcctgcttgtatgtggggttttccatggcaattttccttccgtttcccaaaatctggggcagaagcatcagcaggtactcgcttcccgcgccaatgagaatctgttccggcctgcagtccacccccctggcagaatggaggtaagctcctatggcagttctgagagctctctctccctgagggtcccctgccgcaaacatctccttgttatcatctaccagtgtattcctgctgattttcctccacgtattaaagggaaagctgtccaaatcaattcctctgggagaaaaatccacctcgtaacggtctttcccggtatctcccggctctacaaaggagcctccgcccttttgccgtacctccaccagttcttctatcttacagacaaaatagcctttgcatggcagtgcctcgatatatccttcggacagcagctggtcataggccatctgggtggtactgcggctcagcctcaggttcctggccagtatgcgggtggagggcagacggcttcccgcctccagctttccccggcggatttcattttttatgtactggtaaatctgttcatagagaggactgtccgactggctgtcaaaaggtattatcagttccattttccgccccttcctgccgcaagctggcatcaccattcatatttgaaacaaacattttaatcataccagtcccatagggatatgtcaatattttttcacatttgttcagttaactaatactcttttcgcaaaatacaaagattatttcacgataatatactcttttttctgatttgtacattgtaatcatcgcggtatggaattataataaaagtagaaagagaacccaataaaatcagttgagaaaggatggatggacatgagcgaacagactctgaatatgttaaagaaactatctcccaaaaaagaacattcactggctttccgctgtttcataggagctgcttccattgtgctgctgaccgtgtctgtgcacatcctggtattcacagccatagagagacacagcgcggtaagggactttccggaatggtaccagctccttgcagccctgtctgtggatgcgctttacccgctgttcatagtgtccctggtatccatcatcaagcgggtattccgcataccggtgcaccgtctggagcgcaaggttttcaagttcacctatctctgcctcggccttatcgcagcctccagaatcagcatgtatgtggggctctatgtattcttcatggctttgtttgcagcaggcacggccatttatattatcatcggcatacgttttctctacgagcttttcaagttccactttatatcctgccggtattattaaaggacatatgataaggtgtttcatcacagtgtgatgcaggagccgcaggcataataaatgccggggacctttttcatcaggtacccggcattttctttatctcattgatgattgtcctgttttatctgttctgttcccttatgttttatcctatttaggaagcttgaatgagctctttaaggatacaatccggttaaacaccggattctcaggcgtgctgtccttgcagtccacacagaagaatccgttgcgcacgaactgatagctgtcataggcttttccctctgccagggccggctccacgtagcactcctttaacacaaccagggaatggggatttaaattcaggctgccgtcctcattcagcttgcccttctcctcgtccacaatgttctcatacaggcggcattccacctgcctcgcggtgggaacagccacccagtggatggttccctttactttgcgtccctcaaaaccggaaccgctcttcgtctccgggtcataggtaccgtgaaccactgtaatattgccgtcggcatccttctcacatcctgtacatttcacgaaatatgctcccatcaggcgaacctcattgccggggaacatgcggaaatactttttcggaggctcttccatgaaatcctcccgctcaatataaagctcccgcccaaatggaaccttcctgtctcccagccccggattctccagattattgggaacatccagcatctccgcctggccttccggataattgtcaatgaccagcttcaccggattcagaatagccatcatacgcggcttcttaagctttaagtcctcgcggatacagtattccagcatggcgtagtccacggagctgttggccttggatacgccgaccatctccacgaacatcttgatggcctccggtgtatatccccttcttctcagagccgcgatggacaccagacgcgggtcgtcccagccgtccacgattttatcctccaccagcttcttgatatagcgtttgccggttatcacattggtcagatacagtttggcaaactcaatctggcggggcggattctcaaactcacactcctttaccacccagtcatagagcggcctgtggtcctcaaattccagggtgcagatggaatgggtgatgtgttcaatggcatcctcaatgggatgggcgaaatcatacatgggataaatgcaccacttatcgcctgtgttgtggtgggacatgcgggcaacacggtagataaccgggtccctcatgttgatattaggggaagccatatcgattttggctctcagcaccttctccccgtcccggtactttccttccttcatctcctcaaacagggcaagattctcctccacggaacggttcctgtaaggactctccttgccgggtgtggtaaaatctcccctgtactccctgatctggtccgctgtcaggtcacagacaaaggcctttcccttcttaatcaggaacacggcgcactggtacatctggtcaaaataattagacgcaaagaaaagcctgtcctcaaaatcagcgcccagccacttcacgtcatccatgatggactccacgaattcagtcttttcctttgtggggtttgtatcgtcaaaacgcaggttgaacttgccgccgtacttctgtgccaggccgtagttcagtaagatggacttggcatgtccgatatgcaaataaccgttgggctccggcggaaaacgggtctggacatggttataaacgccctctgccaggtccttgtcaatctcctgttctatgaaattcctggagaccacctccttttcctcagtttccattacggtatccctgtctgccataattgttcctccgttacgttgctattgtggtaaatataattattaatcataacacaattcttttatcagtgaaaggggaaaatacgttttgcagtggaaatcttatcccatgtctgctatactatattaatgtgctaaattatgtacaattatgaggagatttaccaaaccatgaaaaaagcagcaaaattcgctctgataaagaccatccccatatttctgggctacatattcttaggaatcgcctttggactcctgttacagaaatccggtttaagtgtgttctgggcctttctcatcagtacccttgtctatgcgggttccatgcagtttgctctggtgggcattctcaccggcggcttaagctatgtgaccacagctgtcatgaccctgtttatcaacagccgccatgccttctacggactcaccttcattgagcgtttcaaggaaatgagaaaagcctatccttacatggtattttccctgacggatgaaacttattccctgttatgttccatggcacgtccgtccgcatttacggacaaagaatggaaggcagccactttctttacagcgttttttgaccagtgctactggatagccgggtcggtgcttggcgcccttatgggtgagctgattacctttgacaccacaggtattgattttgccatgaccgccctgttcgtggtcatatgtgtggaccagtggaaggcggcaaagacccacataccggctgtcaccggttttatatgcggcgcactgtttctggtgctcatccgctcttccaactttatccttcctgccctggcagctgccgtagccatgctgctgttcctgcgcaggaccgtggaacagaaaatggaggaggattaaaccatgacccactcaaattatgtactaattaccatactgatttgcgctctgtgcacccagattacccggtggcttcccttcctcctcttcggcggtaaaaaggaagtccccgggctggtccgctacctggggaccagcctcccggccgccatcatggccgtgctggtggtctactgcctgaagggaatcacacctttagcctgcccctatggcctgccggagctcatatccgttgccgtggtggtggggctccacctctggaagggcaatacccttgccagcatcgcgctgggaacggtatgctacatgctgcttgtgcagatggtattctgatgttgctctgaccatgttctggctatactcagccaatattctggccgtatcctgtcaatattctggccgaactccaggggcggcctccggcagtttgaatatctgcatcgcaataaagtcccatacaaaaagcctgttcacgccgcatgatggtgtgaacaggcttttctatatagattttccccacggccttttacttatacctttccagctgcattccccatatcaccgtcatgcatccgtcccttccagctccctgccgcagacgccgttcccttcattcagaaccggcctgataattccatccttcaccaggccgataaataccggcaccagctccggatcaaactgtgttcccgcgccccgttccagctcattgaccgcgaattccaccgacatgctgggcttatagctgcgcttggataccatggcgtcaaaggaatctgcaatgcacaggattctggccgccagaggaatatccttccctgcgatgcgcctggggtatccccttccgtcataccgctcatggtgtcccaggacagcgggaatcacataatccatggagggaagatggcgtatgatttccacggatgcctccacgtggcgcttcatggtgctgtactcctcgtccgtcagtttgccggttttgttcagaatattttccggtatcccgattttcccgatatcgtgaagcagggctgactccttaagaatctcctggtactcctcgctggttttcagggcctgccccatggcatgggcataataagccacattcttggaatgctggaatgtatagtggtcttttgcgtcgatagcagccgtcagggcgtagatggttggagcatattcggaatacatgcttcggtgcttctttgccagtccctcatccgtatccctcacaccgatgattccgtctgagtatacccggattccgttctttccggaacgcttcacatggtataccgcgcagtccgcattggatatgagctcattcatggacgctgccgcgtacggagcagcgcagattccgcagctgacagtcagcggctttaagtaagtatccgtacagtccagattcatgttctgaatctgccgtgaaatattctcagccagattctgcgctgaatagatatcatagtcaggcaggataacggcaaattccttgccgctgtaacgtccgcagtaaccgttatcccccacggtcccctgtatgatacgcgcaatatgcaccagtgccttatctccctcatgattgccgtaaagctggttgtacagcttaaaatcatccacgttgaagatgacaagggccagggaagtgcgcttgcattttacgtaattttcctccagtgtctcgcagaaatatttccggttcaaaagtccggtaagctcatctgtcctggcttcctcatatgccttttcgtagagcctggagttctttaccgcaatggagctgacggattcaatggagttaaggaatatgatgtcctcctcggaataccccccggcacgcatctttccccgcttctccttgccccccataagcaccagtccggccaggtcgtccccgcccttaagaggcaggatacactcaatcttaaggacctccatctggtatttttcttcctcccacatggacttgtattccacggtccttcggaaatccttaagcagcagacaggagtcatggcttttaagccagttgatgagcggcgcgctgcctgccagagaaaaattcttgtcatccaggggactgctgctgaacaccgcaggataatttccctgtgaatccttgatgcaaatataaattttccttgtgtgcagggtacttcctatgacgttcaccagggcattgaggatttccgtcagtctgagtgactgggacacaatggccgtgtattcgctgagccgttctgtctggctcatctcttccttaatgaaaatccggtcaaaaaatcccttggccacaatgtaaatcaacagggtgaccatcatggtcatagtagccacaatcataacgctgaagggcgccagcattggcacatccctgcggatgatgccgtccagagtctgagccacattataaaaggccagggcgcttactgccatggcaatgatatagcagttgcctctggataccagcagtgtcatgcggaacacgtgcctggaataaagggtatagaacatcacccctgcattcagaatccctgacaggatatctatggggaaaccattgaacagcggcacagccatatttcccgcaaaaagcagaaatatgcctaaaagcagcggaaccactttggccttaagggccctgtttttccggctgctccatatgatggcggctgtatgtatgattaccaggaagcagagtccgtacataatgctggcacgccagtccatatgatagacaaacacggcgctggccccgttccactcgatggcgggcggctggaccaggcttcctgtccatatgttatagagattcaccagaaggataagcaccagccacattttgtgggagcctttggccttatggccgcagaaatccctgatgaagcagaaaaacgcacatggcaccaggctgattcctgccagcgaaagatggaaccacagctcataggacggccaggcccggagcctcatcaaaagagagccgccggtccacagaatcatggcgcccagcacagcgataaaatcacgaatcagccgtgatttcttagccgacataaaagccagcataagaaaggtatagaaatataaagctgttatggatataaaaacatagcttctcatacaatcagtgtctcctagtatctcctgtgcccgtcaaaagctgcctgcatctttatcatttcctgaatatcatggatggatgggttgatatgcctcagtgtctttccggtcttttcccggtaggatgcaaaggtgccgcaccgaagaatggttatctccagcgggtccatgcccagtatccgtttcaaatcatggtaatcctggtccacgtatttaaaataaatggtcaggtgttccttcagaagttcccggctgacggcccggttcaccacacagccgggcgccagctccacgtacatatggagatagggccttcccctgtcctcggtaaactccttcagagccgcccagtccgtcacatcaattcccgaaaggctgataacattcttaatggaattttccgaaatccttgtaaacccggcaatatcaataatatccggcacccggtcaatgtactcaaacctgggaatccgcgtctcatcctccttgctggcaagtcccagacagcggtagacatcccccacccggtaccgggcaaatgccccgcctttcaacacagtaaggacaatttcatatacttctccggctgccacctcatccatacatatggccctgggaacataggagggatcatccagatttttgtacatttccgtttccggtatgaattcataaaagcatgcatccgggaaaaagtaaagtccgttgcggttccatgtctctgtcccgataaaactgggttctgtccccgcaaacacttccaccggcctgataccccacaactcctccaggtcatctttatagcagcggttatctgttccagcgcacaaaaatcccttcagtttgaacaggtccttaggcatcagtccccgtccttccttctcacactgttttttcgccttaagataccgcagtgtcatggaaggaggcatggtaaacatttttttcaggaaggatccgcccttcttaccgccctcagacaggctggcaatgctcatactcacataataagccacgctgcccatgccgaagaagaaatcaatcccctttcccagccccatcttaaatcccttcttattccgctcggaaaaggtcatattcacggcctcgtccaccggaggaaggaactctatgtggagttcgtccgacaatcccagtggaatcaggccagtgatatagggcaaaggcgccagtccatacaaaaatgtatcgccgattccgatgtcaaagcttcccctgcccttgctggtagccatcatcaggcaggtcaggatattattcttgtaggttttcagcataccgctggtgtagggcgccaccttgataggatgctttccgccctcccatgtggtctgaatccatatgatcggtttatcaggaagcatgtcctcctttttcaaaagaaggacatccgcataatcttcgtaggtggtcagcggcaccatggaccggaactcatctatgctctccggcctcctatcctttagaatcttctttccaagaggacttgcgcaccagagtccaatctgctcctccaaaagccttctctggattttcatataggattccaggtccaggtccagaaaaccgcagtattcctgccatatcctgtcatattcctgattggtcagcttttcctcaaatgtcattccagttcaccgccttttccacagtctgggtagtaaaaatggtacttgttcctggtaatccctgtagtcgcaaaattcctctacaaatataagcctgtcctgataccaggcatacagaaggttcagaaaagaaagacacagaccgagcatcacccggttcggattccctgtggacaggcccatacagaaaaaacagccaaaaaaccaccatatgcccggatgacggcaccagccatacatacctgagcggcagaccttgtgccggtccgcctcctggcaataagtactgtcaaagggcagcgcaaaatacagcgtataaatcagcatcgccagaaaaaacgcgcccggaaggagccagactgactgtcccttaacccctgaggaaacacaagaatacaccattcttcctcccaccacagccagcagcaggttgcctgccgcaaaaagcggggcgaagccattttttttcaaaaaaacccgattccagtcatataggaaaaacatcccaaaagcccctaatccaaagccccagtccaacatctatatcccccctgcccaatatataaaagggagcccgctctctttatgactccagacccccaaccatatccaaaataaatcctcccatctgttctcaaccttgggaaattatgtaaagtaccatgtaaatattaactatttgccgaatagtataaattctatcataaatatgtcgaaaaaggaagggatttacccggatattatttattctttcttataaataattaggttattttgtaatcatattaaatttattgttttttaggtacaattatcctcccctcgcctgtttaaggatactccggccgggaagattattaatccagatatttacaagggtacaaagaattgagccgtcaattctcatgtggccatggcagaaaaaaagggacagtccaggctatcccttaaaatccatatccgttgtaaattccctgccgcaatatgggcaagtgacacgagccactggctcctctgccccgtttacagtttcatacgtattcaccaatgcggaacaaaaagaaaaaagcccggtaaataccaggctatccacaagctgctgacgggaatcggacccgtgacctccgcactaccaatgcgacgctctaccgactgagccacagcagcttattctgttttggtacgctctcgcggaccttgtatatattatcatgaccacatggttttgtcaacaataattttcaattttttcttccattctatccccgctcattcaaaccgctgccccctcaagcctcccaggcaattgtgagcagcggtatgtgagccggctttctcaaagcatctgaaaataagaatcctaaaatcaatcctattccaaatatcagaaaatcccgtcatacccttcccgcagcgtatcacaggaacgccccagcttctccagctcctccggtgtcagggacagcggcaggactctctgtactccgttctggtttatgatgcagggaacgcctgcaaacacgtccatctggccgtactctccccgcagcatggcggatacggtaagtacgctgtgctcatcccccaggatggccttggttattctggtaagggccattccaataccataataggtggcattcttggcctctatgattttgtaggcggcagtgcggacctcctcctcaatgtcatcaaaccgctgcctgcacaacgcttccccgttttccccgcacagctccagaatgggcttggtggccagcagcgcctggctccacggcacgaactcgctgtccccatgctctcccatgacataggcgtggacatttctcgggtccgccttcagataatcgcctaacaggtacctgagtctggctgtgtccagggctgttcctgttcccatcacccgtcttggattaaagcccgacagggtacaggttatcctggtcatgatgtcaaccggattggttgccaccagaaacaggccattgaatcccgatgaggtaaccggctcaatgatggatcggaacacctcggcattccttttcagaaggtccagacgggtttcaccctgtttctgcgccacgccggcacagatgaccacgatatccgcatccctgcagtcatcgtactcccctgcgtatattgtcatgctggaattggcaaatgccaggccatggtttaaatccattgcctccccctcggccctcttcttgttcacatcaatgagcaccagctcatcgcacaccgactgattcagaagacagtaggcatagctcatgcccaccattccagttcctacgattaccacttttctcttatctgctctcatgttctgctcctttcctgccgtcccggtctgctgttcatatccttagtataactggaaaacccgcgtcttattccggcaggatttacagctggtctttccgggacctgcggcggtttttgcggttatctggccagtttcttttccatgagctcactgttgctgctgtaagccgccgcattttcacgggaaatcactccgtcacggtatagtttaataaggctgttatccatggataccataccttcctcctgggaggtggcaatgactccgtctatctggtgaatcttggattcacgtatcatattgcggattgcattgtttaaaaacatgatttcaaatgccggctgcaccccgccgtccacagtgggtatgagctgctgggatatgaccgcatccagcaccatggccagctgggtccttatctgctgctgctgatttggcggaaatgcatcaatgacacggtcgatggtattggccgcccccacggtgtgaagggtggagagaatcagatggcctgtctccgctgctgtcatggctatgctgatagtctcataatctctcatttctcctaacaggatgacatccggcgcctggcgcagggatgccctcaggccagtaacgtagctgtccgtatccgtaacaatctctctctgggtcaccacgctctgtttatgcctgtgcaggtattcaatggggtcctccagtgtgatgacatgggcatttctggtgctgttgatttcatcaataatacaagccagggtcgtgcttttgccgctgcctgccggtccggtcaccagtaccattcccttggtaagcctggatacgccgatgatactgtccggcagatgaagctgtccggcatccggcagttcaaaacgcaccacgcggatgattcccgccaaggatcctctctggcggaacacactggccctgaaacgcgacaccccagggatggcaaaggagaaatcatcatctccgtgggactggaccttatccatgccccggttctttgccaggccgtatatctcggtaatcatcttatccatctcgtcgggcatgatccggttatcaccctgatagataatccggccgccaatcttataggagaagggcatgcctggaataagaaatatgtcagccgcattctgctccacggccgatgtaagcaattccatcacattcatctgttttgctccttttgcctctgttttattcctggaatggggctgctccgccccacacaggcattgaattatctatttcatactcatcactggcatatacataccatgattttatatcgtaatgtttttcaccgcacatgagaaccagctcaatgcgcagggactgtcccctgtccatggggatgtccgtggaaataagaccgctctccctgtcataaagctctcccagcctgtccttgatatccaggctgcactgggtggaatccttttcctcccccatttcctctgtcaggacctggtccacttccttaagccactgctgccccctgctgtccgcctcataatatgcccggaccgcctccccgtttcgcccggccagctttaaatcgccctgggcgctgcttaaggacagcagtccaaaggtagccatgcacagaacgatgaaaataagaatcagggacgacgcccctatattcactttattcctggatgcctctcctgccatctgcctttcctttccgtgtttcattttcccgaaccttgccggcggctgaatattcctgaatcttaagccctgccgccggctgcatgtaaaactgcgcgcagcggggcctgcatgctcttagggctgcgcataggtctctgtctgcaaacggtacagcagctttcccttgtcagatcctctggcatagcgcatgataagtatgtccgcccgcttcattttatccacagttccggtgtatatgacgcccaaaaaggacggttcattgtcaggttcggtctcctcccagctgttgttccagtacatggtatgtatacctacgtagccttcactctgtaccagctcctggttccattcagcctgttcccggtttttcccgtcagcatctgccaggtgttcccatatattacggtccggaagcatctccggccacctaagagactgccccgccttcagctcttctgccaggctctgcgcctttaacaccgcctgatttatgtcccgggcatccctgcttatgttgtcagccttcacgaacaccagaacacagatactggcgcagatgataaagaaacccaccaccaccagcatttccattaaaaatggccctgaaccggacccgcttttcctattcatccgtctcaagtcctccgctccgcagggcaagctccaggcttccgccgccctctcccacggtctctatatgcagcagcctgcctttcctggaaagcttcaggccccggcattccagaatctccagaccgtccgcaagccccaaaccgctggatgtgtctgtgaacaattcccggatgctcccatcgtcccagtaaatccatgtgacgtattctgattccccgatttcctgtttcatctccagcacctgggttccatccacatccaccacatttaccatcccggcccggtcaccctggcgcaccttgttggcaatgtagctcagagctgtgctgcctgtataattggcgtcgctgcgcacattgatattttcatatacccggctgccaatcagcactgtgaaaagagcacacagcacaaataccagaaataacagcatggtaaaaagcacgctaacggcatttcccttcttgtctgtcttccgattcataactgtatgccccctactcgtctatgggtatgatggtgatttccggcatcacattggatgcaaaaccatcgtaaaacacattgtatttcttcctgttaatctggatcgcataattctcctccagatatcccacgctgggaggataacggccctcaatggcatagcactggaccgaagcccttgccactgccttcctgagagtctcctcctcccttgcgcctgtcctccctgaaaaattcagcacagccgccgcaaataccgccaccacggccgccatggctgccagggacagaatgtaacccagcgcctggttcttctcttttttctgagacttaaccttcatctgctgcctcctaactgttatccgatagcggacaatacgcccaccagtggaagcatgacggacagaaggacaagtcccactgatatggccagaactgccactatagtcggttcaaacctggcaatcatatcgtcgatggcggtatcggccatctcctcataatcctgggatatctcgtccataacgctgtccagatggccgcttctggttcctactttaatcatctgcacataaaaaccggaaaacaggccggtatccttcatggcctggtaatagctctcacccgtctgaagctgctccgagcattttccgatgcggaccgccacgctttcgttctcaaccagctcctttgccaggtccatgcccttttccagctccataccgctctttaaggtcagggccagtactgaggtaaaccggcggttagccactgccagggcaatcttgctgcggcccttcacgaaactcacaaaacgctccaccaaagcaaaacgtttgccgaatttggaggctgtccagatcccgcataacaccagggccagcacagcccccacaataagggcgccgccgcttaaccagcctcccagcctcatggccgaggctgccacaggaggcatccgcgcccccagctgctcatataccttgttgaacacaggcatgaccttggaaaacagcacaaagaggaccaccaaaagcattaccaccatcatcacaggatatgtgaccgcattctttatggcccgcaggagccggtattccttctcataataatcggacagcgatttcatcatctggtccatggttcctgtctgctggcccagcttggccatacgcaccacataagccgggaaaacgcccgtatcctccataaccttgaagaagggggcccccagctccacgccctctgccatgtacaaaagcatatccttctcgctctgcgcggccgcgtcctcagccataatggccagcccttcctccagcggaacagccgcttccaacagcagggatatctgcagacagaaggccgacagctcctcataggaataccggtaataagcctctccctttttcgccatctcttttgcctccccttaatagctgtattttgccctgtagttagagccgtttccaatgtactgcatgatttcctggctctgtccgctggaggacgcaaacgtggggtccatcagcttccagctgttgccatcaaaatagatgatattatcaacccatccctggccttccagatatacattaatccacgcgtgatacagattccccgtataacccactaccagcttggtgggaatgtcctgggacctgagcatggctgtcatgagagccgcatagtcaaaacagataccctttttctgcgccaaaaccacatccacattgggcagatagccggactggaccgaacttgccttggccgtatcataggtaacgttgttgattacataattataaacatttgacaccacgcccagctggtccgttgcgctggcagccacggacgcgcctgtctgcaccgcggcgctggccgcattaaaattcacatactggttggggtaaaggaagggtccgaactgattggttatgctggcatttacattctggctgaacgcctgggaatactggtttccctggatattttcaaacaccttcaccgaatagctgccgctgccctcagacagagggaacacctcgtatacgccgctgctgcttaaatcatatgtatatgtctcggaaccgctttttgtaatctgaaccttaatcttgccaacgctacccgtatactttaccatgatatagccctctgacacattggatgcatccagagtggccttctcgttgctgtatgcagtgaccccggaagcaatgggagtcagtacatggcttccggcaggctttgtgtaagccagggccgtcgccggtgcctggatgctgctgacggcaataaaagccgctgccgctgccgccgcaaactttccaacaggtttatatgctgtcttcataacattatcactcctttatctctaaaaggactacatctccaggcgctgccttacaatctcataggccagcacgcctgccgcaactgatgcgttcagggaatcaatatctcccttcatgggaatggaagcaaccatatcgcagtgctcgcgcacaagctttccgaccccctccccttcatttcccaccacaagtccgatggaacctttcaggttcatcttatacataagttctccgcccatgtcggcacagacaaaccacataccctttttcttcaaatcttccatggtagccgtcagatttgtgacctttgccaccggcgtgtagtttaaggctcctgccgatgtctttgccacggtggctgtcagccccgcggcgcggcgtttgggaataatgacgccatgggcccctgccaggttggccgtacggatgatggctcccagattgtggggatcctctatgccgtccagcagtatgaggaagggcggctctcccttttcctctgccgccttcagcatatcttccacctcggcgtactcataggccgcagcataggcaataacaccctgatgctttcctgtctcggatatctggtccagcctctcccttggcacgtagttaatgatggtatcgtatttcctggcttccctcaggatggtgcgcaccggaccgtcctgacagccgtccaggacgaacagcttgtcgatggtcctgccggaccggaatgcctccagcacggcattgcgcccctctatggtcagttcttcgtatctcatgtcttatctccttccgggtccggcatcctgcccagcttctcaagtccctggcttatcagatataccagcctgttgtattcctgtctcaggaacagccaccctaccagggcttccatccctgtggccatgcggtaatcaatgacagacgcgttcttggctgatgtggctgattttgcgttgcgtccccgcttgaacacagcgtgctcctcccgggtaagcatgtcctcaatggcctttatgagctctgcctgcgtaccggcctttacaagctccgagctctgcctgtgcattttatttacctgcatgcttccccggtttatcaccttggtgcgtatgatgacctcatacaccgaatctccaatataggccagaaccagtggcgagtaagaattctcatccactggttcaagcctcatgcactgtctataatatgtgagaaattcctgaatggttacgctctcttccactttacgccctctctggtatcctctaatataattcccatatccagaagctttccgcggatttcatccgccagcgcaaagttcttctctttcctggcctgctgtctggcttcaatcatctcttcgatctcgctgtccagcacttcttccttcttctccgtgataatgcccagtacatcgcaaagttcttctatcattgtctccatataagatacgaattccctggtactggattcatctgccgtggtattagccagcttcaccagttcaaatatggctgaaatggcgtccgcggtgttgaagtcatcgtccatggcctcctcgtacttgccccgaagcttatctgcctcttccatatttccctgctccccgactgtcctggggccgtctgatgcctttgcctccaggtcccttaacttctccacacaggtcagtatacgctccagaccattcttggaagcctccatcaggtctgcgctgaagttaaggggactgcggtaatgggcgctgagcatgaagaaacgcagcacctgcaagtcgtatttttcactgatttcccttactgtaaagaaattccccagggatttggacattttcttattgtcaatattcaggaacccgttgtgcatccagtatgttgcaaagttcttgtcgttggcgcactcactctgggcaatctcgttctcatgatgtgggaatatcaaatcctcgccgccggcgtgaatatcaatctgctcgcccaggtagcgtttggacataacggagcactcaatatgccagcccggacgtccgtcgcaccacggcgactcccagaaaggttctccttccttcttaggcttccagagcacgaaatcattggggtcttccttgccctcctcgccggtgaccttgatttcacggaacccggactgaagctcatccaggttcttatgggacagctttccgtattccttaaaagaaccggtcctgaagtacacggtcccgtcccctgccacataggcgtgatttttgtcgataagggtctgtatcatctccagcatgccgcagatttcctgggttgcctggggatggacggtagcaggctttacattcatggctgccatgtcctttttgcactcctcaatgtaccggcgtgacactgtatccgcgtccacaccctcctcgattgcctttttgatgattttgtcatccacatccgtgaagttggacacgtagcgcacgtcgtaccccttatactcaaaatacctgcgaaccgtgtcaaatacaatcatgggcctggcgtttcctatatggatgaaattatacaccgtggggccgcagacgtacatcttgacctctcccggggtcaggggaacaaattcctcttttcttctgctcagtgtgttaaatatcttcatactcttattctcctcaaatgaatctcctgcggcatgtctggagcatgccaggtcagctgtgtcagaatgtgttttatcctgttttattcttcattcgcccggctgcagccagggcagcctccacagccgccttccattatcttactatcatagcagtaatctgctgtttccgtcaataaggtaattgcctgagaagagattccttccccggttcccgtaaatccaagtccttcctctgtagtggccttgacgcttaccctggacacatccaggcggagggcgtctgctatgttagccgccatccggggcctgtatggggccagcttgggacgctgggctatgatggtggcgtctatattctcaaccacgtagcctttcccgtccagaagttctcctaccttccttaacagttctatgctggaaatacctttatatgccgggtccgtgtccgggaaatgctgtccgatgtctcccagggcagcagcccccaacagggcatccatcaccgcgtggaccagaacatccgcgtcggaatggcccagaaggcccttttcatatgggatattgacgccgcctaagattagatcgcggccttgtactaatttgtgaacatcgtatccttgtccgattctcatagtgtctccttccatgttcatcgcgataccgttacccccgccatgcacaccgtgattatgttactccgccatgtgcaccgtgattacattactccgccatgcacaccgtgattgcgctgcgctccatcacggtgtcgggcttcgccctataaaataagccataaggaaatcttcttttgtgcgagcacaacgaagatttccttctgtcttattttgcatggctcattgcctgcgtcatatcatcatccttaccttcctggctatgcagctggcttgtatgtctgtctggaagccgcagctctcgccgtctgcatggacgggcagcgctgcttctgtgtggatggatacttccctgcattcgtaggttctgacacctttgggccgccgccttcctatgagggctgacagcagaacgggtatcagctttatcctggtgctgtggctcatgacgcagatgtttaattttccgtcgcttccgtctgccctgggggcaaagaggaagccgccgccctctgagggctgtatgtgacaggatatgaaaagaatgttgttgaactctaccttttttatcccgtccaataaaatatatcctttgctggatttacatttaaaaaactggtgtatgcctatgagtatataagaaagtttccccataccgaaacgatttaaacgctgacggcatctggaagacagggcatcctgacagacggccgcatcaaatccgattccggcgctgaccaggaaccgtcggtgggatacctcctgatttccataggtaaggactccgtaatcaatcatggtgaaatgccggggggccagctgtttcttaagacactttatggtgcgtccgggcatgcggagactcctggccaggtcgctgccggaaccggccgggatataacccagacttaaaggcccatggaaagacacaccgtccagaacctcgttcatggtcccctccccgcccacggcgatgatatatctgggctcaccatgactgtctgtcagccgccttgccgcggttcttgcgtccccaatgccttctgtcaggaaaacttcgtattcaatattatgactgtccatataacgggctatggctttccagattctgagacccttgccggagcctgctttgggatttacaatgaagttatacatgaaggattcaggtcgtcctttctaatattttactctgccttaaattatagcataataccctataaaacactaagaaaatttctataaaaaaagttgtaaaaaaagtcttgacaattaccacaatttatcatatactatacaggcagtcgcgagtgagacacaaacggcggcagggtacggggtcttagctcagctgggagagcatctgccttacaagcagagggtcacaggttcgagccctgtaggccccactatctaccaaacttaatatggcggaatagctcagttggctagagcacacggttcatacccgtggtgtcgagagttcaaatctcccttccgctactcgagaagctttggattgtcaaagcttcttttattttgtcgccgggttttgcccgccagggcgttttacccgtctgaaatctgtcagggaggacatgagcatcatggaaaaggaacaaatttttcagagaaacgcgggatttttcgcattttttctaagcggcatatgtgctatcagcagcggtgtggtcgtaagcattctgcaggaaatctacggctttgcatatggcatgacagggacactgctgtcccttatgagcataggcaatctgctggccggctttgcctcaggcatgctgcccgcaaaaatcggcaccaagaaaacagtggtgctcctgacagcaggctatggggccggatatctgatcatgggtttttccggatggatgctggttctcatgctgggatttttcatggtcggcgttgctaaaggaagcaccatcaatacctgtaccatactggtggccgataactccggcgatcgtacaaagggcatgaacatcatgcacggctgctacgccctgggcgcgcttttgtgtccattcttcatcgccgccgccatgaaggcaggaaataccgtccccatgctggtgttagcagcctgcggtttcctgctgtggctgaccttctgtgtgactcccgccgaaacaaaggccatgaaaaaggacaggaatatagataaaagcttccttaaaagcagaaaattctggatgctcaccggtcttctgttctgccagaacgcggcggaaaccagcgtaaccggctggatggttacatattttaagggaaacggcatcatatcaggatctctcagcccctacaccgtaaccgtgatgtggggagccacgctgattgcccgcctgctcatagcatttgtaatccctatcaaaaacagctattccgccatgattaaaatgggcattggctgcatcatcttctacatgggcctgatgatggccagtacccagaccactgccattctcctgctgttcgcctttgcctttgccatggccggcatgaatcccactgccgtggccagcgcgggccgtatgaccagcgcggccagcatgggaattatgcttccggctgccagcagcggcgccatcatcatgccctggataatcggcatggtgtctgaatatgctggcattgaaatcggaatggcttccaatatcattccctgcgcaggcatgctgttattcagtgtagctgtaaaacggttgaaagaataggagctgtaaatccatgctccgcgataaggacatacgggagcctctctttgatttcctggaggaaatgtacggaaaaatacgtattctggaagaaaaacagataggaaaatccagagcggatatcgtcatggtcctgccggagctggcccatatccaggaactgaatgaaatgccaaatataaggaaaagagcaaacaattcgtcattgataaaatcgcagaaaggatacactctcaaagcagataagcaatgtcctgtttgaacgggattataatgaaattgaacatgtaatacaggaattcaaaaagacccggaccgttactacaaggaaacggcgcgccgggcccatccgaaaaggcaggcgtccatgacacgcctgcctttttctattccgccttaccatccagataatccagtatctcctgggcattggtatccggctttaccttttcaaataccttctcgatgacgccattctcatctattacataggtgcttctcaccactcccatagaaaccttgccgtaaagctttttctccttccacacatcgtatgcctgaatggcagtaagctccgggtcggacaggaggatgaagggaagctcatgcttggcggcgaagttggcatgggagttctcactgtccctgctcacgcctatgacctccacgttcctctgtttaaatccaatgtacgcgcctgcgaaggcgcatgcctccctggtgcatccgggtgtgttgtcctttggataaaaatacaaaaccaccttcctgccaagaaaagaggataagctcacttcctttccgtccttatcttttaatgtgaaatccggcgcttttattcctgtacttaacatgtctcttttcctccttaagcaattggccaggttcgctgaacgcgcgctggcctatgagattatattattgcaggtatcaatgcttgtcaaggagtcctctagagcgtgccaatggcgggaatgaattttcaaataccctctagcgcattttaacttccttaaatctgcgggcaaacacttcagcctttgtttcctgacaggggccgtgatggccagagacacagccagaatacagaacagaatcagcaggttgcgcggcccacctgcaggtagccctcaccgctgtagatatttttccgcacaatctggctggtggccttgctctgccccagctgtgtcatgtaggaaaccttctcatttttcttattattaaaaataaagctccttgcacggaatgataactgtttcacgccctttccccctgtgaccatatttttttctatcatatcatggatatcttgggattacaaatccccaggtgggctatgatgtcctgtcatttgggcaatcgagtaggaggaaggcgattatttcgccttccgacctctcacaccaccgtacgtaccgttcggtatacggcggttcaatcaacttaacatgtaacagccttttcggcgtagtagtcttccatggatacaagaccaaacttagctagtctctctttactgatacaaatgtggagattccagcttctgcacactctggcatatcctttggcatatgaaatgccatgtgccgcatttggcggcagaccaagtttgataagattcttttccctgttctttggcgttttccagtgtttccatatgcacatgcgcagtcgataccgaatctgtccgtccatttttgcgcacagccttttcatgcttccgattttgaaataatttatccaccctcggataagccggttgagtttcccaattttataaccattgcccactccccagctcctgcttgtatatttcttcatctgcgccttgaactttgctgccgctttcgggtgtggtctggctttgtaccctttggcaaatgagtcatagtaaaatccaaaccccagatacttaatgccctttggtttatcaaccctgctcttttccgcgttcactttcagtccaagcttttcctctataaaccgagccacgctcttcattacccgctctgccgcctgtctgctcccgaccattataataaggtcatctgcataccggacgaaatccagcctccttgcttccagttctttgtccagctcatttaacatgatatttgctaacagcggcgagatatttccaccctgcggtgtgccgactaccgtatcttcatactcatcatcaatcattacgccgctgaccagaatctttcttaccaccgatatgacatctccgtcctttattgtccgtccgaaaatcgtcatcagcttgtcatggtctactgtgtcaaagaatttcgctaggtcgatatccactatccagttgtgtccgtcattcatcatttccaatgctttaaggactgcctgctgtgcacaccgcttgggtctgaatccatagctgtggtcgtgaaactgctcctcaaatatcggggtaagcacctgtgccaccgcctgctgtacaaagcggtctactgctgttggcactccaagatttcttgtaccaccatcgggtttgggtatctccaccctgcggactggcttcggcttatacttcctcgtccgcaactgttccttaatgttttcgccgttttccgaaagatatgcgccaagttcttcaacggtcatcccgtccacgcctgccgctcctttattccttacgacttgcagatacgccgcatttagattatccctgcttaatatctgctccatgagactgcttgtgtccatgcgttgtttcctttctgccccttttgcctttgccgcctttgaagtcatcgacaggcgtatgctccggctacgaagtggaacgtacttcaactgattgattgttcagcccttcgctccgtccccattacaggaacttcctcactactatggcttctgctgacttctcacaattcgttgttactacggctaatgagaccgcctgtgagacctccccagttaaggtgcgtgttcttttcctccatgtacctgccgcatttactcgtacttccggcaaccttttggacttcagtgccttttgccaccttatccgtatttccgagccttatatgcggttcctgtccgtcaggtcagaggtttgcttacagcttctttcagattccgtctcacggcggacacccttgctgttcggctatgtgcttcgttgttgcctacgcgcacttgggactttcacccattagaaaacgcccatgctgggcaaacaaaaacgcggtcctggcttatggccagaaccgcgtcctgttgtttgtacaattaaccatataaaagcccgctgcacaacgtcctccctatggcctgacagccgtcccgtcaggcagtcttgcaaacagccagctgtggtccatatccactgccggatattttgcggcttccttctcatcaaagccaacaccaatacctggtgtgtcgtccacatatgcgtacccatccctgattttcgggcagcccgggaatatagcctcttcctcctgagtaaaaccggagaattcctggataccaaagttatggctgttcaggtccagatgcatctgcgcgcacattcctatcggcgacaggtcattgggaccgtgccatgcggtccgcacgccgtatgcatcgcagaaatgggccagctttacggcaggggtcacgcctccgatatcgcttaaatgcacccttatgaaatcaatccactggttctggataatggttttccactcagccggattggtaaacagttctcccatggcaaagggcacggctgtctgctctctcagatacttataataccccacctggtcaggggccagagagtcctccaggaaaaacagtttaaagggctccagctcctttgtaaaagcaagggtatctgccagagaaagccgctcatgaacatcgtgcatgacctcaagctcccatccaaaatcctttcttacctgctcaaacagccggattacactgtccatatacattttcggatggaaatacgcgccttccggcgctccctccggctttaccatctgctggcgcttgccatcgaagttcccgccgtaggttcccatgtgacagcggatgtgccggtatccttcctcaatatattgactgatacactcctttacatcttccaggcatcctccgtccgcatggcggtaaaccgtcacaccttccctggcttttccgccaagcaagctgtaaagcggcatgccggccagctttcccttgatgtcccacagggcctcatccactcccgatatggcattattgaggattgggccattgcgccaataggagcttcccatcatggtctgccagatatcctctatattatgtacgctcctgccctttaacatagggcagagatattcctcgatggctgtaaccacagccttatgcctccatgtaaaggtggcgcatccatatccgaaaagttctggttccgatgtctctgccttgacaatgaccagattaattccccttggcgctgtcacaaatacttttatatcgcgaatcgttatgttatccatgttctaattctcctgttttttataattacccccgtactatgtaacctcagccaatacagtatcagctcttaactgccccgcctgtcatgcctgcaatgaaatacttctggaaacagatgaagagaaccaccagcggcaggctggatacggtggaagcggccatcagatcattccatttaatctggtactgggaatttagggaaatgatgcccacggtcaatgtcttcaactggtcgttggaaatcaggaccgaggaatacatatactcattccatccgctgaacaggacgaatatggcaactgctgctatacccggcacaatcaggggcagtatgatgttccaaaaaatacggaagctggatgccccgtccactctggccgcctcgtccagttcaatgggcactgtcttaaagtaggaaaccagcatccatgtgctgaatgccacattggtggctgcatacacaataataagccctatcagcttgttggtcatatggtatttggacagcaccgcatagaacggtaccaccagcatgacgctgggaaacatctgggtcaccagaaggaaattcatcagctgttttttacccttgaactgaaatctggtcaccccgtaaccggccagacacgcacatgttatacagataatcatggcaaagatacatgttaccaggctgttgagggtcattcttccgaaattgtaggtagtgaagaatttgcggaaggactccaggctgattggatccggtatccactggggcttaggtgagtaggtctgggcctctgtcttaaaggcagtggaaatcatccagagaacaggcaccagcaccataagggccagcaggatcaggaacacataacaaagtatttgttccattctgcgtttcgacttcattttattcatccttcagcaccaccttatacacagagtttatgagataacagataatgaaaaccaggattccccatgcagctcctttaccgaatctcaggtcgttgaaagcggttccgtatatactcaggctgatcaggttcgtggctgtgcccggcccgccggctgtcatggtaaagacctgggtgtactgcttgaaccaccacacgctgtccaggataatcaccgttgtcaggataggctttagggaaggcagggtgatgtagcggaagctgtcccacttatttgccccgtcaatcaccgccgcctcatacaggtctttggaaatgctctggagtccggccagtatcatggtcatgaccagtggaaatcccttccatatacaagtgaacaccacggacggaaacgccagctccttgctgcccagccaggatatgttggctgaaatgattcccagcgacttcagcatatcgtttaagacgccgtacatgggattcatgatccaggtaaacaaaagggctatgacagcttccgggaaaagccatgggagcatgaaaatgaccctgaatacagtccttcccctgaactccctgtttaacaaggtggccaggataaaacccaggacaaaatgcccgattaccactaatatcatgaactcaaacgtgagcagcactgatttatagaaggacgggtctgtaaacgcctctatatagtatttgaagcctacgaatttccacttagtcaccaggttagtattgaagaagctgatataaaagccataggccatgggatatataataagggctgccagcatgagtacaatggggaatgcaaataagtatccgtcattctggtatttaattttacccgtggttccttttgtttttaccttagacatgatatcatgaccctttctttgccagtattaattgtaatcctccagaagctggccaagatcctttaccagctgttccactgcctggccgtttgttttctcgttgctgaatacagccgcataggcatcgcccagggcactcttaagtccgctgattcccgcaaaagccaaggtcggacggcagccgtcctcaatctgctttaagaaacctgcataatcatctcctgttatataggagaccttctgtccctcggtggtggacggaatcttgccgctggactcccagaacttcatatccttatcgtgggaggtaaagaattccaggtatttggcggcggctgccttctgcgcgtcagttgactttgtagtgatggcatatccctccgctcccagcatggtgcctgagtactctcccggaagcttaaaggaaccaagctttccttttaactcaggattgttggcataagcaacgcccagggcattgggcccggtaaggaacatgctggtatagcccatggcaaaataatttgccgccgtgggataatccacctctgtgataccagtgggaaccacgccctccacattgttcatatcggtccacttggaaaatacgtccacgaatgccggatctgtggtgatgtctgtcttccactcatccgagccatcctcccggtaagccagctcatatccgctgctccagagataggacataaaacggctctgtcctgaagaattgttggagcctaccatggagaatccccactggtccacctgtccgtccccgtccgaatcctttgtcagcgcctttgcgcagtccacaaattcgtcccatgtggcaggtacctcgagccccgcttcctcaaaacggtccatccggtagataacggcctgcggctgtacagcaaccggataataggtcatctgtccgtcgatggtgcaggcatccataactccgtttgccaggccgtcaatggcttccttgtccatccaattagcaaggtcctctgttaaacccagatcatagagggtgggcacctggtcggcagatgtgaagaacatggtgggaaggtcatccggagaggttgccatggctgccagctttgtgtaaatatcgccggaggcaatggcctggatttccaccttgatgtccgggttttccttcatgaattcctctgcatactgatatatgtactggccatggggatcctcaggcgcatatccgtccataacggttaaggtaacatattcgccggaggcagcctgtgtatcctttttctccgcctcggccccgccatcggcctttgtgtctcccgtctttgcattctctgccttagtatctgccgtgccggatgatgaacccgcgcatcctgtcacaagggatgccgccattgctacggaaagcattgctgataagaatctttttttcatgtcagttcctccatttcattgttatgaatctctcataattaccggccggtaattgtttgttccgatgtgaatatcatacaacaactgttctgctgaatgtgattattatttagtcaaaaatcaccatttttttgtcctgtgataaaaatttacataaaaacagcagctggcatccaaaaatcaccagctactttcctctgcttctcctgcttgtttcccaccattcatgtacagatttacggtattgaaggggagaaacatccatgattgatttaaattgccttaaaaatgtgtttacactgtcataaccgcacctctccgctatcactgctacgctatcactattattttccaataagctggcagcctcgcagacccttaccgtattgatatacttatttaagttgtatccgcaatacttggtgaaatccttgctgatagttgacgggtgaagaaaaaatttttcccccagcatgttcaggttcagctcttcattaaaatggacatcaatgtattccttaatctccagcatcctggcattggacgacgaaatacctgactcactccgcttgaaccggaaggtccgaaacagaagcactgctatctgggtaatgatggtccgctgaatctgggtacggaagggcttatgtacttcgctctcctcctttaagtaacacagcatatcgatcagatgcccgaacaccgcccggtccacatttttataattttggacaaacacctccggcgatggcgtgccaaataccttctgcaggtcatggtccaatatgatacttctatagtaggtcggtttgaccgtgaagccatatctcgaaaacggcagcctgtcaatccgcctcagatggtgttccatggctcctatgaccagaatatcatagggctccacatggtacttctttcctgagatatagtagtccgcagccccgtcctccaccaggagaatctcactggtattatggatgtggtgcatctcgttcttctcgtattcacaggtacgtgaaatattataattatcctcacagattgcccggaaatggtccggctcataataatcgttaatcttaatctccatgtggttaactatagcatacctgtatccatatgtcaaaaatacagtcccggccagtgaagtcaagcggttggaggtctatcgcccgcccaaatatcccattcaaattgactctttcttatattaacactcagacaaagggccgcatatcaagataacaccaagataatgcggcccttcccaattcctctcacatactcttatatttttataaccaaatactcccctgtcagacgcagcaccgcatatcttatcttcctctattcctccgcgttcttcttaagcatccccagaatcacgcatccggccgctgctcccacaaccaccgcagccaaatacataaagggatttccaatggtgggaaggacgaagatacctccatggggcgccctgagggtacagccaaacgccatggaaagtcctcccgcaatagcggaaccgatgatacaggaaggaatcacgcgcagcgggtcctgggccgcaaaggggatggctccctctgtgataaaggacaggcccatcacatagttgacaataccggactgacgctcctttgccgtgaatttcttcttaaagaaggatgtgcacagggcaatggcaatcggaggcaccataccgcctgccataacggctgccatgacctcaaagttgccttccgccagctgtgcggttccaaacacataagctgccttgttaaacggaccgcccatgtcaatggacatcatgccgcctaataccatgcccagcacgatccggctgacgccgcccattccgttcaggaagtgggtcagaccgtcgttaatcatacccatatacgggttgacaaatgtggttaccactgctgccaggaagataccgataaccggatagagaagcaccggcttgatgccctccagtgactttggcagtctggagaaaagctttcttaagcccgccacgatatatccgcctacaaaacccgcaaacagagcgcccaggaaccctgcgttcacatcgccccctgccggattggcaaaggtggctcccgttttggcaatcagtcctgccaccaggcccactgccaggccgggacggtccgcgatactcatggcgatgaagccggccaggataggaagcatcattccgaatgcctgctcacccacggtcttaagataggctgccagaggcgtattctttccgaagttggccgggttaatggaataatcgtcaaacaggaacgccagggcaatcaggatacctccgccgataacaaagggaagcatgtgggatacgccgttcatcaggtgcttatagatggtccgcccaatgctgtcactgccttccggcacagactctccacccgcagctcccgtatggtggtacaccggcaccgtgccgtccactgcccgtttgatcagctcttcagccttgtggataccgtcggctacagggaccatgataacaggctttccgtcaaacctggccatctccacgttcttgtctgcggcaatgataatggcatccgccgctgcgatttcttcccttgtgagcacattctgggctccgccggagccgtcggtctcagcctttaaggcaatccccagcttctttcccgtattctccaggttctcagctgccatataggtatgggcaataccggtggggcaggccgtaacagccaaaacccggtaaccggaggaagtgtctgcttcggcacccgcctgtgccttcgcgcctgccttggcacccgtctcagcatcctcctttgcattctggcccgcctctccctcaggcgctccaaaacgctcaacctccgcttcatcaatgatgcgtaaaaattcatccttatcctccgccccgataagcccttccttgaatccaggattcataagcagggtggacaggcgggataatgcctccaggtgcacgtctgctccctcagcaggcgccgcgatcatgaacagaaggtttgccagggaaccgtcaaaggcgtcgtaatcaacgccctcaggaaccaccatggctgccagtccgggctcctttaccgcctctacctttgcgtggggaatggcgatcccctcaccaatggccgtgctgcccaaagcttcccttgccagtatgccctccttgtatccggcggtgtccttaagccttccgcctgcatccatcagggataccagcctgtcaatggcctcctccttatctgaaacctttacgcccagctcaatgctctctttttttaataactctgtaatccgcataaatgcgcccctcctgaccgattaaagtgtgtttaatagtctcataatttcatcttttgttccaatgccgtcggaaaatgcagtagcgccgccgcaggctgttcccagcttcagagcgtatgcataatcccctttttccagatatccggctatgaatcctgccaccatggaatcccctgctccaacggaattcttgacggttcccctggcaactccctggcggtgtacactgccgtcctccgctaccagtatggctccgtctcctgccatggataccagcacattcaccgctccctgttccttaagcttcctggcatggagaacgatttcctcttctgtcttaagttcctgaccgaacatctgtcccaattcatggttgttaggtttaatgaggaacggatggtactgtaagaccttttggagcaaatccttctccgcatccactgccatgcggattcccctgccgtccaggtgttccatgattctctggtagatgtcattgtcaatggcagccggtatgcttcccgaaaggaccagcacatccccttcctttaaataggaaagcttctgaaaaagctgctccacatcgccggccgtaatttccggtcccatgccgttaatctcgctttcctggtcggacttcagctttacgttgatgcgggacatgcccttctccacctggatgaaatcagagtcaaaacccaggctcctgactccccgctcaatctcccggcccgtgaacccggctatgaaacccagagccgtgctcctgtatcccaggtttgccaaaagcgccgaaacattgatgcccttgcctccgtagaagatgttttcccggatggtccggtttacacttcccaatgtgaaatgttctactgccaccacatagtccagtgccggattaaatgttactgtgtaaatcatatatctctgcatcgcctttccatgaaaatttatttcttatcttgtctctatcataatacgataccatattttcgtcaatagtattttataagaaaatttatttcacatatttttcgtcacaatatacaaacagacggcctgtttccataaaaagccgcctgttttttgtgcattattttctattttatcattagtactgccttgcagctactgtctcatcatttcttatccggtgatatggctttttcatgacgccgtatatgctccacagagtcttccataccggcccgcagcagaagatacagtatctccataactgccgtagccgtcaccctggaaaaccagaactcctctgtcagcagcttttccctggtggcagtgacaatcttgtaatcgcaaatcccggccaaaggtgaatttccattgttggtaatgagaatgaccgtgcatccattatcccttgccccctccgccagtgtctggagacgcttggagcttcctgaattggatatgaccataaccacatcctcatgtcccaggttaaaggtataggctgtctgtgtttcccatatatcccccgccacagccggtattcccagctggttgaatttaaaggcgccgtccagagcaacgggaatggtattgcccacggctgccagctgcaccattcgggcatgctccagcttgtccaggatatgttccagattagccgggtccatcatgttcacggtctctgtcagctcggccaccttgttggccaatatattctgaagggactgccgcagatcgccgcggtcaatgtcattggacacatttctgtccatttgttcttcttccagcacctccctggccaatgccagcttcaggctgtggaaccctttgaagccgcaccgcctgcaaaaacgggatacggtggcgtcgctggtcccgctggccctggccagctcgcctactgtcatatccactacctccgccttatgctccatcatgtaatccgctatctttttctctgcttcaaaaagttcgtcataggaggagcagataactcccaacgcgcttcgtgtctctcccatatcatattccgcctgtctcatgtaaattcatttcatgctttaaatatagcacacaaaatttaaaaataaaagctgtttttcgtcatatattataatgctttatgaaactttattaacttttcgttactccccttgtttttccttttttactgtgctataatctctaaacgttaacatattattaacaatttgtttacatttagccgcatattatcaggtcttcaaatgtgagaaagaggctggtatcatgaaaaatattaaaacatttctttccaagtacaaacatgcatggctgctgtgttacggcttcatttatcttccatggttctgttacctggaaaagacggtcacccgtcattaccatgtaatgcatgttgcactggatgactttatacccttcaacgaatattttattattccctacatgatgtggtttttatacgtggcgggaaccattgttttcttccttttccgaaataaggaagattattacaggatttgtaccttcctgttctcaggtatgaccatcagcctgattatctgtacctttttccacaacggcacggatttcagaccggtcattgacccgggtaagaacgtattttccggcatggttgccgccctgtaccagacggacacgcctaccaatgtattccccagcatccatgtgtacaactccatcggcacccacatcgccatcatgaagagtgagtcccttaagaaatatccctgggtgcgggccggttcagccatccttatggtttccatctgcctgtctaccgtgttcttaaaacagcactcggtcattgatatggtgggagccgccatcatggcttatgtgatttacggaatcgtctacggatacaactggtccgcagaggacaagaaggtcacccagaaggcgctcagttagatggacaaaaatcaaacaaacggaaactaaatgttcggaatttaaaaccgctgtacgccagtcactacctaccggcatacagcggttcactattttggtggcggtaacgattcccgcattctggctgaaagccacattgggaaggccgccaaagaaggctcctatgatattgcttaacccgaatcccaggatacctccccgcagttccttatccgtggcttcccggtccatcccgcccatggcggcggtcacatcccccatggcctgcagggaattgatggcggccagcagcccaattaccacacaggataatgaatccacccccgacaatcaacggcagtccagctccaaactgaaggctgcctttcctgaatccgacagagaatacccgcaaaagggtggccaaagcagataccacaagagccgcctggacaatgatgaccttattttccccgcataaacccgccacgcccgcaatgatgatggcaggggcaacacatcccactatcatcgccgcaatgtgttggaaaaccagccttattatttgaaaattcgattgggcttaccgctccttggaaaaaggattcagcatcttgctcaccacttccgcctcagacgggccttcaaacagggtgcttgcctggtccttggcaggtatgctgtccaccttggagccgtcaacgccgcccctcatctctacttcatgcttatagtcagccaggtatttttcgatggcgctgattttgtcctcaggcgcctccataccttccctagatagtcccatgatgtccatgaccgtatccagctcactggcatcccagtccttaagaactgtgtctgcaagaaactgaatccgctccctgattgaattacacttcagaaattcttttaccattttctaagacctccatgcatatggaaatttcttgataccggctatactatactacttcgttaaaatgatgtcaattaaaaccgtaaaatttctgcgttattttataacccagaatcaaaagctcccttccacccttgccggggaggttgcatccctgtcccaaaaagcccatcctgagccgcaggaaaaggggcaggttctgttttttcagatactgccacagctccttctttttctccaggttttcctctgtcccggatttgatggccaggacagaacaaatggtcatcatgatttccaggtactgtatcatgtagtggcgcagcttcctgctgcttatcttcatggcgtcataataccccagcatcagcttggtgacccgaatctgctggtcaatgcggccaatcatcacctcttcgttgacggactggtcctgccttccgatgtaatagcggtagaaattcacatccaggtaataaatatgcttcacatgaggcaggggctggtacacaaaaatattgtccacataaaaggtgtgtttgggaagctccagaccgcaccggataagcagccctgtcctgtaaataacagagtgcatcagtatatactgccctgtcatgaaaaacttcacatcattccatccgaataccttgtccttgggaaatgccgtgtggtatttcatcacctttttccttctggccccttccttctcatagacaaagttggtaaccagcatgtccagtgtctctcccccatatacaaaccgcctcagggttgcaagaacctgctcatatgcttcctcattgacccagtcgtcactgtccaccaccttgaagaatatgcccgtggcatttttaagccctgtattcacggcttctccatgcccgccgttttcctgatgaatcgcgcggcagatggtgggatattcccgggcataccggtcagcaatctctcctgtcctgtctttggcggatccgtcatccacaatgatgatttccacttcctccccgcctgtaagcagggtgttgatacagtgctccatatagctttccgagttgtagcaggggattgccacagtcaataacttcacgtttctacctcctcgttatgagtatttaaccaaacgctgccaggactgccagattggcggccccatgcatcaatactgccataggatatctacggtattcactaccttcatagccccatgccagcaccattcctaaaaaaaatgcgtatgtgccttgaatccaatttccatgatacattccaaaggccagggaggatatgaccgccgccggaaaaagggccatgaaacgcctcagccatccgtacagaaccaggcggaaagctccttcctccagaacgggcgccaggaccaatgtcatccacaaaaatcccgctccacgggatagggcaggctccatggcttcctcgtaagaagacaggagactttcaggccatggtataaccttcaccagcagattgcctgccagcgccgccaacgctgccgccagtatacgcttctgccaccctgggggcagggcctgttttctatccctcatacacttcctgtccttccagtcttattctgttgacagtatagcatggctccccgggttttgccaccatcttttttctctttccattgcattttctcccatattaccctataataaacttaatttatatgacaattttaagacaagcgaggtatggattatggcgaaaaaacgcatcgtaatggccattggccacaaagatatgggaaccaatcttcctgaacaaaaggcagctgtggcgggaaccgccaaaatcatcgctgatttcatccaggaggggtggcaggtagccattgtacacagcaacgctccccaggtaggcatgattcacacggccatgaatgaattcggcaaacagcatgatggctatagccaggctcccatgtctgtctgctccgccatgagccagggttatattggatacgatcttcagaacggaatccgggctgaactcataaagagaggcatctacaaaccagtaagcactgtattgacccaggtgacagtggacccgtacgatgaggccttctatacccccgtcaaagtcatcggacgtgtgatgaccaaggaggaagcagacattgaggaagccaagggcaaccatgtgacagaagtggaaggcggttaccgcagaatcgtcgcctccccccatcctgttgccattgtggagatcgacgccatcaaagcccttatggacgcggaccagattgtcattgcctgcggaggcggaggcattcctgtcatggaacagggctataacttaaggggcgccagcgccatcattgagaaggaccttgccaccggactgctggccaaggagatcgatgcagatgtgatgatgatactcaccagcgtggataatgtgaccttaaactacggcactccccaggaacagcccatcagccacatgaccatagaccaggccagggattatatcagccagggccagtttgaatttgcctccatgctgccaaaggtatctgcctccattgatttcctggagagcggaaaaggcaggaaggccatcatcaccaccctggataaggcaaaggacagcctgaaaggccatgcaggcacggtaattgaataagcaccttgattttccaagatataacagtaaaaatccattaaccgccagtatttcccaaacggttaatggattcttttttgtacgcattttaatatgatcttaatctgtcagatatgcaggcagccgcgcaaagctataagccattacaatgttatcatacctctgtcagtacccgctccgtaatatagctgaccatctcatcctttcgcatccccagagacagggccagctcggaatacagattatcctccgcagtcttaaaataccgctcgtccagatccgtcatcttctttccctgctccaagcggtccttccggcgcaggtataatgcttttatcatgctgatccacacccggcagtcacaggtcttaagggcttccttataccgttcctcccgctgtttatcattggtcacctccatctccttcacatcagagattttgtcaatcagctcaagggcctcttctttggaaagaagcggcctggttatggttttctccgaatccacaggcgtcacaatcttgctgtcttgctgataatagggacggagtacataatacagccggtccttaggaccgtcaggtctgtctactgtgataatatccatcacctcgcagacgcccctgataccgtatatgatatactgacctttctgatacataattttaccgcctacttcccttattttataatacttatattgtatcactaaaaagttgtcgatgtcagaagttttttggcggtgtctcaaattttgtaaaaaatacaccatgatgccacctgtttttttgtatacaataaccagttcactttccttttcaggtccctgctgcaatggtgagtgcccatcccctctttcatagactggattttataataatcctgagcgcaaaattggcggcatctgtttttgcgcaaaccacgtctccggctttaatctctgcccgctctgttcgggccgctgtctgctccttccttggcatctcctccatctgaaccgctgctttcatctgccttactgtccccgccctcggttttgcttccgtttcccgtctcctttggtctgcgtccggcattttccttatccactctattgcctgcgtcgccatctccgggccggccgccactgcggtcagtttctccaataatcagggttatctgtgaatccgaaatttccttgaccacacctgtaatttcattttcgtggccatcgctgctttctttcaacacttcaacggtatttgctggcgtattatcctgttttccctgactcccacaaccggatgccaatactgcgcccatcagcatggccaaaaaaataactctctttttcatgtacatactccttttgagcctgcggccgcgattcccgcttcttaagcgttcttcaccgtggcaatgtcaatcagcgtcagttccttggcccggttctccagactggttgccagcgcgttggccgtatccagggaggtcaggacattgacgcctgtctcgatggcattgcggcggatgatgaaaccgtcatggctgcgctctgcgccctgggccggaatatcgataatcagatcaatctggtggcccagcaccaggtccaggatattgggggattcctgctccagcttgcggatttcgtaagcctttacaccgttcttgttcagtgtccgcgcagtgcctctggtggcaaatatctgataccccacagcggcaaacctgcgggcaatatccaccgcctcctcctggtcgctgtggcgaacggacataatcattttcttgtattttggaagacggattcccgccccctcaaacgctttataaagcgcttcattgaacgtctttgcaatgcccaggcactcgccggtggacttcatctcaggtccaaggcttatgtcagcgccccgaatcttctcaaaggagaacacaggcatcttgatggcaatgtaatcagcagccggctgtaatcccggtttataacccagctcccggatggtatgaccgcagataatccgggtggccagcggtacaatggggattccggttaccttgctgatatagggaaccgtacgtgaggaacggggattcacctcgatgatatatacgtcgtccccatccacaataaactgaatattaatcataccctttacatgaagggcctttgccagcttctcagtgtagtccacaatggtatcgatattgtgctgggtaatgtcctgggccggatatacggagatactgtcgccggagtggataccggtacgctcaatatgctgcatgataccgggaatcaggatgtcggtgccgtcacagatggcatccacctcgatttccttgcccatgatatacttgtcaaccagaatcggatgctcctgggctatctggttgatgatgccgatgaactcgtcgatatcctcatcgcttatggcaatctgcatcccctgtccgcccagcacgtaggatggcctcaccagcacaggatagcccagcttattggctgcttcctttgcctcctcagccgtaaatacagtatgtcctgcgggccttgggatattgcactgctccaggatggcgtcgaagcgctccctgtcctctgccgcgtccacatcctctgccgccgtacccagaatgggaactcccatcttcatcagggcctctgtcagcttgatggctgtctgtccgccgaactgcaccactgcgccatccggcttctcaatatccacgatgttctccacatcctccggggtaaggggttcaaaatacagcttatccgcaatatcaaagtccgtgctgacggtttccggattattgtttacaataatggtctcatagccttccctgctgaaagcccaggtactgtggacagaacagaagtcaaactcaattccctgtcctatacggattgggccggaccccagaacgagcaccttctttcgtccgctggtctgctcagcctcgttgaaaccgccgaagcaggaataatagtatggtgtctcggccgcaaactcggccgcgcaggtgtccaccatcttgtaaaccgcgcggatatcgttgtcatggcgcagcttcttgatttcttcccgggaggttcccgtaagcactgctattacattgtcgggatactcgattctcttggcctctgccagaagctctgccgtcagcttcttttctcctgagcccactgcctttaaggcatcctccatctccaccagaatagccagcttgtcaatgaaccagaagtcaatcttagtaatgtcatgtatctgctcataggtgaatccgcggcgcagcgcctctgcaattctccagatgcgcatgtcatccaccctgtataattcctctgtcagtgtttcgtaggaaaggtctgtaaaatcataggacagcaggcagtctacatgctgctccagggatcggatggccttcatgagagcgccttcaaaattggtgcagatactcatgacctctcctgtggccttcatctgggttcccagtgtgcgttttgcgctgatgaatttatcaaacggaagccttggcatctttaccacgcagtaatccagcatgggctcaaagcttgcatatgttttctttgtaaccgcatttctgatttcgtccagggtatatcccagggcgatcttggcagctaccttggcaatgggatatcccgttgccttgcttgccagggccgatgaacggcttacacggggatttacctcaataacacagtactcaaagctgtccggattcagggcgtactgaacgttgcagccgcccgtgattcccagctcgctgatgatgttgagcgcagaggtacggagcatctggtactccttgtcccccagtgtctgggagggagccaccacgatactgtctcctgtatggacacccacagggtcaatgttctccatattacaaaccgtgattacattacctgcgccgtcgcgcatcacctcgtactcgatttccttccatccggcgatgcagcgttccaccagcacctgtcccacacgggaaagacgcagtccgttttccaggatttcagcgcactgctccggattgccagcaatgcctccgccggaaccgcccagggtgtatgcgggacgaagcactacgggataaccgattttttcggcaatctccaggccatgctttacatcctccacaatatcagagggagccacaggctcgccgattttctccatggtttccttgaacatctcccggtcctcggccttcttgatggtcagggccgtggtgccaatcaggcgcacattgtgttcttttaagaaacctgcatcctccagctccatggccaggttaaggcctgcctgtccgcccagtgtgggcagcacgctgtccggtttctcttttaaaataagctgttccaccacctccacggtaaggggctcaatgtagacacggtccgcgatatccttgtctgtcatgatggttgccgggttggagttgagaagcacaacctcaattccctcttccttcagggaacggcaggcctgggtgcctgcataatcgaattctgccgcctgtccgatgacaatgggtccggatccaagcaccagtacttttttgatatcaggattctttggcatcagtcattcacctccatcattttaaggaaacggtcaaagaggtaaccggaatccaggggtccggggcatgcttccgggtggtactgcaccgtaaagatattcttgcccacatactttaatccctcgttggtgctgtcatttacattgacaaatgcaggtacggccaccgatgggtccaggttgtccgtatccaccacatagccatggttctgggaagaaatataaacccttcctgtctccaaatccttcacgggatggtttccgcctctgtgtccgtattttaatttatgggtatccatgccgttggccagggccatgagctggtgtcccagacagatggcaaagataggcacatctgattcataaagctttttcacttcctcgataatggctgcattttccttcggatccccggggccgttgctgagcatgataccgtcgggttttcctgccagtacttccctggcgggtgtgtcagccggataaacagttacctcgcatcccctctggttcagagaacgggcaatgtttctcttagcgccgtaatccatgagggcaaccttcttaccgtttccgggaaggacgtaggtctcctttgtggtggttttaagcaccacgccagtcacggcatactccttcatacgttttatgggctcgctaaaatcggtatattcctttgtagtaatcataccgttcatggtgcctttttctcttaatattttggtaagggctcttgtatcgataccgcagataccgggaatgtcgtgttcttttaagaagttctgaatggtatcctcgcttctgaaattgctggggattcttgataattctcttacaatatagccatccggccagggctttgctgactccatgtcctgatggcagattccataattgccaataaggggatatgtcatgacaacggcctgtcctgcataggacggatcggtcagcacttccagataaccggtcattgacgtgttaaacacgatttcactgatgacttcacgttcagaaccaatgctggtcccggtgaatacagttccatcttccagtatgaggtatgctttcatatgggggtacctgtcctttcttatgtgtttgcttaagggccatgtgacctcagcccaaattgtaaagattatactgtatttcatatgaatttgcaatgactttggaaactaaatttttttgtaccaatcaaatttttttgtgcaaacaggccgggaggaagccggaatacaacatgggcagggtccaaaaatatgcgccctgcccacgtcttttatgtctgttttttatagggaattactgctttttacagaggatttctgcctcccatccttcctccgcggcgccgggcctctgccccgtgctctccatcggttcccggaaaacctctcctgctgaatcggccatggaacccctgtccgcaggctaccccgtcctccatcccagttcaaatcatcacaccaattccgcaatccgggtaattcccacataaatatgcgatattttataccatgtggcaaaatccaccactcctgtctggggcagtccgaagatggactggaattcccgcaccgcgtccgcggtcctggtgccgtatatcccgtcaggcgtcaccctgggaatggccgaataaacagttgctatttcatccagctgttcctgcatctggcgcaccttatccccggagcttcctatggtcaggtcactgcccggccaggaggccggtatcccggatatctgctccgccgtgttcacgtagatgctgtccccgtaaaaataacgcagtatctctatgggactatagccctgctctccaagggagcatgacccccactgtgtcatccagttaggacactggacctggcgtccgtcacagtactgagtcaaaataggctgtctcacacccggacgggacaggtagttgtcaaatatctcatccacagtcagactgatgctctcaaatatatttcttccatatatccacttatggtcaaaggcagtggaggacgtaatggtaaaatcatagccctggttcctgtaccactccgtgtatacccggttcagggtaaaggacatgattgccagcacattggccgttatggtggccctgggccaggtggaatatatttcactggaggccacgttctttatgtagtccctgtaaggcacataatagtccttggccgtactgtccgtgggaacaccgtcgtggaccaccacagtctgaggcactaccacccggctgagaacgatttccccgctctcgttcactggttttatctctggttccgctatctttggaggataattcccgtacagggtgtggtccggtatcaccaccgggtcttcgggaggtgtttccccgccaaccggtgtcatggccgccggctgtatggccgtggcctgggccagtatttcggttccggatatggccagaggctcaaagccctccgcctccaccatcaggttatattccgaatagggctggataatgcttggttccagactgtattccacaggtggcgccggaagctgtacctgttctgtctggcctgagctgttggtggtcagctgctccacaggccggtccggttctcctttatagctgatggtgaccctggcgttctgtatgggaaaattattctgtatgttgattacgttaatctgcagcagtccactggatgtccgttctggattggttgccatgtaatacctcgcagtttcttttcattacctaaatataataccgcccagcctattatatgcatgtattttcccttaaacctgaaaaggacaaaaagaaacaggctacagctcatatcccttaatccgaagataagcccgtatggattccatggccccctctgttcccagggatgccgtgttcagcatcagatcgtaattttccacattttcccaatcccggcctgtatagtacctgtggtaatccctccgctccctgtcaatacgcttgatgttcttcctgatatcctttggctcataatagcccagagcgctgattcgcttttcccggtattccatatccgcgtacaggaatactctcaccagaccttccgcgccctccagcacataatcagcacatcgtcccatgatgacgcagctctcctccgccgccagctttcgtatgacctcggactggaaccggaacagattgtccgccgacaccaggtcggagccaaaggaaggacttcccttttccggggtcaggctctttacaatcttatacaaaagcttgtttcccgccttctcgtctgccagatagtaatagctctccttgatgccgctttggtctgaattcatgcgcagaatattcttgtcatagaaatggattcccagctccctggccagcctggagccgatttcactgccgccgctgccgtactgtcttccaatggtcacaatgagttgctttccttccttcatacgcccatcctcctgttctgacagcgcaggcctgcgcctgcttccatggtttgttttcatggtttcattgtaccaagtcgctagtgcgacggctagcccaaggtacataaaaccaccactttttttataaaaaatagcagtttttaaatttatgatgtattgttaagttaccacaccaaacaacttcataactttaagaactgctatgcttatgttatcatggatttctaaactcaacaactatatatcttatttttttactcgtccaccacctctttttgaaatgtaactactgtttttattgcatttcaaaggagattttactatggacaaatatttaaattctttcagggaaatgatttcccttcgcggtcttaccgaccatacccttaaaaattactgtacttacatccgggcgtatctggattacctcgcaaatgttcttcacaaatcgccagaagatgtttcctgggatgaacttcgtgactacatcaaatggctacagaaatccagagacctttctgaccgcaccatcaactgtgccatttcacaactgcgctttttcaccatgtatgttcttcacaaaacatgggatgacacacagcttcccatgcgtaagtttgacgagtaccttccctatgttccctcgaaacaggaaacatggcagtttatttcttccatacctgatttaaagcagaagactatggttacactcatgtattcctcagggcttcgtatcggtgaagtatgccgtctgcgttacgaggatgttgaccgcaaaaacatgcggcttcacatcacacactccaaaaacaggaatgaccgctatgccattctttctaaagcggcacttgacctgctgacacgctactggtttgaatacggcagaccaaaaggctttctttttccaaagcaaagtggcgaggacagacccatcgacacattcttcctttcaagacacatccatgcccatgaggacaggctcggatgggaacgcaggcttacctgtcattcctttcgtcatgcttttggtacccatctgtatgaaaacggaaccgacctgcttaccataaaagcgcttatgggacataaatctttgtcttccaccactatttatgtccatctttccggtaatgccatccgcaatgccgtcagcccttttgaccgattggcaggtgaataccatgagtgattacaaaatcaggcagatatttgagcagtcctatgaagctttctcagcaccggggcactatcagtcggatgtccaacgcaaagccgcccgagccatcttaaactgcaaatccggaaggcttggtgtcaacttaagtcagtgtaccgactgtgggcatgtggaagtccacaataattcctgccgcaaccgcaactgccccaactgtcaggctgtgaagaaagaaatctgggtagataaacgcagtgctgaggtcattgattcaccctattttcatgtagtgtttacacttccacatgaattaaatcccctcatttactgcaaccagaagcttctgtatggacttcttcacagatgctgcgccgaaacacttctggaattatctgctgataagaagtggctcggggcaacacccgggattatccaagtacttcatacttggaatcaggagctggattaccatgtacatatgcactgcattgtttccggcggcgggcttaccggagatggaaaaatccgtaaatcctcatctaagttttttatccgtacggaggtcctgcgggataagtttaaggggaaatatatggcacaccttgtctccctttatgaaagcggctcccttaacttttcatcctcctgtgaaaacctgcgtaattcttaccactggaaggaatttaaaaataagctttatgaaatggactggtgcccctacatcaagaaaaccttcaacggcttcggcaatgtcattgaataccttggacgctacatccacaaaatcgccatctctaacagcaggatcctttctgttacggaagatacggtaacattctctgcccgtggaaaaaagccgggtgaaccaaaacgtcagattactcttggcaacacggagtttatacgccgttacctgatgcatgtgctgccttccggctttcagaaaatacgctattatggttttctgaacaatcggatgaaatataagaatctgaaggttatctttaagcttcagaatggacagcgtttcaagcagcgttacgccggaatgtccctggcagagcttttaaaagcagtctggaatttcgatatctgtgtgtgtcctgaatgtggtcatacagccatgaaacagctgggaaggtgtcatgttccttcttcctgacaggctgctttcctatatattttttaagacctgccatcgggaggtctgcgaagcatacccaaaaatatgggatacagctaaaatcgtcctgcttctgcattgcagaccaccataatccactattttaagcttccctggggaaatactatccccatacagcctatggctaaagttccgcgacttggtacaattggaaagaatcacattcagagcagtttatcttttgcataagctgttcatttttttgtcgctctgaatctgatactttccttaagaattataccacaatgcggcctgagatttaaacgttattccaaaaatccttcttgacataccgcccaacagtgcttataataacaatcaattgaataaactcttcagggcagggtgcaattccctaccggtggtacagcccacgagccgcaaggcatgattcggtgaaactccgaagccgacagtacagtctggatgaaagaagatgaatcgttgacatggacgcgcttacgcgcttttcgtggctggctgacagtgccctggaatggactatcattccagggcttttgtgtacctcccatgcccatgtcctcctgaaggcgcgaaacattgtgccttgtggttttatattttctgccttgaacgatacggttcaaggcatttttttatagaagtttttaaagctgtataccaggggacaggccatggcagcaccatgcgggtccctgcatttgtaaaggaggcactgcattgaatgatactgattacatgtccatcgcactgaaactggccgaaaagggctgtggaaaggtcagccccaatcccatggtgggtgctgttattgtaaaggagggccgcatcatcggccagggcagccacctctgttttggcggtccccatgcagagcgaaatgccctggcatccctgaccgaatctcccaggggggcaaccctgtatgtaaccctggagccctgctgccatcacggcaagactccgccctgcacggacgccatcgtggaaagcggcatccgccgggtcgtcataggcacaagggatcccaatcccatggtgtccggcaaaggcaccggagttttaataaccaacggcattgaggtgacagagggtatcctggaagaagaatgcagggagctcaatcacgtattcttccactacataaagaccgggcgtcccctggttgtcatgaaatatgccatgacgctggacggcaagacagccacccgggccgggcattcccgatggattacaggggagcgctcgcgccaaagggtccatgaggacagaagcaggtattttgcagtcatgtgcggggtgggaaccatactggccgatgattccctgctcacatgccgcctcccggctacaaggaatccggtgcggattatctgcgattcacggcttcgcacgccgccggattcccgggttgtcaccacctgttcccaggccaggaccatactggccacctgctgccctgacaggaaggcatggcttccctatgaggaaaagggctgtgaaatcctcctccttccgccccgtgagggacgcgtggacctgaatgccctcacagaacacctgggacagatgggcattgacagcgtcctgctggagggcggcggcgccctcaactggtctgccctggaccagggaatcgtaaacagggtccaggcttacatttccccaagactctttggcggcgcaaccgccaaaacgcctgtcggcggcagcggggtggaattcccataccagggctattctctgggaaagaccaaaatcacggccctgggccaggacattcttatcgaaggagagttggcgccatgttcacaggaatcatagaagaaaccggaatcctgctgtctgttaagggcggttcatccggttcccgcctggtcatcggagcagacaggatcctggaagatataaaaagaggggacagcattgccgtcaacggcgtctgccttaccgcggcatccttcgattccggctgttttttggcggatgtgatgcctgaaaccctgaagcgttccaatcttggctgtctgcccatcaaaagttctcttaacctggaacgggccatgatagcaggcggcaggttcggcggacatattgtgtcaggccatattgacggaaccgggactattgtaaatgttgtccgcgacggcaacgccctgtggtacaccatccgttctgccccgtccattctgcgccgcatcattgaaaagggatccattgccatagacggcgtcagcctgacggttgcccaggtaagggaacaggatttcagcgtatccctgattccccatacagcctcccacaccaccctgggagccctgaaaccgggccgcgtggtcaacctggaaaatgactgcgtggggaaatatatcgaaagatttatgaaaatctccccgtctgcccacagcacagaagatgaggacaccaaaaacagggggaccggcagccggatcacaccggaattgctcaaacaatgtggattttgagcagccacggaacaggaccattaaaaataaggaggattaccgcaccatggaaggattcaacaccatagaagaagtactggacgacctgcgccagggaaaaatcgtactggtgacagacgatgaaagcagggaaaatgagggcgattttatctgcgccgcccaatatgccaccacggaaaacgtgaattttatggcagtgcacggcagaggtcttatctgtatgcccatgagcacacaactgtgcacaaggcttaagttcccgcagatggtatccgacaattccgacaaccacgagacagcctttaccgtatccattgaccacataagcacctccaccggcatttccgcggccgaacggggcgtaacggccagacagtgtgtcaatgccctgtcccggcctgaggatttccgtcgtcccggccacatgtttccgctggcagccagaaaaaatggggtgctggaacggaacggccataccgaagccaccgttgacctgatgcgtctggccggtctcagtgaatgcggactttgctgtgaaatcatgagggaggacggaaccatgatgcggatgccccagcttcttcaatacgccggacaatggaacatgaaaatcaccaccatcaaggccctccaggactaccgcaaacagcacgatacgctggtggaatgcgctgccgtcacccatatgccaacccgttacggcacctttaaggcttacggctacaggaacctgctgaacggagaacatcatgtggccttagtaaaaggtgagattggggacggccgtgacttattatgccgggtccactcggaatgcctgacaggcgacgcctttggctccctgcgctgcgactgcggacagcagcttgccgcggccatggcccggattgagcaggaaggcaggggagttctcctctacatgcgccaggaaggcagaggcatcgggcttctcaataagctgcgggcttacgaactgcaggatcagggcatggataccctggaagccaatctggctctgggttttcccggggatttgagggaatatttcataggcgcccagatattaagggacctaggtgccaggaccctgcggcttctgaccaataacccggataaggtataccagctctccggctttggcctggatatcaaagaacgggtgccgatccagatgacgcccacagaccatgatctgttctatttaaggacaaaggaacagcgcatgggacatttgacacattattaaggaacctgacacattattttaagaaaccatcacatgctaagaataggagaatacgccatgtatatattagaaggaaaacttgttccaaaaaaaataaggataggcattgtcgcatcccgtttcaatgaattcattacctccaagctcctgtccggcgccctggactgccttcggcgccatgaggtgccggaggacgctgtcacggtagcctgggttccgggcgcctttgagattccactcatcgcctcccgtatggcttccagcagacgctatgacgccgtcatatgcctgggcgccgtaatccggggcagcaccagccactacgactatgtgtgcagcgaggtctcaaaaggcattgcccagacctcccttaccaccggggtcccggtcatgttcggcgttctgaccacggagaacatcgagcaggccattgaacgggccggaaccaaagcaggcaacaaaggctatgactgcgctgcgggagccatagagatggtaaacctgatacacgaactccgccaaaggacggcggatgacagcttatccgccatgcccccggtccaggatgaaccgtgacgcccgggcaggcaggagtcctggtcctctatgagctgccgcctttcctgctcacggccgcgcagcttcccctccagtcccagataggcgcgctttcctgattccaccggaggcagctcatcctcaccctcccggaaccaggctgccacggagtcacgccctctgccttctgcatctttccgccgcccggccatatgatatcctctgcaaatgtggatataagaaagatataagaaatccgaataaaatgcaaatccatgactccgcagtaaaagctgtgttccccggcccggtccagctcctccggcacgcggtctatgcgcatttcatggattattttggggcgccccccttacgttttccatgaaccacgccagttttgaggctggaaagtagggcgacagattgattcctgttgtacgacgcacccattccgcttttcccgattcctccacccgcgcgcagatatcctttgccccggaacactgccatacgatggcatccgccttcttctcaatggcagcctcaatcatggatacccgcttctccggatccacttcctcctggggaatggcgatagtcaggtccacgccagattatccgctgtctgctgcgcaaaatcagatacggaaatccaccagggattgttcagtgtctttccctcccagtaaacgctgatgccttcctttttctcagttcccgcttccgcctccccggcactgtcattggtggcggatactgcctccagtccattggacgtgcaggctgccaggctcagggccgccataccagtcaacaggatagtcctcaaggacttcggacaaaaaaagagcatatacagcataaaatgccgtatgctctgctcatcttctatttttgatttgttttaatctgttatttttttcacacttccgcgtttcaccgggctggtccctatctccacaccgcacagataggccaccgccttgctggtgccctgtacattgttgattctctgctccttcagcatgtatccgcagtccatttcctttattttctggatgatttcctggcggcgcttctcacccactcctggtttgttatttaaaaccagagaaaccgtagccgtggacacccccagcatttccgctatgtcttttgctctcagcgccatttacagaccctcttgccatacaattaagttgattttactaaattattaactaaattgcaataccaaaaggcattccggatatctccggacatctccatggaaagcctagattcttccgctgccaagctccagcagcttcacgctcccgctctcaagagtggccctgagattcagaatgcgctggttggaggacccccggaagggaaggctgatatccttaagagcctccacgaaccgaccgtccaccagcacgtcaatcatggacagcatccggtccgtatattcacacctggcccggccgtccttcagaaggtcctgttccagggtatatcctgtatagcaccacagattcttctgcggatagcgggccctcaccttttccaaaaaaggcaccagcacctcctggttctcaggctcaaacggctctccccccagaagggtgagaccctctatataatccggagcaagggcttccaggatttcctcctgcgtctcccctgtaaagggtatcccgaagttaaaatcccacgcctcctcgttaaaacagcccggacagtgatgggtacaccctgacacaaacagggataccctcacgcctgcgccgttggcaatatcattcttcttgattgtaccgtaattcatcttataaatggagcaccctttccttgatttcctgggtcctgccctggttccagaactgagttccgatatagccgcaggttctcctggccacgttcagcttgttctcgtcccggttgccgcacttggggcattcccacaccagcttgccgctctcatccgtcacaatctgaatctcgccgtcaaatccgcattcctggcagaaatcgctctttgtgtttaactccgcgtacatgatattgtcatagatataccgtatgatccccagcacggccggaatattgttctgcatgttgggcacctccacgtagctgatggctccgccggtggaaagagcctggaactgcgactcaaatttcagctttgagaaggcgtcaatttcctcggaaacatttacatggtagctgttggtaatatagcttctgtccgtcacgccctcgatgatgccgaaacgcttctggaggcatttggcaaacttataagtggtgctctctatgggcgaaccatagatgctgaatccgatgttagtctcatccttccagcggttgcaggccttattcatgtactccatgacctccagggcaaagggagtggccgcctggtcggtatgggactttccggtcatgtacttcacgcactcatagagccccgcatatcccagggaaatagtggaataaccgccgtaaagaagcctgtcaatggtttcgcccttcttaagccttgccagggcgccgttctgccagagaatgggcgccgcgtcggacagagtgcctctcagacggttgtggcggcacatcagggcccggtagcacagatccagcctctcgtcaaatatcttccaaaaggcttccatatccccgccggaggacagggccacatccaccaggttgatggtcaccacgccctggttgaaacggccgtagaatttataattcccgttctcatccttccaggggcttaaggcgctgcggcatcccatgacagggaagcagtttccttcctttaattccatcatcttcttctcggaaatatagtcgggaacaaggcgcttggccgtacatttcgcagccatctcggtcaggtaataatactcggttccctcgttgacattatcctcctccagtacataaatcagcttggggaatgccggcgtaatccacacgcccgactcattcttcacgccctggcagcgctgcttcagagtctcctcgataatcatggccaggtcctttttctcccgctcgttcttagcctcattcaggtacatgaacacggtcaggaagggggcctgtccgttggtggtcatcagtgtgataacctgatactggatggtctggactcccttggtaacctccttacgaagtctgttttccaccacttcatggatggctttctcggaaggcatgcagccaaaggtctttacctcttcctgaacctccgcgtatattttctttctggacacatccacaaagggagccagatgggccaggctgatgctctgcccgccgtactggttgctggctacctgggcgataatctgagtggcgatattgcaggccgtggaaaagctgtggggcttctcaatcctggtctcgctgataaccgtgccgttctgcagcatgtcctccagattcaccaggtcgcagttgtgcatgtgctgagcaaaataatcggaatcatggaaatgaataatgccctccctgtccgcctccacgatatcctgcggaaggagcatcctcttggtcaggtccttgctgacctcgccggccatgtaatctctctgcacactgttaaccgttggattcttgttggaattctcctgcttcacatcctcgttattgcactcaatcagggacagaatgcggttatccgttgtattggccttgcgtatgagggagcgctggtaacgatatctcacataatcctttgcaagctcaaacgcgcctgtagacatgatctggttctccaccatatcctggatctcctcaacggacacggccctgttaagttttacacacttgtactcaacgtaatccgcaatgtccttaatctgctccagactcagcttgttttttccggcagccgtatttgcctttgccacagccaccacgatcttattgttgtcaaaatcctcttccgcgccattcctcttaataatcttcatcgtcactacactccttttatccaaatgctctcccacgctgcctgtattcaggtaaacggtttaaaggcatcttatcacagaatactgaaaaaatctgttgcttgtgcaacagtataagattttagcactaaatgttgtgtttttcaagaggaagtatacgataagatgtatttcagaaaaataaatcaattggctgaaatcccggccaaacccgaaaataagtctgacagcaaaaggcgtcctatttcaggtagtcacctgccggggatgtgttatattgtttcagtatcccaatcaccacagaaccgtccggttcccgcacagctctccctctccaccaggtggtggggaacaatgattttcgtagccaccagctccggattttccacatggcttatcatctgggcggctgcctcgattcccagctggcaggcattcacatccacggatgtcaaaggcggaaatgtaagtctggagagaagggaattattaaaggacaggatggatacatctcccggaatggatagtcccagaccaatacaggtcttttccagggccactgccagtatgtcatcgctgaccagcacggccgtgggtctgtcctctcttgcgaacagggcttccagggcctggtcctgctcctccggcacagagggcacctccacgcacagctggccgtcaaaaggaatgcccctctctgccagggccagcatataccccattttcctgtcattgttatacagcagaaagcggtctccggacaggcaggcaatccttacatggcccagattcagcaggtactcagccgcctccctgcccgcgagcacattgtcgttatccacatagatggtctggttcacattcctgcatgcctttcctatgagcacatacagcagtccctcttcatagagataatccagaaccgggtcctgctccctggagtagagcacgataaatccctctgccaggccggttctcgccatggtctttatggcctgcagaacctcatcctcattctgtcccgtgatcacggtattgatgtactgcttctggttgcaatactggctgattccccgtatcatctccagatagaagggattctggtaagcctcccactccgacgggggcagaatgattcccacggtgcgggaattctgggtggccaggctgctggcttgaaaattcggttcatagcccagcttcgccatggcctgccggaccttttccttggtctggcggctgatagagggatgatccctgcatgtccggcttacggttgacggcgacacccccgcaagggcagccacgtctttgattgtaacaggcataaacagcctccttaatatacgtttcattttcatcgtcacggggatgtatatatacatgttgaccgaatccatcaccgcaatccatatacatccttcctatattgtaaagtttaatgcaatttttgtcaactcgtttgcgctctttttgcgtaatcttctcccgttcgtttgcattcccctttaagaaaactgcacaaatacctggcgctgtttttgttcaaaacgtagaaaacaaaggattctcaaaatatctattgcattcttcagacagccggactatatttaatgcaatcggttgcgtaaataatgcaacaatcaaactcaggaggttacatatgaacaagaacactgacggctgtattggaatcaggattctctcccctttaaccggaacagcggttccattggaggaagtgccggaccctgtattttcacaaaaaatcataggagacggcgttgccatcctgcctcaggacggcaatctggtcagtcccattgacgcagaggtggtttccattgcagagaccctccacgcctatggcctgcgttcagagaacggcatagaggtcatgatccacttcggcctggagaccgtggccttaaagggagaatgcttccagtgctgtgtaaaggttggagataaggtaaaggccggcgaactgttggcaaaagccgatttaaaggcccttgaggaaaaacaggtcaataccatcacgcctgtcctcatctgcggcggaatggaaggccgctccatgaatgccttcacaggtcctgtaaaggcgggaacagatgccgtgataacggttttagaccattgtccgccggtcgggaccgcagaagctgagacagccgccctccaaaatccagacggcgccccggcggcaaatgcgtcttccctcacagacaccgcggacaggaaaacaggaaagacccgaaaatccctgataaattttgactttctccaaaagctgggcaaggttctgatgacagtcattgccgtcatgcccgcggccggactgatgatcagcgtaggaaagctgatacagatggcggcatccaggccatctacggaccaaaagcagatgtgctcaaatccgatatcaatgatatactgtaaacaggccgctgccacttacgcaccgcagctgccctctgtaactgaaaaccaccggaggcaggtaatatgaaaataatgacgcttaacacacacagtctggcggaaccggaatatgaatccaagctcgctgcctttgccggctcccttgtccaaatcaaaccggatatcatcgccctccaggaggtcaaccagtccagggacgctctccccgcagcccccggccggctgcgggaatcctgctacgtcccctgccgcgccataggcttaagtacggactccccctgcgcgccacgcgcagttatccgcgcagacaaccacgcctttaacctggcgctgctcctggcccgggccggtgtttcctatcaatggacctggactccggccaaggcaggatacggaatatacgacgagggcctggccgtcctcagccgttctcccatactggggaccagccagttttacatcaccggcatccgggattatgaaaactggaagacccgtaaaatactcggaatcaacacccggacagaatgcggagatgaatccttttacagtgtccacatgggttggtggaatgacagcgaagaaccctttgagggacaatggaaacgcatatccaggggcctggcccccttatccggaaaacagctgtggctcatgggggatttcaactccccggcccatgtaaccggccagggacgggacctgatactggcctcaggctggtttgacgcctacgacctggctgtctccagggattcaggcgtcacggtggcaaatgccattgacggatggagggaacagggagagatatcgggaatgcgcattgattacatctggaccagccgcagggtgccggttatttccaccaaaaccatatacgacggcatatccggcccccatgtatcagaccactttggaatcatcacagaatattaaacagggcaatgcctgcaaaaaacgaggagcatatagaaatgaaacgagaaagcggaatcttactatccatcgccagccttccctccagatatggaatcggctgcttttcaaaggaggcctacgaattcgtggaccgtttaaaggaggccggccagtcctactggcagattctccccctgggccccaccagctacggtgattccccctaccagtccttttccacctttgcaggcaatccctatttcataagcctggaggaccttatccgggagggtgttcttacagaggaggaatgcagccgggccgacttcggcagccggccggattccgtggactacgcaaaggtttacgaagaacggtttcccctgctcagaaaagcctatgagaggagcagcataagccttgacccggagttcaggaaatttatggaggaaaacagatggtggctggaggattactccctcttcatggcagtaaaggcccggttcggccaaactgcctggacccagtgggcgcaggacatccgcctgcgctggaagaacgccctggattactaccgcagggagctgtattacgacatagaattccaccaataccttcagtttaaattcagccagcagtggaaaaaactgaaagcctatgccaatgccaacggaatccgcatcataggggacattcccatctatgttgccatggacagcgccgacacatgggcccatcccgaactctttgagctggacagggacaatctgcccaccgcagttgcaggctgccctcctgacggcttttccgccacaggacagctctggggaaatcccctgtaccgctgggaataccaccgcagcacaggctatgaatggtggctgtcccggctggcctactgttataaactgtatgatgtggtgaggattgaccatttccggggatttgaccagtactattccattccggccggttccgccactgccattggaggccattgggagcagggaccgggaatcggcttcttccacatggtaaaaaacaggctgggagaaaaggaaatcattgccgaggatctgggatatgtgacagactctgtcagacagcttgtaagagaaagcggatttccgggcatgaaggtgctggaatttgcatttgattccagggattccggctgtgccagcgattatcttccccacaattaccctgaaaactgcgtggcctacaccggcacccatgacaatgaaaccatcaaaggatggtatgcctccatcacggcccaggagcgcaatctggccagagattatctctgtgacagctgcacccccgcaaaccgcctgcacatgtccttcatcagcctgattatgcgcagccaggccagaatgtgcatcatccccctccaggattacatgggtctggacaatgactgccgcatcaacactccctccaccattggcaccaactggaaatggcgccttcttcccggccagatatcggaccagttagtaaaaaccattgcctccgtcacactgcgctacgggcgctggaactggtgacagggcatgggatagacgaaacggccgcaggccaaatccaagagaatttggcctgcggcatttactccgtatatgtttactgatttcttataattacacctgtcagtatatggcccgttccctcaccagcacagtggggtaccccatgtttctcaggttcctctccatctgcaccgcatagtccatattgaggaaagcaccgaccctcaccttgtacagcccgtcgtcgtaaaccaggaaggccgggaggccgcttgcctggagctcattcaccagcctgtctgcgggcatcctggtgcggaaggctcccacctggacctgataatattcaggccgttttgcctcctgctgccggatagtttccagcacaccgtctgctatggcctgggcaatggcgtcgaaattctcatcaaaaaaccggttgtcttccggattatcaataaatcccgcttctaccagtacagcaggcatctgtgtctttcgcagcacgataagtccagggcgctcctgtactcccaggtccctgaaccctgtttccaccagattgcgctggatattatccgccagcatggcaggcacgcctgcatcctgatacaccagcgtcatggcaccgcttgcccctcccggcacagggaaggcattccggtgaatggacacaaaataatcagccccggactggtttgctatctgggccttctccagaggtgtgtcgtatatatccgtagtcctggtgtataccacatctaccccattattttccaatatctgtcctatggcaagagccagccgcagggtatcatctttttcccggcgcccgtcgtacatagcgcccggctcttcgccgccgtggccggcatcaattatgactctcttaacatctgtcataccagattctccttcatatatgactctacattataccatatgtgaaagtaagacaaatgttgactgaacctggaactaaatttcgtccacatccacccctctggggcccacatgggtggaaaatacgatttgtgtgcttgtcctgccgaatttctgcagctgccctatgaacatataccccagcttcaccgggtcaccccagcttcaccgggtccaccgcggcatcacgccctgccgccgttactgcctgagggcctttatccgttttacagcctccaccgtattctcataggtgccaaaggccgtcaggcggaaatacccctggccgctgggcccgaagccgcttcccggtgtacccaccacattggcctgttccagaagataatcaaaaaactcccagctgtccatcccgtcctccaccttaagccagatgtaaggggaattgattccgccaaacacggtgtagcccgcttccttcagcccgtcatagataaccctggcattcctcttataatacgccacctgctccatgacctgccggctgccttcttcggaatatacggcttccccggctctctgctcaatatagggggccccgttgaacttggtgccgtggcgtctggcccacagcgaatggagcgtcacatccccgcatttcaaatcctttggaaccacggtaaatcccagacgcacgcctgtgaatccggctttttttgagaaggaacggaactcaatggcacaggtcctggctccctgaatctcaaatatactgtgaggcacatcctcctcggatatatatgcctcgtaagcagcatcatagagaattacagcccctatcctgtttgcgtagtccacccacacctttagctggcccctggtcagcgtggttcctgtagggttattgggcacacacaggtaaataaggtccggtgtttcctccggaagcgccggtacaaaatgattccgcgccgtacagggcatgtaaatcacattgctccacacgcccgtggcagggtcataactgcctgtgcggcctgccataacattggaatccacatacacgggatatacggggtcacacaccgcaatgcggctgtcctcgctgaatatctcctggatattgccgcagtcgcttttggctccgtccgatacgaatatctcgtccgcctccacatggcacccccatgacttgtagtccttttccacaatcgtctcacgcaggaaggcatagcccaaatccggcgcatagccgtgaaatgtctctgcatgtcccatttcgtccgccgccttgtgaatggcctccacaatggccggggcaatgggaagtgtcacatccccgattcccagccgtatgacctgcctgtccgggttggccttttcatatgcagccactttttttgcaatggcggaaaagagataggtgcccggcagcttcaaataattttcattgattttaaacatgtccgtttcctcctgtcctctgtctctgataaataggaaaacactcccaaaaaccggatacacctttcgccgcgggacacattgccatgtctttcccatgaccgcctgtgtgccgcaaaagatgtaccaggacgcacgccatcgtgcgtctggttcctgagagtgtatagtaaacattttcgctttaaagtattaattgatgaaattcgcctcatcaatcataatatatttcttccggtatgtcaatagagccccggaacacctccacggccggccctgtcataaacagatggccggactccctgtcataccgtattaccagctttccaccgcgcagagccacctccgcctcatcctccgtatatcccatgaggatggaagccatgacgctggccgcggcccctgtaccgcatgcccaggtttcaccgcttccccgctcccacacccgcatatcaaggtgtttccggtccaccacatgaatgaactccgtattcacacggtcaggcgcaaaccgagcatgattctcaaaggccggcccaatccgctccaaatccagactgtccacctggtccacatagtagattgcatggggatttcccacattgattcccacaaacctgtattgctccccgtccaccgtaatatcctccggcagccgggatgtgagggctgcctcccccatatccacggtaacagacaccgccctgccatcctcagtctccaactccagcgtcttgattcccgccagtgtctccactgtgatggtccttttatccttatccaccagaccgtggtcgtaaacgtattttcccacgcagcgcacaccgttgccgcacatgattccctgggaaccgtccgcgttgtacatctccattctgcagtccgctgtccgggaggggtatatgagaatcagtccgtccgatccgacgccaaaatggcggtcgctcacatagaccgctgtctttgccggatccctcaccgtctccttaaaacagtccacatacacataatcattgccggttccctgcatttttgtaaattccatatccgtctccatcctgccgtgttacaggcattctataaatatttcccttccccatcacacatgaatgaggctgattaccatctgggctgtctccaccagattggtgccgctgtccatgctgcatttctgtatataccggtgggcttccgactccgtcatattgttccgttccatcagcagtgtctttgcctctgttatgatatcctgttcctccttgctgcgctccctgggcctgcttcttctccttctgcggattctctcctgggcctgcaccatcatctccagggtattcagcagatcgtggacctttaggggcatgggcaggcagatgaccctgtccggggactgtccgctccacctggcaggtgatgaaatcagaagcatctcaaattctcccggcaggcactggcgcagttcgtcgtacatcatatcctcaaaccggtaaccgctcaccacgattcccccgttcaggcagtccgcggccgacagaacctgacctcctgaggtacagactgcgactacctggaaaccgttgcggaccagtatgctttttatgttcttcccgtcctccggcttggagaacgctacgataatgttagtcacatgtcccacctccaggtaaaaccttattcacaactgccggcgccatcaatatttgtacagatactggcttacttcccaatccgttacctgggcccggaaatcccgccattcctgctccttggcctccagatacttggtataaatatgctctcccagaacctccttcatgaaggaatccccgttgtacgcctcaatggcatcacccagagtctccggaatccgctccacattcctttccctcagctcctccggctccatggtaaacatatttccctccacacacgcgggaagtccgattttcttctcaattccgtccaggccggccgacaggcaggctgccaatgccagataaggattcatggcagaatccgggcatcgcagctcaatccgcgtgctctcccctctgggggatggtatgcgaatcagggaactgcggttggaggtaggggaccaggcaatataaatcggtgcgtcgaatcccggaatcagcctcttataggaattcacaagggggttggtcaggatggtcattgccttcatgtgcctgaggatgccggccatgaaataataggcgtccctgctcagtctcaaagcatcctggtcatccgcaaacaggttcctgccctccttgtctgacagggacatattgatatgcatgccggaaccgttcatcccttctctgggctttggcataaaggtggcatggagcccgtggcgctttgctatggttttggcagccatcttaaaggtcatgatattatccgcggcccgaagcgcatccgtatactggaaatcaatctcgtgctgggccggcgcaatctcatgatggctggcctccacctgaaaccccatctcctccaggttcagcacaatatcccttcggacattttccgccaggtcaatgggggacacgtcaaaatatcccgccatctcatgtgtgctggtggtgggcctcccctcctcgtccgtgtgaaagagaaagaattcacattccggccccacattgagcacatatcccatgtcctgcgcccgctttacagcccgtttgagcacatatcttgggtcgccggaaaacggggttccatttgggttatacacgtcgcagataaacctggccaccttgccctgctggggcctccacggaaacacctcaaaggtatccaaatccggatacaggtacatatccgactcgtcaatcctcacaaaaccttcaatggcagagccgtcaaacatgcagcggttatccaatgccttttcaagctggccggcagtgatggccacattcttaagcattccgaagatatccgtaaactggaggcggataaactccacatcctcatcttccaccatacgcatgatatcctctttactgtatttgctcatattaatctccctctcttgcaaactgtgataccgacaaacacgcagaggcgggaacctcttaccatgctcccgcctccttaaaattcaccgggcagggacagagcgccccttaagacgtcctcgtcaaccttcccttacccctgctttttgttataaaaaatatatcagcagatatttcatttgtcaatgaatttcctctatttttttgatatcactttaacgcgcgaagctgttctgtgaaatggcttcccagtttaatggtccccacataccccacatcgccggtcatgtgaaccacaccttccccgtcgatctccagctccagggtgcctcccggcatctgcacaaacatcttggggtccgtaagccccagacggtaagccgcagccgcagccgcacagcagccgcttccggaagccagggtatagcctgctcccctttcgtatacctcggtctggatgtgggtccggtccagtaccttcatgatttgggtgttgattttctccgggaactgtttggcgctttcagaataccttccaatcctgcaaaccaaatcctttgaaatctcatccataaggataacgcagtggggattgccgatggacaggcaggtaaccggatagggaatccggccaaacaccatggtctcgttgatgatttccctgcgcggtccctccaccggcacatcgtcactccagaaggaaacctttcccatggatgcctttaaccgggtgccctcctcgttgagataatggatggcggcctcgccgccctgggaggaaatggtaaaatcctttttctgtacgtaccccgcgtcctttaagtatttggcaaaaatgcggacgccgttgccgctcttttccgcaacactgccgtccggattccacaccaccatggaaatctgctctccgtccagaatgggtccctccagaacaccgtcagctcccaccccaaaattgcggttgcacatgagctgtacattggaaggggtcagcttcagtttatttttgttggggtcatataccagataatcatttcccagtccatgatacttttccactacaatcctcatatagatatcctccatatctgcggtctgttcaacagctctgcttaccggcagcacaacaggttctccgcctgtaagctttatcattattttatcaagcacttttttataaaaatatagatatattgctattttatattgcaaataatgctctatttattttatactcaaattataaacccatcacatgcagacaaagcatgtaaaaaaggaggtaactgtttcatgcccatcacagacaacgcccctgcatttgaacgccagggattcctgagggaggacttcaggctgttccatttaaaagacaaggtaagccccagctacgaattccactaccacgattttctgaaaatcatggtgctgctggagggcagggtaaactatgtcatagaaggccgttcctatatccttcacccctttgatattgtgctggtgggacggggacagattcaccggccggaggtggagccggggcagccctatgagcgtcagatactttacctgtcccaggattttctggaccgtcacagggaaaacggagactccctggaccggtgttttgccacggcagcctaccgccattctaatgttctcagactgaaggatgaggtcagggcaaacatgctctcccttttaaaacggctggaacgctcccagagctggcggcaggaagaatttgccgggtccctcatgagccgccttttatgcctggaatttctggtggagctgaacagggcctccatggacgataaggcccagtaccttcccacaggtgtcttaaactaccgtgtctccggccttatatcctatataaatgaacatctggacgaggatctgagcatcgtgacattgtccgccgtaagctgcatcagcccataccatatgatgcgtattttcaaggaagagacaggatgcaccataggaaattacatcaccgaaaaacgcctgctttacgccagggacctgcttggggatgggataaatgccacggacgcctgcttccgttccggcttcagccactattccacctttctcagagcctacaaaaatcacttccaccagctcccaaaacggaacccgggcactaaaatataaagtatttctcaaattttcttgaaatttttctgatttctgttataatatactcattgtttttccgttgaggacagttgtctttgtaaggtgaacacgcgaaaacaaactggaccaggacaaattcaatgaaacaggaggaatgtattatgagaatcagaaaggtattggcaattgccatggcagcgtgtctggccgccggcaccctggcagggtgcggcagcaggaaatcagacgaaaaagtcatcaaaatcggcgtattcgagccaaccaccggagagaacggaggcggcggttaccaggaagtactgggtatccgttatgccagggaaatgcatcctagcgtcaacataggcggcgaagaatataccgtcaagctggttgaggcagacaacaaatcggataaaaccgaggctgtcaacgccgcccagaagctggtaagcgagaaggtcagcgtggtgctgggaagctacggttccggcgtgtccatagccgccggacagattttcgcagacgccaagattccggccattggctgttcctgtaccaacccccaggtaaccgagggaaatgatttctatttccgcgtatgcttcatcgacccattccagggcacggtcatggctaattacgcgtaccagaacggcgccaagaacgctgccgtgattacccagctgggcgatgactattcctcaggccttggttcctatttcaaggatgcttttgccaagttgggcggcagcatcgtcagcgaggaacagttccagacaaaccagaccgatttcaaggccatcctgaccaacataaaggcagctgaccctgacattatctttgctccatcctccatcaccactgcccccttaatcatcaagcaggccagggagcttggaatcacagccaccatcgctgcaggcgatacatgggagaactccaccatcatcgagaacgcaggagctgactcagagggcgtagtgctctccaccttcttcgacgaggcggaaccggccaacgacgaagccgctgccttcatcaagggcttcaaggaatacctggtaaaggaaaagcaggaagacattatcccggctgtctccgccctgggttacgattcctacctggctgccatcaaggccattgaggacgcaggctccaccgataccaccgctatccgcgatgcgcttaagaatgtggagattgacggtgtgacaggaaatatcaccttcaacgagaccggcgatgccaacaaggatatcgcgttcatcaagaccatcaaggacggcaagttccagttcctgaccaccactaccgtagaatagggtatctggctaattacatatggatacagggccgcaggcggcatccgctgctgccttcggtcttaaccagccttggacgttccagggctggttgtatgtttcaacggatttctggatacggaccttactataaaaacacaggaggcagactcatatgagtttaacaacatttcttcagcaatgcctgaccggcatctcccttggcggggcatatgcgctcattgccattggctacaccctggtctacggcatcctccgcctcatcaatttcgctcacggcgatatcttcatgatggccggatactttatgatatttgcaatggcaagcctgccctggttcattgccattcccgtcaccctgattgtgaccattcttttgggcgtcaccatagagcgggtggcctaccgccccttgcgctccgcacccagaatgtctgttatgatttcagccattggtgtttcctaccttttgcagaacctggccacctacctctttaccgccctgcccaaaggatacccggagattcctttcttaaagaaaatctaccggataggcggactgtccgcctcctttgtcaccttccttacgcctgtcctgaccctggtactggtttatcttctcattctgctgattaaccacaccaaaataggcatggctatgagggcggtttccaaggattacgagacagcctcccttatgggcattaaaatcaataagaccatcacctttaccttcgcggtggggtccctgctggccggtattggctccattctgtattttacggaccgtatgaccgttttccccttctccggcgcccttccaggcttaaaatgctttgtggccgccgtgttcggaggaatcggcagcattcccggagctgtcatcggaggttttatcctgggacttggagagacggccctggtagccatgggacagtccaccttcagcgatgcatttacgtttatcctgttgattgtcatgcttctcatccgtcccactggactctttggtgagaagacgaccgataaagtgtgaggtggcggacatgaagaatatgacaaagaacaaaaacaaaatatattccctcattgccctggcggtaatcataggtttcctggcattcctgcagtctgacacagccgaatacagctaccagatttccattctggagagaagcgccatctatgcggtggtggctgtttccatgaacctgctgaccggctttacaggtctgttctcgctgggacaggcaggatttatggctatcggcgcctatgtggtggctatctttaccattccggtgggatccagggccagcgtatactatgtaagcggcatatcaccggtgattgccaatatccagctgcctatacccgtggctctgctccttggcggactggccgcagcagccatggctgcccttatcggaatcccggtgctgcgcttaaagagcgattaccttgccatcgcaaccctgggcttttcggaaatcatccgggcattcatagcagctcccatgtttgacaccattaccaacggttcctacgggcttaagagcataccgggctttcccaatatctttgcggtattcgttctggccgccctgtgcattgccctgatggtgcttctcatcaactcctcctacggcagggcctttaagtccatccgggaggacgaggtggcagcccagtccatgggtatcaacctgtttcattacaaggagctctcctttgtgatttcctccttcttcacaggagtgggaggcggaatgctggccatgtttatgcgatccattgactccaaaaccttccaggtggcccttacatatgatattctgctgattgtgatcttaggcggcatcggcagcgtcaccggcagcgtggcgggcgctttcctggtcaccgcaggcagggagctgctgcgcttcttcgatgagcccctgaccattgccggggtaagcattcctctgttccgatccggattccgtatggtcattttctccatccttctgatggccgtggtcctcttctaccgccgcggtatcatggggaaccacgaattctcctgggacggactgttccggctcatacagagcattcctgacaggtttaagggaggcaggaaaaggccctcttccgctaagaagggaggcatccactgatgaacaacatgaaaaacagtgtaaaaaacgtattacatatggaaagcatcaccatgcagttcggcggcgtcgtggcagtgaacggactgacattggatgtaaatgaacacgaaatcgtggccctcatcgggcccaacggcgcaggcaaaaccactgcctttaactgtgttaccggtatttaccagcccacctttggttctgtatcctttaacggggaagtcatactggccgatacgccccagggcaagatgcgccgcctctacgagggcgatgtatcccccacggacctgactcctgtgcgcaagacaccggaccagattaccaagctgggcattgccaggaccttccagaacatccgtctcttcggcgccctgaccgtgtttgaaaatgtcctgattgccaaacatatgcgggcaaagcagaatgtattttcggccacactgcgcctcaaccatgccgaggaaaagcgcatgcgcgaggagtccatggcgcttctggaaatgcagggactggcccatttaaaggacgaggttgcctcctccctgccctacggactccagcgccgtctggaaattgcgcgggctctggccaccagccccagccttcttcttctggacgaaccagcggccggcatgaatccacaggaaacccaggacctgactgattttatccacaaaatcagagacgattaccacctgactatcttcatgatagagcaccacatggatctggtcatgcagatatccgaccgcatttacgtgctggatttcggcaagctcatagcccacggcacgcccggccagatccaaaacaatccaaaagtaatagaagcatatctgggggtgagtgaagatgctgaagattaatgatttaagagtgaattacggcggtatcgaggccgtaaagggaatcagctttgaggtgccggagaaatccattgtcaccctcataggcgccaacggagcaggcaagagcaccaccctgcgggccatcgcagggctggtgaaagcctcggcaggctccatccagtttgacgggacagagctgttaggcatggatacccccgatattgtgtccaggggcatcacccttgttcccgagggcaggcgggtgttcccggacatgaccgttattgagaacataaaaatcggagcctatttgagaaccgatttcctggaccatgacatagaatgggtctacagcctgttccccaggttaaaggagcgaagctggcagctggcaggcactctgtccggaggcgagcagcagatgctggccgtggccagggccctgatgagccatccaaagctgatgatgatggatgagccgtcccttggcctggcccctctcattgtccaggatatattcaatatcataaaggaaataaacaaacagggggtaaccatccttctgattgaacagaatgccaacatggccctgcgcattgcggaccagggttatgtgctggaaacaggccggatatccctgtcaggcaccggcagggagctgctggcagatgaatctgtgaaggcggcttatctggggaagaaaaagaaatagcttcactgcaaactggtatacccataggcgttcaccaatgcgtccagtttctttccctgtttacacagcgggcagtccctgtagtcataatacgtataatcaggcaaatccttcctgccaaaaatagacgtgatcctgtatccgttgagctcctccaatgtgctgaaaatagcggtaacagctctcaggttgcctccgtaataccggatggactcgattcccttgttcagcgccagacctgtggtcacggacgcggtcaggatgatgacattcttatcccgaatcatgggtagtatgttctccttgaatatcatctggctgttgctgttgaactccggagtcacaatgtagatggttttatgggcattcatggagagaactccggcgctggtcagttcctctgccaggaaactgccgatgacctgagttccctcaagacacacaatggtatccaccacagtgtcatagaggaacagccccgacaggctccctgcaatctcctgggcctcgctgagcctggtctttaaggtagtcatatccagataataattgatatgggcatggttggtggcaaagtgtcccggtgtaaccttaagcggtgcattacagccggtggtatgtatcttaacatacttattatccataaaagcgcccccttttacaatggtacggacatcggtttccatatgtattattatactaaataatcctccccggtacaagagcaatccggctgtcttaccattttccgctaaaaattacgaacatcctgttatgttcagatcatcccacccatcctgtaaaacaggcgccgtcactgcttccccgcagcttcggcgcctgttacttttatcactcaatcctacagatttctgtcatttccgggatgactccacactgtatcctccggtttattctctgaatcattatttccgtctgaatcctccggtcctgtctggctccccggattcacctgttctccctggccaacctgagctttcgggtttgcacggggctcctgtaaagccctgcctttgtcctcatcctcttttgtttcctccggctcaggaatgcccttaaccttgcggaatatcttcatgaattccttacctgtgatcgtctccttgtcaatgaggaatgcggctatctggtccatggcatccttgttatcgcttaagagacgctttgcctcatcgtaggaatccttcagtatcttcatgatctcctggtcaatctcagctgccgttgcatcgccgcagtttaatacggcccgtcctgtcaggtactgattctcctgggatgcaagccccatgaggccgaatttatcagacatgccatactgggtaaccatggccctggccaggtttgtagcctgctggatatcgttggctgctcccgtggtaactgtctcaaatacgatttcctctgcggcacgtccggccatcagctctaccagcctggcctccagctccttcttcgtattgaggtacttctcctcctccggcacattcatgacatatccaagagcacccattgtcctcggcacaatggtaatcttctgtaccggctccgaatgcttctgaagcgcgcttacaagagcgtggcccacctcgtgataggatacaatacggcgctcttccctgctcatgatacggtccttcttttccttacccacaaggaccacttctactgcctcaaacaaatccttctgtgacacggcattgcgcccgtgcttaaccgcattgatggctgcctcattcatcatattggccaggtcagcgcccacagcgcctgaggtggccagcgctatctccttaaagtctacggattcatccaggagcacatccttggaatgtaccttaagtatattgatacgcccgttaaggtccggcttatccaccaccacgcggcggtcaaaacgtccgggacgaagcagggccggatccaggacctcaggacggttggtggcgcccagcaccagaagacccttggtggaatcaaatccatccatctcggaaagaagctggttcagggtttgttcacgctcgtcgttgccgcccatacggctgtcgcggctgcgtccaatggcgtcaatctcatcaataaagataatacatggcgcattctcagtggcgttcttaaacaaatcacggacgcgggacgcgcccacgcccacgaacatctccacaaagtcagaaccggaaagggaataaaacggcacatgggcctcgcctgccactgcctttgcaagcagggtcttaccagttccgggagggcctaccaaaagggctcccttgggcagcttggcgccaatcttggtgtatttgcccgggttgtggaggaaatccacgatttctgtcagcgactccttggcctcgtcctcaccggccacatccttgaaggtaatgccggtttccctctggacatacatcttggcgttggacttgcccacgcccatgattccgccgccgcccatgcgcttcatggtgaagttcataaggaacagcaggaacaggaacgggacagcgtaattcaacaggaccagaagaagggtgctgctgtcgctcttctcacggttggtaaccacgttattatccagtatcctgttgacgaagtcgtaatcgccttccagtctcaccacataataatccagattctgggaatacttagtattacccttcttagggatgaccgtgatttccgtgctgcccaccttgatggagtccacctcgccggcttccaccatctggacaaactcattataggacaactcctgacgcttcttggaattcagatagttgttcatactgctgaccacgataaatgtaagtatggcagcaaccaccagcatggttatggtctgccagttacttttcatattcgggtcctgtttgttgttattatccatattgtacaaattctccctctgaatgggtcatctatcaatttccagcaaaaacccattctctaccattatagtgtcagtctccccataaatcaagaaaagaacaattaattttcttaaatttttgcaaaaagccctggatttattctcggtgaggatgtataatgtttcagttatttttttgatactatatcaaacaagtcacacgacacccacaacaagaaaaggaggtatccccatcatgccagtcaagtacgtattcgtaaccggcggcgtagtctccggcctgggaaaaggcatcaccgcggcatctctcggccgcctgttaaaggccagaggctacaaagtgaccatgcagaagttcgacccctacatcaacatcgaccccggcaccatgaacccggtccagcacggagaagtcttcgtgacggacgacggcgctgagacggacctggacttaggccactatgagcgctttatcgacgaaagccttaccaggaattccaacgtcaccaccggcaaggtctactggacggtcctgcaaaaagaacgccgcggagacttcggcggcggaaccgtacaggtaatcccccatattaccaacgaaatcaaaagccgtttccaccgcaactacacggaaaacgagacggaaatcgccatcatcgaggtcggcggcacggtcggcgacatcgaaagccagcccttcctggaggccatacgccagttccagcacgatgcaggccccggcagcacctgcatcatccacgtaactctcattccttacctgaaagcctcagaggagcttaagaccaagccgactcaggccagcgtaaaagaccttcagggaatgggcattcagcccgatatccttgtctgccgttccgaactccccctggacgacggcataaaggcgaaaatcgcccaattctgcaatgttcccaaacatcacgtactccagaacctggatgtggacgtgctctatgaagtaccccttgtaatggaggaagagcatctggcccagtccgcctgtgaatgcctggatctgccctgtccggagccggacctgacagactggaaagccatgatagacgcctggaagcatccggagcaggaagtgaccgtggccctggtaggcaaatacatccagctccacgacgcctacatttccgtggtggaagccctgaaacacggaggcattgccaaccgtgcggccgtccatataaaatgggtggattccgagacagtcacaccggaaaatgtccctcaaatcttcaaagatgtaagcggtatcctggttcccggcggctttggcgaccgcggtattgacggaaagattcacgccatccagtatgcccgggaacaccgcataccattccttggactttgtctgggaatgcagctgtccattgtggagtttgccagaaatgtggccggatacgcggatgctcacagcgtggagctgaatcccgccaccacccatcccgtcatccatctgatgccggaacagaacggagtggaggacatcggcggcaccttaaggcttggatcctatccctgtgtcctggacaaggcctccaaagcttatggcctgtacggcgaaaccacaatctatgagcgccacagacaccgctacgaagtcaataacgactaccgcaccgtgcttaccaaatgcggcatgatgctctccggcctgtcccccgacggacggattgtggagatgatagagcttccgggccatccctggttcattgccacccaggcccatcctgagctcaaatccaggcccaaccgtccccatcccctgtttaaaggtttcatagaggccgctttaaagcaaaagggatgtaaataatcttaaaaaagccgcggcatcgtcagcggaaattccacaaaatagggccgccattttgaaagaaatggctgccctgcttttgatttgccagtatgaatcatctgcctttgcgcaaactatatctaagattcaatcacaagcgcatcacaaggaggtgaatcacaattggatcacaaggaaaaagacgattttgacgttgacatacaagcctgctccgccatggactgcaccggcctgattccttccctgccccaggatgaggcggaaaaggaagcctatgaggacctctatccctatgtcaccaaggctgtttcatcggacaaggaataacggaaggcaggcaggacggcacagtacaatgccgcacaaattaaaacggagccgaggccctttgcctttgctccgtttcgttttatacatcacccatgcataaatctgcttaaaaactcctgggtctgaagctgtttgggcgctccaaatatctgagagggttctccctcctccacaatcactccccctgccataaataccacatggctggacacatccctggcaaaggccatttcatgtgtgacgataatcatggtaaggccctctcctgccagcttgcgcatgacctccagcacctcgcccaccatctgcgggtcaagagccgaggtaggctcgtcaaacagcagcacctctggttccatggccaatgccctggcaatggccaccctctgtttctgtccgccggaaagctgtctgggcttggcgttgatataaggcgccattcccaccttttccagataatacatggcattcttatgggcatctgtcttgttcttcttaagcaccttgacctgtccgataatacagttctccaacacggtcatgttgttaaacagattaaagctctggaacaccattcccaccttggagcggtactggggcgcattgacctttttatcggcaatattggttccatggtacatgatttcgcctgtggtaggcgtttccaaaagattcaggcatctgagcagtgtggattttccggaacccgacgcgccgataatgcaggtcacatccccgctgctgactgaaaagtcaatatccttaagcacaggattggtgccgaaggttttgctcaaatgacggatttctaatatcctgtctcccttcatcgcgcatcctccttcttcttatccttttcgtccggaaaccggtacataccgctggtatgcgccagggtatcggtggtggccaggtcgtagttgtccgcgccgtccatcctgttttcccaccagcgcaggattctggaacaggtgaatgtcatgatgaaatatacgatcatggtgatggtatatgcctcgaaattcatgtacagggctcctgcggcagccttggtcttatacagcagctccgtgacgccgataacagagagcacgcagctgtccttgatattaataatcaggttgttgccaatctgaggcatgatattcctcaatgcctggggcagaatcacatagagcatggtctgtacatgggtcatgcccacggcctttgctccctctgtctggcccggatcaatggaaagtattccgccgcggaccgtctcagccatgtaagcgcctgtattgatggaaagaatgaaataagcggcgccccacatggacatgttgattcctaacataggcagaagcccgtaataaataaacatggcctgggccatcatgggcgtaccgcggaagaactccacataggcgttcagaatcagtttcacgacccagagcacggccctctttaccgggttgtctccccgctcatttggtatggtctggacaatacccacggcaaagcctatgatacatcccaccagagtacctaccagggcaatcttaaggctgacgcccgcgccctggagcattgacataccgtatcggttgaatacgaccataacacggccgaaaaaatctgttggcatatcccttctccttactcttaaacgtactttagcctgacggcaactccgcttctctgcaaatcagtttggtatccctttacagatgccgcggcagtttagtttgccagaggctgaacagagatagcttcatccatcatcttggagaagtcgtcctttgtcatctttgtgagaacgctgttgatggcatcctttaactctgtatttcccttctttaaggaaataccgatattgatatcttcatccgttacctggaaatcagcgtcgccgccgccaaactcaatcatcttgaaattaggataagcgatgagggctcccttgcctgtaggctggtctgtaacaaccaggtcgcacttgtcagcgtttaaggacatgagcatgtcaggagcgctggcagtggctgccaggatattggcatcctgaatctgaggcagacaggtattataccagatggtgctctgctgggaagtacaggtagctcccgccaggtccgccacactcttggcatccgcatatttgctgccttcctttaccagggtaacgatggttgcgtagtaatatggctcagtgaaatccactgcctgaagacgctcagaggtaatggactgtcctgcgatgacgcagtcaacctgtcctgtggtgacagccggaatcagtgaatcccagtccaaacgcacgatttccaggtcatagcccagttcctcgcaaatcttctttgccatcatgacatcgtatccgtaagcaaattcattgctgtccgcaatagccaccgcgccattggaatcattaggctgtgtccagttgtaaggagcatacgcgcattccatagccacgcgcagcgtctttttctctccgctgtccgcccccgtggtatctgctgcggcatcgccctctgccttggcatcgccggctgcggttgttgcctctgcctttgtgtctgctgccgtggccgctgtgccccctccgccgcatgccgtcagggaaccggcagcaaggacgccggccagaatcaggcctaaaactttctttgtactcattttcataataatctctcctcttaaaaatgttccaggctttactgtctaagaaaaaagccacacccatcctcacaggtatgactccactgtcatctgatgaccggcaatcccaaacagctaaaaccttgccctattaaacacggcgcgctttgctttcctaagcgtatatgcgcctaacgtgctaagtataacataactcgttctgttttccaatacccaaatacgtctttttatgcaggaaaaaggtataaataattgtaaaaacagccataaatcctttaactgggaattcatggctgtcatatataatcatttcctactgttcgccttcctttgcactgtccgctgtttcctgaaggttttcctgtgctgtctcctgcgtcttatccttcgtcttgtcccccatcagctcatccatgcgctgtaagaatacatcgtcaggctggatttgatttccgtcctcatccacctccaccgcaaacaggaaggttctggcatcgttgatttcatagctgcatgtaaccagggtatacagggtcttggccggatatgtaatctcgtcgccgtagccgcacggcttcaccatctcatgcacaaaggcgtcaaaggattcctgggatttaaacctggtcttgcgcacaatgggccgcgcctccccgtagtaggcggccactgcctttaacctgatttcccggtcgggcgtgtagatgctgaaaaactggtgctccttaaaaaatgcctcgtccttataccggttcacatccttgaacatgcttccgttcttcatattatggccgtacagcacattgttccgtcccacaaaatctccctggctctcaaaatccaggtaaatggcgcccgcaatattctccttgccgtaaaaatcatggtttaggtagaaatcattgtcctctccctgaacaatgggataatcgatattggtatccggcacccggatccatccgatggtatccggattccccctcatcagctcctcaaagttgattggagatacatagggctctgtctccggctcccccggctccgtcactgcttccgtggacggctgcgcggtggtctccctggccagcccggccagccgctcatattcttccctggtcctcttgtcctccatccagctgtggatgctcatggcaccgcttaccagcatgacggccagtaaaaccaagatgatgatgccccgtatcctgctctttccttttttctgatccatagatgattatgtgtcctttcccgctgtcatcccgcatggccggaagccgctttaagctcctcgttccatccttcgctgtcagccactgcctcctgcatcagaagcagcatctccaagaagctgcggaaactgacctgtctgcgcttttccttccagcagatggttccctgccaggtggcgttccttctgaacatgatccttataacgaaggtcatggggccaaagcctcccgcattgaccgtgacgcttctgggacttatgatgttcccctcctccccgccttccggaagaggaagaagaaggcgctccacttcgtccctgagttcaaactcactggcaaattcccggcggtccgccactgccggatgggatacgtccccgcccatgacgaaatgactgaaattgcgcacagccacctcgcacatccgcttgccgaggccgtgcttaatatcacttccttgtccgagagaacggtccagatactccatcagctccaaaaagctctgaaaagaataggtaccgccgtttctcaggtcccttatattaccctgccacgtggaatgaaacctgtatttcacatgcaggcagaactcagccagttttccctggagcctcttttttccggactcctccccacaccttaatgacggaccgccatgttttatccccgcaaaggacctctggtccacactcttcatgggatagcggagctcataaaaaaggttttccaggcaaatggccatctccgaaatacagccaaagggtactgcctcctccaggctgtcatggcagatcctcccctgcaacaggcggccatcaaagctgtcaatggctatatttacatatttgtacgaatcctgtagggctccggtttttgcaatcgacatatattcacctgcttttctctaataaattgacatagtaatcccaataagcctgctaccattataacagtctccggttacaatccggttacaaaagaacgccgggctgcttttttatgtatttttttctggacaattatgattctgattagtatacttattttagaatgaccccgcttttgcaaaggagagcagacatgaatgcatccattatagaagataaacctattatttatataaaaaccctgggcggattttccctcagggttggcgataaagagataaccgacaacagcaaccagtcaaaaaaaccctggtgtctcctggagtatctggtggtattccagaagaaatccatcagtcccggcgaacttatcaacatcgtatgggccgacgaccccggcgtcaacccgggcggcgccctgaaaaccctgatgttccgcagccgcaggctgctggagcccctggggattcctccccagaagctgttagtccagcagagaggttcctattgctggacgcaggactattcatccgtccttgacattgaccagtttgagtccatctgtacccgggtcctgaatcaggacatggatgaggctgaagcccttaagctttgccttgagggactggagctgtacaagggggattttcttcccaaatccgaatacgaatcctgggttatccccatcagtacatattaccattccctgtaccagaagctggtctataagacggtggagctgcttaccaaaaaggaggacttctccaggataacctctatctgccagacagcagtggggatagagccctttgacgaaggattccactatcacctggtatactccctctaccgggacggccacaccagccaggccattgaagaatacaaccatacactggacctgttttataacgaattctccatctctccgtcggaccattttaaggatttatacaagtccatccgcagcaaggagcagggtatcaacactaacctggattccatccaggagacacttaaggaggaagcctcaggaggggcattttactgcgaatatcctgtatttcacgacctgttccagctggaacgcagagccattgagcgcaccggcgattccatctatctgtgtctcctgaccatcggtgacctggacggacgggttcccaagacaacggtccttaacaaggccatggagcatctgaaccacgccatccgtgactcccttcgttgcagcgacgtgtacacccgttacagcatcagccagtacatcatcctccttcccaccgtgaccatggaaaagggtgagatggtcatgaagcggatactgagcaatttccgcaagctctgcagccgcagggaactgattgtggattacaagcttcagccggtgcttccctggaagcgctctccggcaggccttcgggaataaacagagttttggcaaatgacaaaattatggcattcatgaatcagaaaagctgcggcattatccttcatcggattccctcccgcagctttttttattttgctttcacaatcattgtgcagcgtctgtggccctgctcctgccataaaaaagctggttcaggttcttcatcacatggcggtaagccggtatgagaaacagatccgcggcgatccaggccacagggctggcgatgcacactgctatgtaaccaaacacagggaccaggcagaagcctacaaaggagcgcgccgccatctcgcatacaccggcaataatggccagcctggaatatccgagcccctgaatcatgaaccgcaccgcgttgacaaacaccagcggaatatagaacaggctgttgccgatgaggaacagccgcgtgttcctcaggatttccccttcccccttatccacgaacataagtgcaatccattgtccaaagatacagagcaccgcaaaggctatgacggcatagacgcagcccatgacagcccctgccttcagcccctgatcaatacggtccagcttcctggcgcccacattctgtccgccgtaggtggccatggtggatcccagggcgtcaaaggggcagcagaagaacatgctgattttactgcctgccgtcacagcagccaccgccatggatcccagtgaattgactgcggtctggaggattacgcttcctatggcggtgatggaatactgcagtcccatgggaattcccatgttgcacagaatcttcatgtaatgggcatccggcctccactcgtcatcattcattttaaggatgtcgaatttctttctcatataaaacaggcacaggattcccgacactgcctgggccgtgatggtggcccaggcagcccctgacacgcccatcttgaggaccagaatcgtaaagaagtccagggccacattcaccacagaggagaacaccagaaaaatcaggggggtggtgctgtctcccagggaacgtatggtgcaggacagcaggttatagagataggtggccggaatgcccaggaatatcacaaagatatagctgtaggccccatcaataatatcctccggcgtctgcatcagctccaggatgttgcggcataacaggcacacggccacggtcatgaccgctgaaaacaggactgccagccatgcgctgttggccacaaaccgtctgagcgctttttcgttcttttctccgaatttctgggccaccggaatggcaaaaccgctgcatacacccaggcagaaaccgataatcataaagttgatggagccggtggaacccaccgctgccagggccttaacccccaggcacttgcccacgatgatggtgtccgccatattgtacagctgctggaacagcagtccgcacagcatggggatgaaaaatcccagtatcagttttaccggggagccttccgtcatatcctttgtcacatttgcggccatgtatgtattcctctctgtttccatgaatttcatcccaataatgtactctcttaacctgcaatttgcaagtagaaaatatcgctggaatccgggaccgggacatacattttacacaatgggccgggaatctgttcccggcccgtaatgcctgttattggtagcagagcacaggcatgcccttatatattaagtcatagagcacgctggctttctccggcggaaggtttatacagccatgacttccgctggtctggaagatggtgccgccgaatttgcttctccatgtggcgtcatggaaaccaatgcccccgttaaagggcatccagtaatccacatggctctcgtactcataggttccgtccgccttcttggctcccctcagtatcctgtccttttccttgtaggtcaggctgtaaatgcctgcgggcgtgtcataattcttggatatattacccgtgacacagggcgcgtcccacaccaggtttccttcctggaacatgtatacgtgctgtcctgtcaggtccacctccgcatacgtgttgccccagtcaggggccgtgcggctggcggccgtcatggcgtatacaggttccctgtccacaggaccggctgcggggccggcctgaatcagggctgccagggcctgtacctcgcctgccacatctattttccagccgtaggggcccgtcagctccacatctttgcccgcggctgtatggaatatgcgggcggttccggccgtatcccttctggacgccatctctgtcacaaaggctgtgattttctccaagtcaaccgtcggcaccccgtcctggcttcctgtgacccaggcggcaatggtctcaccgccaagagtctccttctcatcgccaaacacataattgacgctcatgtcccggtactggttcatgcgggcgcacaaggcgataaggttctcatctgtctcccatatatttacctggtaataacagcctgcgctgtccacatccacagagctctgccctgcttttacagcagcggtaatcacctccgtggtcttggcctcgtccacattatttccctggacagccggtatgacggaaaaaggctgtccctcctcataggaggatatgcgggcatcggaagtgactgtgatgccggagccgcttatcagggtcagagccttaatctttgcccccatggcctcctggctgtaggtcactgtcatggccatggtatgggagttatccgcatccggtcctgagacacgtccggctgcgttctgcgcatccagtatagccttaagtccctcgggaacctccaccttgtaaccgatgtccgcacctgttatggtttcctggcgtccgcctctctccttaatggtgagattgtattcaccggcataaaaaccttcgattctggccttggcctcatccacggtcagtccgcccacgcccacgccgttgacctttgtaccggatacaaagcgggttgtatctccgctctcatccgccagggacacaaacgcccctgccagcacaagcacagccgctgccgtcaaagccgcggccagccttcccatccatgtcctcttccttaacttccgcataaacaatcctgccctgccttttattgatatttactgcattttcttccactcctgcctgaaaacggcaggacgccttctaaacataacagcccttcaccatattttcaatatgaaaatcaaaaatgtaagaattcttcataaaaacataaaatccggggtccctaaaacagggaaacccggattctttcgtatgccaggacctttatcagtccactacctctatgctctcgatgacaggctggttggcctttgccacggaaccgttattgtcttccacctttgtgtcctcacagatggcatccactacctccatgccctctgtcacatatccgaaacaggcgtaatccccatccaggaatgtgctgtcctcatgcacaatgaagaactgggaactggcgctgtcctttatctgggagcgcgccatggaaatagctcccctggtgtgggacagcgggttctccactccgttgttggaaaactcgcctttgatttcctggtcagaaccgcccatacctgtgcctaacgggtcgccgccctgaatcatgaaaccgcttatgatgcggtgaaaggtaagtccgtcatagaaaccgtcctttgccagcttcaggaagttagccaccgtgatgggagcctcgtccccgtaaagctccacggaaatggttccatagtcctttacgttaatcttcacatggtgttttcctgccgctgcctgaatttcctccgaagctgtatccccggcttcctctgaagcctccgatgtcttggttgtctcttttttaaccgcctctgccttggccgcctcttccttggacgcctcagtccgcgccgctgtagtggctgcccctgcgctggtgccgcatccggtcagggctgaaaccgccagtacagctgccgcacatatacacatccattttttcataaattccgctcctctgcttatgggaaaacggtacgccgtccctctgtccggccattttcccgaaatatacgtctgggcgttatgtcacccggactgccagagcatattgtaacacctgcaatgccttcccgtaaaggactttatagaaatatcatacttttgtcacatttttccggccgggaaaggcgcggacggcgaccgtcacccggctgcaaaccacgcacagaaccacggtggccgccatgtcaggaagggtgcttcccacaggcgtatccacccgcatcagtatgcggtaaatcacaaaacccgccagccagataaccaggtttggcagattggcggcctccgcctcatggtcctgccggatgataaaataatccgcaatctgaatggcaatcatgggggcaaacacggaaccaatcagataaaggaaatctgtaatgttgtccatggggtataccatggctgccgcggtgccgatgatggtcactgccactgccgcccatttttccttaatcctgtgtgtgatggatacgctggatacaccggcagagtaggcgtccaggaacgtggtagtcacggtggacagcacaataatgagaagacctgccgctcccagccccgccttgaccatgatgacagatatatcataatcacccgtgtaaatggctgctcccattccgatgacatacataaagcagctcaccaggccgtaaaccacggcgctggccgccgttgccccaaagggcctttcggcctcccttgtataatcgcttatgaggggcagccaggacagaggcatggccacggacaattcaactgcggccccaaagctcagggaaccgcctgcctccgcggacggctccacgttacctgtaaatataacccggcacaaaatgagagtcagtacaaacagagccgtcatggctgccgtattgatttttcccaggttcctgattccaattaaaagccacaccagaatcagaccgccaatcacaagacaccatgcccacagtcccgcgtcataaataccgttagcagccagaccgccgtcataaatcatgatggaggtccagcccaccagctgcaggacgttgagtccgcaaaacagcaggcttcctttctgtccaaagctcatcttcactgtttccatggagcttcgcctggtatgcccgccaataagccccgccacaaacagcagcatgcagccaatcacatgacccagcacaatggctgccagcccctttccaaatcccagaggcgccagatatgtgcctgtcagtatctcggctatggatactcctgccccaaaccatataaggctgttggcagatacggaggttcccttttccttcattctcatcttttccctcatgctcatccctccttaatactcgccccggatggcaaatccatggttcattggtccgcttccttttcccaggtccagctgcgcttccagcgcgcctgagagatataccttggcgcgctccacagccaggtccatatccatgcccttggccagattggaggcaatggcgctggacagggtacagcctgtcccatgggtattggggttgtcaatccgcctgccgttaaaccatttcagtttcttatgccggtacagcagatcattggcatcattgagctggtggccgcccttaaggagtacggcgcagccatagctctccccgatggcccttgccgccttctccatgtcaccgggattatgtatctccattcctgacagcacctctgcctccgggatattgggggtcagcaggtttgccatgggaagaaggacttccttcagcgcctctatggcctccccgctgatgagccgggaaccgctggtggataccatcaccgggtccaccaccacattggctgccctgtaaaacgccagcctgtccccgatggcctctatcaggccgccggaggaaaccatcccgattttaaccgcgtccgggaagatatccgtaaatatatcgtctagctgttcctttaaaaaagatggagtcacctccatgattcctgtcacgccggtggtattctgggcagtcaatgccgttatggcgctcatggcgtataccccgtgagcggtcatggtcttgatatctgcctggatgccggcgcctccgctggaatcgcttccagcgattgttaatgctgttttcatagtcattctccttttcgcattaattttataaagcggcggaaggtggtgcccccaatccgccgccgggaagctccggcgcccatgcctgataccatacagaattgtcccgcgtattaaaaaggcggaacaccaaaacaggtgctccgccggcaattgtccgctatggtccctacgttggcattatccaaatcaggtaatgggtctaagcatgaacagcttactctcagcccacttaagtgagctccccgtttatttacaactaccattatacatggtttcagggagaatgcaatccctttagcaagaacctctccgaaaccgctccaaaacctctctgtcatccgcctatcccagggccctgtccacgattttcaccatggccgtaaaggtggtgtcattgtaatccacatcgaactcgtcccccggctggttcaggatgcgcttaatgctcagtatacccagcccgccatcccttttgctggacagaatcctgcttccgttcttcttaatctgtccgttataggaattttccaccagcatcataaggtggccgtccagccatctgacccggaccaggatgaaccgatgtcccgtcaggcggcggcatgcttccatggcgttttccagcaggtttccgatgacaatgcacagagtcaaatcatccactggcacatgggcggataagtccaccctggctgtgaactccaccccatcctgccttgccctggcggcatactcctgcaaaagtccgtttacggcctggttctggcagaacaccatctcagccgtcatatccagctccctcttcaggttcatcaggtaatgggtccgctcgccccggtccatgttcagaagagcgtggatatgatggcggaaatcatgcttgatgatgcgcacctgttcaatataatccagagtctggttataatgctccctctgctggctgatgagctgcctggcaaactgcagctcctcctcggtcctgcggcggcacatgatttccagggtgctgctcaaaatcagcacgtacagcaccagtatcataacgcacagcgccagatagaacagcacgtcctccagtccgcgcacggccagggaacgggatgaaaatatggtattgttcccaatgaaaaggatgaacagggaaacagacggatatgtcagcagcagggaacaggatcgcctggataactggtcaaagagacggttaaccctgtccctcagccaaaaccgtacaaacacataaaatccgcaggcccacagcagggataccgccacacagatctgtccgtatgtcagggacacatgcccctttaatatccaggacgcaaactcattcagcgatgtggacaggaccgcgaacagccatgcggaaatgtacaggaatcctttcttaagcagggttcccttaaaaaaaataaggagcaccagaaagtaaagacaggaaaatatgccccggaacacaaaaaagacctgggggctgatatggaatacggattccatggatatcatgatgacccacagataaacggatatggctgctatgttctccctgtccctgtgtttcggctccaggcacacaaaaatgggcatcatgcgcacggccagattgatcagattcacaaaaacagtacacgctgcatcgttcataaattcctcatttcagccggtaatggtagtaggcattcttactctgtttataaaaattcctggatatgggaatcatctgcccatccttcatgtaaaaacaggaatcctccagcttatccacatagtccagattcacaaggtaactctggtggcagcgcaggaactgggaatggggttccagaaccagctgcagctcggacagcttctggttgacggacagtatttccccatccgccagtttcacaaaaacgcggtgaagcctgttctcgaaccaggccaggcgctccaggggaagctccacatttacacggttatgtaccacgggcagaacagccttcttcactcccagtctgcgcctcaccacacgctccatggtggcccaaaagctctcctcctccacgggctttaagataaatcccgccgcctccactcggtatccctccacggctgattccagggaagaggtgatgaataccaccaccggatggcccttggcttccgccagtgcttgtgcggtgtcaatgccgctcattccgggcatcagcacatccagaagatacaaatcatactccctgtccgactccagaagctcccttcctgatgcatatgtttctatgcggacctcaatgccttcccggtcaaaaaaccgtccggcatattccgccgcctgaaggcgctcctcttctgtatcgtcacagacagccacattatacataccctggaccccctctctcataaaactgctgtacggcgcacagcctattctatattttattggcatttttgccataagtcaagtttccccgcaaagtatcatattcggtatattttctgcagaaatggtccttattcccccgaagctcctgtggtaaaataatggtaagaaaaatatttcaacaggaggggttttatgggttcaaatgtaattgtaacaatcatcgtaatcgtctacctgcttttcatgctgtggattggatggtactcatccaccaagatatccaccaacaccgacttcatggtggccggacgccgtctgggaccgcttctcatggccggtaccctggcagccacggaaatcggcggcggaagctccctgggcgtggtccagaacggtatgtcaggcttcggactcagcgcatcctggtacataaccaccatgggaatcgcctttatcatcctcagcttcgtggcccccaaattcagggcagccaccgtcaagacggttcctgaatatttccgcaggcgttacgggaaatcctgcggcatcataacagccgtcatcatgcttcttcccctggtgggacttactgccggacagttcatcgcgtctgccgtcatcctgtccaccatgctgaatattgactaccaggtggctgttatcatcgtagccgttgtggttacggtctactccatcatgggcggtctctggagcgttacactgacagactttgtccaggtattcctgattgtcatcggtatgattatcgcggttccctttgccatgaattacgcggggggatggggaaatgtggcatccaacataccggagggcacactgagcctgttccagggctatgatctgtttggaattatctcccttgttatcatgtatacagccactttctccgtagggcaggaggctgtgtcgcgattctacgctgccagggatgaaaaggcggccaagggcggcgcatggctggcagccctggtaaactttatctacgcctttgttcctactatcctgggcatcatcacgctggccttaatcaatatgggcaaattcagctccgcacagtttgagtcagtaggcgcgcgttacgccctgccggtccttgccatcaacaccatgccggcccttatatgcggacttctgttcgcaggcatcatctccgccaccatgtccagttctgactccgatctccttggcgcgggctccatatttgccaatgacatctataaagcagtgctgaagccggacgcctccagccagtccgtcatgaaggtaacaaaaatcgttatgtgcctggtgggtttggcctccatgctcattgccctcttcaacacccagagcattgtatccatcctgatgttctgcttcacattaagagcagccggctccttcttcccatatgttatgggacattactggaagaaggcgtccacagcaggcaccattgcctccctgattgccggaaccatcgtggtagtatatctggagcacgtttccaagggaatgcttttcggcatcaagttcagccagcccatcattccgggtctggcagcagccttcatctgctttatcatattctcactggccatgccgcctgagaaggagaccacggagctgacgcctgaggaagatgattagatacggatttaataggaatttaatggggatttaaacgggatgtaagaacacaatcgaatcatacaaaccattgcagggactgtccgccgccggtgtatggccggaggcggacagtccctgtcttctgctggcactcatggctcttatgatgactttatgatgatttatgattccccttcttccaatcccgcaccacctgcatcgccatttttccggccgtgttcctgttaagaggcataacccggccgtgatagggaaagtataccaggttggaccacagcacctcgtatcctcccttatcatactcttctgcggtgggcagatagctgctgcatccattggtatagccgttaaaaaacagaagcggcgcctccgcctccttccagatgtcaacggcgatccgacacatggcctcattgggaacgccgcacagacagccctggctgataaaaagatactgaatctcaatgtccgcgtactggcgccggattcctccgtccagaaggcgcctcacctcctccagccacatcctcccgtcaattccggcttctctctgcgcctcctctgcaattttccctgccctttccatgtccggcacatccgccgcaaaacggcagaaggaggaacggatttccagacgctccaaaggcgtcatcaccaatgaaccatacacagcatccacggaccggaaaatacgctccgccatctgttccagggccctgcggctctggggcccatattttttcctgtactcctgtgaaaatccgttccgtgccatctcacagcagtgaacctccaaatattccaggttatcctgatgatatttgggacggatatcaccggctgccccctgtaccatcatcacccggcagttatatgtctcctccagccgtttccttgcggccccaatataatctgcggagataaagtaattatccccggacaacacattggcatgggctgtcacacgaataagaaggacctcctttcccttcccatcccgcgcagccagcttcaaaatacctaaccgcccgtccatctggtccggttcattcctcctgtttatccccacggtgttttctccaatcccccaggcagcctccatgggtttcatattgcctgcggcctcccggacagccctgtccgccttcctgcataccatttcaaaataatccggttcctctgcggcattgggcgcgctgtgagtatgggaaaagcataccataatccgctcccgccccgtgtgaagcgccgccgcggccctatcccggataacattggacaggtccaccgtaaagcccagactgtcaatggcaataaggccgcccctgacgccgtcagcctcccataccaatgcctgaagccttaaggaatccatgacgccctgcgatcggttatccggacggtaaaatcccaccatctcagccggactgtccggcgtgatgtccgcctccccatatccggcctgtaccatatcatatgtctgcatgataagacacctcttttcttatttctgatgactctatcctatctcccggaaaatggatatgcaatctactgttttcttctgtagaattctgtactatgtttcccgcatcagcttctccaacccgcaatcgagtaggaggaaggcgattatttcgccttccgacctctcacaccaccgtacgtaccgttcggtatacggcggttcaatcaacttaacatgtaacagccttttcggcgtagtagtcttccatggatacaagaccaaacttagctagtctctctttactgatacaaatgtggagattccagcttctgcacactctggcatatcctttggcatatgaaatgccatgtgccgcatttggcggcagaccaagtttgataagattcttttccctgttctttggcgttttccagtgtttccatatgcacatgcgcagtcgataccgaatctgtccgtccatttttgcgcacagccttttcatgcttccgattttgaaataatttatccaccctcggataagccggttgagtttcccaattttataaccattgcccactccccagctcctgcttgtatatttcttcatctgcgccttgaactttgctgccgctttcgggtgtggtctggctttgtaccctttggcaaatgagtcatagtaaaatccaaaccccagatacttaatgccctttggtttatcaaccctgctcttttccgcgttcactttcagtccaagcttttcctctataaaccgagccacgctcttcattacccgctctgccgcctgtctgctcccgaccattataataaggtcatctgcataccggacgaaatccagcctccttgcttccagttctttgtccagctcatttaacatgatatttgctaacagcggcgagatatttccaccctgcggtgtgccgactaccgtatcttcatactcatcatcaatcattacgccgctgaccagaatctttcttaccaccgatatgacatctccgtcctttattgtccgtccgaaaatcgtcatcagcttgtcatggtctactgtgtcaaagaatttcgctaggtcgatatccactatccagttgtgtccgtcattcatcatttccaatgctttaaggactgcctgctgtgcacaccgcttgggtctgaatccatagctgtggtcgtgaaactgctcctcaaatatcggggtaagcacctgtgccaccgcctgctgtacaaagcggtctactgctgttggcactccaagatttcttgtaccaccatcgggtttgggtatctccaccctgcggactggcttcggcttatacttcctcgtccgcaactgttccttaatgttttcgccgttttccgaaagatatgcgccaagttcttcaacggtcatcccgtccacgcctgccgctcctttattccttacgacttgcagatacgccgcatttagattatccctgcttaatatctgctccatgagactgcttgtgtccatgcgttgtttcctttctgccccttttgcctttgccgcctttgaagtcatcgacaggcgtatgctccggctacgaagtggaacgtacttcaactgattgattgttcagcccttcgctccgtccccattacaggaacttcctcactactatggcttctgctgacttctcacaattcgttgttactacggctaatgagaccgcctgtgagacctccccagttaaggtgcgtgttcttttcctccatgtacctgccgcatttactcgtacttccggcaaccttttggacttcagtgccttttgccaccttatccgtatttccgagccttatatgcggttcctgtccgtcaggtcagaggtttgcttacagcttctttcagattccgtctcacggcggacacccttgctgttcggctatgtgcttcgttgttgcctacgcgcacttgggactttcacccattagaaaacgcccatgctgggcaaacaaaacagggagccgcgcgctgcggctccctgtcgtttacttctgatatataattttccgtatggcatggacagataggcagtacttatcccccagctcctccagggataccccctgccggtaagcatccacgattccggcgttccgctctgccagttccctgcggcagccgctttgctcgccccaggccttgtgctggttttccctggacgggatatagatatatccggcctgtacatattcctgcagctcctccaccaggccatgggggaggactgcctttgcgttgacatatttcatgttggctcactccttattttcatcactcttaaggaagcaaagccagcatttatctcagcggcgcatattactccatgcaggcgccgctgagcttaccggctttgcatggagccagacattgttgtttttctttttattcctgcacatgattttctccttccaaaccgtccttatctctcaattaaaccagattacggcatttctaaataactacggcccaacggttacaggaactcccagaggacagtattcccacagaatatccatcacatcgtttgtaaccgcgatgcagccggaggttcctccgccctggtccccgtgtatctcaattgccccgcctaaaggagtattccagggcggctgtacgcctgccttatttgcctccaggatggcatgatactgttcctcattaatcaggccgtctctcaggccccgctctgcgtcctcggcattgggataggaaagtcccagagccagatagcatatgctctggtcatttctcgtgcacacatagaacgatccggagggtgtgatttcatctccctcctgcaccttgtcccctgtctcagaccgccgtcccagctttacaggccaggttcctatggtctgggcatattgtttcagcgtcagcgtattccccatcttgctgacatagatgttcaccccattgacagaaggctggtaagctgcccccggtcccgcgctctgcccggccagggcgctcagaggaccggctgccgccaggcacagtgccagcgctccggctgcagcacattttctgaatttcatcctgttccatctccttacgcttattttatattttatttagtataccatataatcccaggttctaaaccaatgtaagaaaattgaaaggaaaatatatctattcttctgttttctcttccccataccccagctgcggcagcacattcatgggatggtccaatatcaccagatctgcgtccttatccagatagtgctcctgcttatgtatgattaccatgttccgcccggcaaaatactgtatgtactggcagaacacctcggaagccagggtggtccccaacaataacagggtatccgcctttgttatctcctctgtggtcctggtcatgttctgactgtccaccatctccccaatcagggaaatcatgggccgtatgggaacattgcagtccctgcagattggaatccgctttgcacccgcaatatatccaatgggatactttttcttacatctggggcactggttctggtaaatacttccgtgaagatttataacataacggcagccgcccctgcgggccttgtcatagatgttgctgtctatgacgcattgaagctttccggccctctccatggctgccagggccgggccggaagcagtgtcccttggcgcgttgtgaagcatctcctttttatagaactcgaaaaatcgctccggccgggtattgtaaaatgcactggtatacatttcctcaacgccgtagccataccggttctcgatgtcatatgccttatcctgtttcttaataccgatgaacccgccttcttccatcataccggaaccgcagagagccacagtataggtactatcatccagaatctttctcaactgagctattttttcattcatagtgatacccccttccagtccaacccagcaaattccccctgggaggctgcatctgtttcttattatcactattatataattttttccagataatttccacccgttttgtcaattttatcttactattttcattttaaaatatcattttctctcttttctgtctggaaataaaggagaacgcccccgattgtcaccacgctccccgctatctgcgggggtacttccccgaacaggaaaagagcaaaaacagcagcagccacaggcccgcacagcttggaggcagatacaaaggagagcgaaaagaatttcaggcaccagctgaaaagaccgtgtcccaaaaggatggggcacacaccgaaaaggaggcccacaaccacgagcgcgctccgtatcccgtaaagacaagtccgctaaatgcagttgccagtcccacggccaggaacactccgctggccccgcacagcaggaccgtctttctgtccatgtccatcagctcccgcctgcagtccttccgtcccaaaaccactggcgtcatcagtgccacggtccacattatgcggtaaagggctgctaccacagcaggggcctgggaatttttaacaaaaatagccgatagtgaaataccggctataatgcttggttgagattctctgcctatgggatcagcctgctggttcccaggcggtctgcgcccagctctatgaaacgctctgcgtcttcaatagaggcgattccgccggctgccttaaccttcacctcaggacctgagtacttcctcataagggccacatcctccggtgttgcgccggccgcggaaaacccggtggaggtcttgataaaatccgcccctgactccgtgaccacacggcacatttcctttttctcctcctctgtcaaaagacaggtctcgataatgaccttcaggcatctgccgccgcaggcagccttaatctgtctgatttcatccaggacctggtcataatgccctgcctttaccaggccgatgttgatgaccatatcaatttcgtccgcgccgttcttcaccgcgtcctctgtctcgaacaccttcaccgcggtggtcatgttgccgttggggaatccgataactgtacagattgccagcttatcccccacaaaatcctttgcctgcttcacataacagggaggaatgcacacagaggcggtgccgtattccatgccttccctgcacagcttctcaatctgctcccaggtggctgtctgctttaacagtgtgtgatctaccctgcttaaaatatccttcttatccattattttccatcctttccatccgtccgtcagccgccccgaagaacaaaccgtccaaggggcattcttcctgattacaattcgtccagaaccgaagttcctatagtgccttccggcatcttcaccccaaagttatcagccaccgtggctccaatgaccgcaaatgtatctgccccgcccaggtcctttccgccctccatggacggggaataggcgatgaacggcacctgctccctggtgtggtccgtgcctgtgtaggtagggtcgttgccatggtccgcggtgagaatcagaagatcgtcctcacccagaagggggagcagctcacccagcttctcatcaaagcgctccagctccctgccgtacccttccggattgcggcggtgtccccacagagcgtcaaaatccaccagattcacaaaacaaagtccgttgaaatccgtttttgcatactggatggtctgctccataccgtggacagatgagttggaatggttagactgtgtcagtccctcgccgtcaaagatatcgtatatcttaccaatggacaccacatcatatcccgcgtccttaagggcgttgagggcagtccttccatatggcttcagcgcgtaatcatggcggttggaggtgcgcttgaattcgcccttcttcatgccggtatagggcctggcaatgacccgtcccactttccactcatcccgcagcgtcagttccctggcaatctcacagtagtgatacaggctgtcaagtcccatggtctcctcgttgccgcatatctgaagcacggaatccgcggaagtatacacaatcagatggccttcccgaatctcttcctctgccagttcatccagtatttccgttccgctggcgctcttgttgccgatgattttccgtccggtccttttctccagctcgtctatcagctccttaggaaagccgtggctggtaaatgtctggaagggcgtggtgacaagaagccccatcatctcccagtgtcccgtcatggtatccttgccccggcttctctccttcaggcgcatgtaacgccccaaggggtgttctgccggctccatcccttccaatggatgcaggttgaccatgcccagttttttcagattcggaatcttaagcccctgaaccttctgggcaatatgccccagggtgtccacccccacatctccatattccggtgaatcctccactgccccgattccaagtgaatccaggaccactacaaagatacgtttatattttcccatcttacgacctccttaaaataatgtgaccaggcctactaccatggcgccgatcaggcttaccgccacaccgcctaacatggccttaaacaccaggcgggcaagggtgcttttcttttcggggcacaggaccgcgatacctgaaacgcagattcccagactggagaaattggcaaaaccgcacagggaaatggcgcatatcatccctgtcctgtaatccatggaagatatcatgccgcccagctgctggaacgccacgaattcattgaggaccagcttgcttcccaggagatttccttccagcaggatttccgacggatccaggcccaggaaaaagccaaagggagcaaatacataggaaaatacctgctgaaggctgataccgcagacacccaacagtttattcaccgctgccaccagagccaccatggccaccatgatgctgcccaccggcaccagtgtgctggcaatcagaagatactccatgggaatgcccagggccgtataaccgcccaatatggacacggacatactgcccatgccggaaaccaggaccaccataacctcgctgtccgtcatttggcccaggtacttgctcaccagtatcgggctgtcggtctgtcccagaaacatgttggcaaccgccacaaagctttccacctctgaggtgcccataagcttacccactgctttaccaatccattttaccacaaatcccaaaattccgatatagtaaagaaaacttaccagggcagacaggaatacaatgttgcccaggacctgtatggcaaatacagatccggcggcagcggtgctgtctgccagagaaccgaacacaaagcttaaaccgtcctgtccgcagttgatgacgctggtcactgcatccgataccttagacaccacgtaacggccggccggaacctttaccagaatcaccgcaatcaggaactgggcaatcactgccttaatcaacattttgacggatatctttctccttaagcctgcttatctgcctgaatcagtctgcggacggcttccaccgccaccttgatagctgcctcggtatcgtggacaatggggttatccagtcctgcctcctggcgctcctggtttcccaccaccaggaaatcagagccgcagcgcaccctcaagtggctggccgcaataaacagggcagcggattccatctcagacgccttgcagcccatgcgcttccatgcctcccacttattcagcagctcatagctcaccggcatacgtttgggttcatgctgcccgtaaaacgcatccttgcactgcaccactcccgcgtggtacgtgtatcccagcgcctttgccgaggaaaccagggcattggtcacatccaggtcagccacggccgggaactcgatgggggcgtattccctgctggttccctccatgcggatggcgcctgtggccaccacgatatccccgcccttcacgtccatgtccattcctccgcaggttcccacacggataaatgtatcagccccgcacagcaccaattcctccatggcaatggatgcagacgggccgccgatgcccgtggaggtcacgcttaccttttccccgtccagataaccggtgtatgtaacatactccctgctgtccgccaccagcaccgcattgtcaaaatgtttcgcaatcttttcgcagcgtttcgggtcccccggcatgatgacataccgtcccacgtcccccttcctgatctgtaaatggtactgtaatccttcttctcctgaatagttctgcatgataattaccctctctcaattgatttttttgcctgcgcttttgcctgcatctttgcttgtatttttgcctgcgctttgcctgaacctcagcttgcgcttttacttgcatttgcttacattttaccggcacttacactcttgtttttgtttgtttatttgtctgtttgtcgtgcatttgtataatatcatttatcttgtataatttctagatggaatattttacaattattacagcatacttttatgtatattgacaatataactgtgctttttttatagttttttaccgattcaatcgtgttatacaactagacatgtctattttattgacaaaacagcttccgggaattatgatgtttaatagggacttgtatattttttgtgatacagccagacagaaaggatagacctatggaagtagatgtattatctgagaaagcaaagaaattaaaacatgtgaaagtatataaccgcctgtattccatgatacaagacggcgtgtatcctccaggcggccagcttccctccgaaccggagctggcactgcagatggacgtaagccgcatgaccctgcgcagggctctggcgctgctgcaggaggataatctggtaatcaacatacgcggaaaaggaaatttcatcagcgaacataatcccgacgcagagctgccgggcctggaggtcacacagcacccggtccgctgtacgctgtccggatccattgaggagacagagatggaattccgcatagaaccgcccacggaatccatcaatcagaacctgaaacggaaaaccgccgttgtggtaatcgcagaccgctggtataaacgcgccgggaaggcgtgtgcctacagcctcagtttcattcccattgaggttatttccgaaaaacagatagatttaagggagaaagaagatttattccaatacctggagcatggcgtatataaggatgccggcagcagcacctgccagctctcctataccaccacaggcaatttcacagccgtcaagtacatgctctcccagcatgcatccttcatcctgatccaggagacactatacggcgaaaatcaccgggtattggtatccagcaagcactatatacctgtggaatccttcaaaactcaggtcaacgctgtggccgggcacgtctgaaggcccattttcattaatccaaataatgcttcgccgcaaataagccagctgggtccggcagaaagaaaacacaccggccatatccatcatggagcggccagtgtgtttgtcttcctacaattgctttcagcgtgcccccccccccctaaccccccgggggtgcgtcattttaccatggaagtattccgacagtcaatttcgttttccttgcgtttttcttaccggttccttactggcggcacttgtctcaagggtcgaagaataaactgctgggtggcttggcggcacccagcttttctcatttccggaatcttgccacccaaagtgcttgattttcccatataaaaggcttattccgggtggcagagccgtagaattgttttaccgggcaatctgcgtttttttgaatctctgtctgccggttttctataatcgtgtttctatcgggccgcccgcatcgtcctcttgcccttgtaacgctccgtgaccgcccgtgttaacgttttccggcaggactcggaaagatgtaccatgagcaggtatatcggctcgttggcctgatgtgaaacaaccaccattttccgaaaatcaagaaaaatcgcagggtcgaaaagtgcgctggttaaataccattatgtaaaaccctcttcccctcatttatcgctttttcacagatataaatacaggaatttaaattttttattatctcccctttttttaccagtatattttcatatcgttcctcatctagcaggaattctccagtcaaataaaactcatctggcgatagacgaaatagttctacccattgtttgaggatgttctttaactttgttatctcaccatcttcaataaatgaaaatccatagtatgaaataccattttgaagtcttttgccgttccaagttgtactgatccatttcaagctatctccaatatattgaattatcatatccgaaatggaaactgaatccatatctgaagaaaccatactcacatcactatcttttggaataattgcaaactgatgtactaatcccacctataatcacctccgaacctattgcttcccaaatgatacaatagaaccatctggcgcaatatcaatatattttccattctttttgtatcgaattgtaccttcaacagctccatcaactcggctctttgtagaaccttttttagctgttttagcaaattcttctgcctttcttaaatattggtcgcggcttgtagcaccaacttcatcaccatgcctgccataatggtagtccaaagaatcttctggagaatcaaagcttcctttattccagtttccagtctcagaatcccccttatcatctttattattctttccacccccaaacatcacaataccagtgttttctattgcgatagcatcgccatccattaccattgtgttaccatattcatcagctacaaccattaccgtctgtggcccagttccattcatggaatgcatcactatcacaaataaggtacctgcatttttacagttggcaagtatttttcctatctgttctcctgcatcataccaatcccaatagattacatctccggtttcctcaaggtatgtgttaccctctgctttcatccccagaaggctatccatcgcttcatctcctaattttaccgtaactgtgattcccgttataaaatcatcacaccgtttcaaatagggggatgccttttctaccgctgcatccatggccttttttatctcactggttttcttcccaacattctcgtttatgtcttccgcaaccttacccggatatgaccataaaccattccaaaagtcggacaacatctttccggaaaaatagtcataaaggtcaccaacatacgggatgttactcttaccgcttgggtcaatataattcagcgggctgctcttcacataattataccggttcagtgtcagcggatctgtgatatccccaaaggcattataccggtacgactgccagatatatccatcaattcctgtcacaccggtcacgctgcctcttgggtcataggtatagtagccggtccagccggtaaagcgctcattgttcaggcgttcattcccgtagctgtatgccgtatccattataccattgatattcagctccatcaacacttccacatggtcgcggttcacgtcattgacatattccaccagctcataattcttctgcttcccggtggtcttaatcatgtcaatcagttcctgctccagctcggatacctcgcccgccaccgggaacaggatgccgctctggttctggctcccgcctgtattattggtgtttccgccggcatttccgttattgtcattggttcctccggtgctgctgttgccgtttccgtttccgtttccattgtttccgttcccccaaccataatggttcccattgccgccgttcccgttattgccgttatcattctttccggcatagctggctgccgcattgcctgggcttacggcacccggggctgcattgcctgggcttacggcacccggggctgcattgcctggtgtcgcagtcatggtttgcccagagtcagcgttggccgtatcactgctgtctgttcctgtctcctcctgggctgttacagtctcctctgggattcctaaaccttccgccaggcctccaaggatttcttcactgaagagacgctcagccaatgcctggcttacgccggcaccgagtttccccgcttcctattcttcaccggtaaagaaatctgcgatggctgccgcggcgctcttcttattgccgtttccattgccggtgttgccgcttccggtgttgtccttgttgtttccgttcccatttccggaattccccttccagtcatcatcggtatgcaggttgtagttcagctggaatatgcggttcccgtcgccgtcataggccatggccaccagcaggtcgtgggcatcacgcactgccttgagacggttctccacgctgtactcatagatcttctccaccttgcggttcccatccggcttgacctcctcttccaggatccggtttccatcggcatcatatgcttgtgtcaagtagggacgtaaaaaaatctgagatatttttgaactgccataaaatcacatcgttctattccctgactgccctcattataccgtacctactacatttttgaaagaaaaaagggcggtagccacaggtgccatcccctgtgggctaccgcccttggctcaacctttcatgttctttgcaattcctgcaatccttgcatagaaatcagcttacggcagtcctaccacacccgaagttggtgtcagtatttcaacgccgtatccattcaatttcttaacacaatataaaaactcgcttatctttcttgtaatcctggcaggattgaccacaagcaaaatatctatccgccgtttagaagcagcggaaaacacatcggccatgccgcgccttttgatggacgcgccatgtgctatctcggcggtaataccgacaacctcaaaacccttttgttcagaataatccaccagtaaacgcttctgattttccaattctatggtatcagtatttgccaccctgcaatagagccaaactcttttatgctggttcatttttctctcctttttccgaaaagctccactcgatatgaatggatttgtcgttgtaaacataaacgcagtccacaaagtcaactaccatctgccgtgtaagggcatctgcctgtaaatagcgtatgagccttggttccccctgcctggcggcggccagcttgctccgcagttctgtgagttctgcttctgccgcttcagcccgctgtgccatctctgcctgcccccgtgacagcttatcccgttcctgccggtacttctcccggctgattttttcctctgccatcgcatcgtacagttcagctttctgctcatcaatcttggcacaggcgctctgataggaagtgacctgtttttgcaggctggcaagcgtatccgtgttcccggcctttagcagcagttccttctcgtccatcagggtttttatataagcttggatggcagccagcacaacgtctgcaatttcactttccctgacgctgccctccatacatccaaaaccggtagtcctgtatcttgtcctgcaaaaatattgtggtttgaaacgtgaccgtctgataagggcatagccgcaatgaccgcaccgcagtttatccgtaaaaaggtatatccctgccttccctaagtcccgttccacaaattcagccaaatgttcctgcgctttctgaaactcatctgcactgacgagcggttcatgccgttcctctgcaatgatccaatccgacctgctgtttttaagggtttttctattcccaatctgtgggcggtatcgcttgccgtagatggtcttacctaaataccgttcatcccgcagaatacttgtgattgcgctctcattccagaggtcggcacctttcaccccaatccaccatttatgataatatccctgcctgttcttgatggcgctgggggtaggcactttctctgcattgaacagacgggtgatttccaccacggtcatccctgcgccagccagttcaaaaatgcgccggacaatccctgcactgtccttatcagcgacaagacggtttttgtccttttcgtctttgcggtagcctatgggggcaaaggagcttaaaaaatcacctttgcgcgcctttgtctgtaagccgctttttactttcatggacaagtccttgctgtaatagctgtaaatcacgttgcggaaagcaatatccacgccgctggtcttgccgttcattttggcgctgtcatagccatcgttgaccgaaataaagcggatgccgagaaacgggaatatctgatccacatagtcgctgaccgtgatataatccctgccaaaccgcgaaaagtcctttacgatgatacagtcgatttcctttgccttggctttctgcaaaagtttctgcatattgggccgttccatgctggtgccggaaaatccgtcatcacacagttccatgacctcgcggccctcaaactccggggactgcccgataaagcgccgtagcaggtcacgctggttggagacgctgttgctctcgtccctgatcccttcacggctgtcctcgtcctccacagaaatacggatatacaaaacgataacgaaggttttattcactggctgccacccccatcggagggaacagccattccttcatgcactcatattcgtcctcaaatcggagccgcacggcgatgttggagctgctgtatacaataatccggtcaatcagttccagcaccatgccccgtgtcagttccgacgtctcatggatagacagaagcgcccggagccatgccggttcgccggttcccggttccatgacggccgcattctgtgattccagttctaccagcagcgctctctgttcttcttcctgttctatgtaacggtttctggcataaagatagtcgtgctcatccatcaggtggtctaaataatcgtcataaagggtttcccgcagacgggcaatccggtcaagctgttcctctgcctgcatgatacggtggaggatttcctgttttttagaaagagcaagcgcttttctgcccgcactttttatcagcctttccatatccagtgccgttgcaaaatgggaccgaatcacttgggaaacagtttctaaaagggtatcctccggcaccctgataccgacacaacggctggagtcctccgcgtgggtatggcagtaaaaaaaataccgcacatggattccggggttcttaactttgttttcgtggacacttctctgacgtacaagttttctcccacagtccccacaataaacaagcccttttaagatgttttcaggattaatgatttccgggaaagccccctgtctgtcatcaaacgtctgcttatcctgttccgccatcctctgtacctcgtcaaaggtctgccggtcaataatcgcttcgtgggtgttttttacgaccgtccacttttctctcggctgggtagtgcgtttctgtcctttccaaagcgccttgcgggtcttaccctgcaccacatggcctaagtaaacctcacttcggaccatgtttttaatgacctgtcccgtccagacggaagccgcaaagcgtttggacttcaccatccctttttcaaaacggtaacggctgggggatggaatccccagctcggtcagcctttttgcgatttcctgatagtccataccgattaagcgccactgaaagatgtcgcggacaaccggggctgtttcttcgtccaccacaaggcggtgcttatcctccgccgatttcaggtagccatatgccgcccagttgccgataaactccccccgttcctgcttctcttgcagcacggggcagattttctgtgagatgtcacgggcatatacatcgttcaccagattttttaagtgcatggaaagactgtccgaggccgctgggtcaatgctgtcataaccgtcattcaccgctatgaaacggactcccataaagggaaatatcttctctaaatactcaccggcctctatgtaattccgtccaaaacgggaaaggtctttgacaatgacgcaatccaccttgcccgcccgtatatcatcaagcaagcgttcaaaatcatcccgttcaaaatccacccctgtttccccattgtctgaatagacggagaagagggaaaggctggggtcactttcaacatatgcccggacaagggcttcctgattttcaatggaatcgctgtcgcactgagggccgtccagcacggaaagacgcacatacgcccctgtgctatacacccgcagtttcggtttttcctgcacgggcgccctgaatctgcttttccttgccatgtcacaccgcctcccttccggatgatacggtcagagccggattgatacgctccacgctctgtataagtgacatcgcactgtcatactcaaactgaaatttgaacttgatgtttatccgctgattttcaaagactaagatgcggtcaatcagttccaccgccagcttacggttcagttcctcaatatcctgatactgtttgaaataggcaatccatttctgttcctcggatttcccctccacaagccggtctatttcctgttccagagaaaggattgcttctccggcgttctgtgctttcaggtcataccgtttgccaaaagcgatataatcctcacgggaaatgatgccatccatgtagtcctcgtggagtttcatgcggtagagctggtatttttccacctcgtcccgcttggctttgagccgttcatccatctttttaatctgacggctggtatagggcagctttgcaatggcggtaagtatctgttccacatcaaggaccgaacggatatgctcccgcacagccgcaaaaactgcctgctccagcagaatgtcacggatgctgtggcttttacagccgctcttttccttgctgcctgaacagatatagtaataatagggcttatctgcggtggagttgttctttcgcaccatgctccgcccgcagtcagcacagtagagaagccctcccaacgggaaaaccgtttcctcaccgggtgccgtccgggtgtctgtgcgcaggatttttgccacattctcaaaggtatcacggctgaccgccggttcgtgggtgttttcctttaccgcccactgctcctccggcacggcaaactgcttttttactttgtaattgggactgctgcgtttcccctgttccagcgttccgatatagacggggtttttcaaaatgcggagaacggcagttgctgtccacaccgctttgggattacgccggaagggtgtcttatatgtgctccccagcagcctcttatattcaaggggagaggggatgccttgttcgttcaggcggtcggcaatcgcttccgaggaatatccctccagtatcagatggaacatatcctgcaccacgcctgccgcaaactcatcaataatgagatggtgcttatcctccgggtctttcaggtagccaaacatagcgaagggtgcgataaactgccctttcctgcgcttaatgtcctgatggctccgtatcttgatggaaatatcccggcagtaggcatcattcatcagattttttaccggcactatcagattgtccgatgcggttcgcggctttgcgctgtcataatcatcattgacagaaataaaccgcacacccatgaacggaaagattttttcgatatattttcccgtttcgataaagtttctgccaagccttgaaaagtccttgacgatgatgcagttggttttcttatttctgaccgattccatcatacggataaaatcaggccggtcgaaattgactccggtatacccatcatcaacccatactttgcgaagggtgatttcagggtgtttttccaaaaaggctgtaatcaaatcccgctggtttgcgatactgtcactttcggctttgtcgccgtcctcatgggaaatacggaggtacatatctccgtcgtattgctgtaaaagttcctgtgtatccattcggtattctcctaatcgcttctgaatttcagaaaatggattgggagttttaccgcaagtcctgtatcacagggttttatccagcccctgcgatctgtgactcagcttaccacaaaattttctccgcgtccagacaaatttctgaaatccaaaagcctgatttgctatatccattttgattcctcacagagtttgcagatagtgttccatccgctgttcaaaggtagcaccgccctctgcgtaacccacgctgacggcgacctttcccacccgaaagcagtacggattcctgatctgccggataaattcctgtatccgctctcctttgggaagtgtcctgtcaatttcgatttcttttatatccacaagcgtgtcgggatcgaccgtccgcacatccacctgttttaattcctgtaaatccatttcggataaatcataaccgcccatggtctcctcctcttttccatcccattttgcaaaggcgggatgcccgctcactgaaagtaggcatccgactttttctccaaaagaaaccgccccacgtcatcaatccggtcagtaaccggcatatcaggcagggcgtccaatatatcgcttcgataccgtcctctggcacggctgtcgaggatggagaacacacaggtgtccgtttcccggcgtatgccgcgtccgatccactggcgcaatttaatcaacatactcggcacaatgttctcggataaataactgtgaaagtcatcatggagggaacgttcatattccgataccgggtcaggcatggggaacggcagcttcaccaccacaagggaggataaaatatcccctgcaaggtcgataccctcaccggcgctgtcgcttgccagcagcacgccgtttccgctctttcggaaggcagacagtgctgccagccgccccctgcccatgcagaacagcggataatccaccgcctgcggcttagacaactcctgatatacaatctccatcatccggtaagacgtgaacagcaccagcgtatgtccatggctctgccggatcagttccgtgagctgcttaagtaccgctgtcatgtagacgctgttttttgtgtccgggaacggcatacaatccggcagatacagcagggcatggtttacataatcaaagggggacgctttgctggtcatcaggagccggttctgttccaacaggtcaatccccgtctggtgcatgaaatggctgaaatcgccgccgatggacagagtagccgaggtcaggacacaggggatgtcactgttccaaatatcctcgtaaagcagataatccagttccttgggcagcgcacagacctgacaggaggtaacgccggtatgctccagccagcagattgactgtgcgtgttccagcaggaccatgagtttttcctgtttctggtcgatacggctggcaagcagcgtatagcgctttgcggtctggaaacaggatgacagcctgcctaacaccactgccagcgcccgtaggatccgtgtgacagccggagtaaagcggactgcctgactggttttatcgtatttggctccggcctcctgcttcagtgtttcaaagagcagggtgttcagccgcagtatttccccgcgtaagtgcaggatttcctttttgtcagtactggaaacagccgcacggcacacactggccgcaacctgttccagctccgtgctgcaaaacaccatgccgtacatcttccttgcggcgtccagcagcttatgggcctcgtcaaaaaccatcaggccgctgggcgggagcagtctgcttcttccccctttttggcttaatatatccgccagcacaaggttgtggttgacgatctgaaaatcatagcccgccgttcttgtccgccgcaggaaactgcggtaagggcagagtgcggaaagattacaatggtaatggcagcgttccacacagatacgttccttgacgtaattggtcagggtcagggcgtctaaatcaaaagtactgttcccggcgacaagcgccgtcagggtttccatcagctcccgatcctccgggcggtcattatgccggagggaggacaggtagttcctcacccggtcaaaacaggcatagtgggctttccccttgcgcaccgcaaaggtcagcggccggccgataatccggtgttccatgaggatgccggatatctgcgggatatattcctcggtcagcgcccgttgcagggcaatggttgatgtggaaatgagtacggcctgcgcaccggggttgaaaaggcggtacaccgtggccgaaaggatataggcatgggtctttccggttcccacctctgcctcgcacaatgccaccttaccgtcccagatcgcgtccagcatagacagggcaagggaaagctggttttccctgagagccattccatgccggggcaatatgtctgtgaacacatgggccaggagcgtttcggctctttcccgcttgtcctcctgtaccggcgtttccggcgccagtgccagcattttctcgattgcccgttcatagccctcctgtgtgagtggcttttggcgggaaaacaggcgttttgcctttaaggtcgttaaatccaccatgcggtagctgtatgtcttgcctgtgaaatgctccagcagcacacagcctttggtggcaagcactaccttttcctccgggcggaataagccagcctcataaatcttattttgaaggtctgccgtgcagcggatgatttcttcttccatgtaattttatgcctcctttgaagcctaaaggagcgacacaagaatgcggcggggcagggttggtttggatgtctgatgacataaatgcctgagccgccgcatggtttctatcgccccaataggggtttatatcattcaaaggtgtggcaaacgttccgttggtttgggcagcaattcatattatttcccacggacaccataaaagccgcccctcattctttctcaaatgagggtgatgcattttcccgtttttcagggctgctggttctcagcagaagtatcatgatctgtgacaggggttgtcgcaatccgccccaccatagggcgtaactaccgcagacggtatcgctcggaatgtgttacgaaaaataataaacacatcgtcttggcgcgtcccagcgtgtcgcttccggtttcccggcctgtcaacgtgtatctgccacacctatatgcagttggcaatgtgcaggaaaggcatctaaaaaacgccttcacctaacgtcaaaaaacaaggggggtgacgagtcattccttataaaatttttttaattttttctctgcccacatcaagctgtcccaaacagcccgctgatggactccctcaaggttggcaatctgccgggtagacagcccttgaaagaaatgttggataaacctgcgtttctgaatctccgtcagtttaccgctatgtagcaggtggtaggcggcctccgccgccctatctgcttcgtacttttgtattaattccgtgtctatggcaggggttgcaataaaatatgtttcctctaatccatgaatgcttacatccaaacggcatgtcctctgagcctgcctatcctgttgatgataaatttcatcggacagagcctttaatctggcaaagtcttcttctgtttttcccggattatcccgcagatagtctgcgagagtgacttcgacaattccatcggcaaatttatatacaataccctcgctgtacttgtttatggcataatcgctatctgtataatttttcaatatcctttcctccaagtttgaatttgtatggttcaagctcggaggaggaccacggcaaagcgacaaagcggttaattcaattaaaaaatggcgcaaaaaaagccatatcagtatgtttacagacatggcttttaaagcattatatgttggtagcagagatacatatttaaacaaagttttttgtaaaaaaccaattataatattcaaaatgaacctgccagttttgactaaatacaaaagccttcaaaccagttttagagttcttaggtctgaaggctcttataatgtttagagttttatagaaataattttaataagaaaactactaatatcatgctttgcaggcttacactggactaggtcatcaccaggccaaaggatttcatcatggtcatcgttatcaaaagtgctcaggcgccccctccatacggccacatgctcaaatacagcatggcaaagagaagcattaagatgcaggttccggtcacaggccgcagaatcgccttcagacgcggatttttcccagacagctccccggccatctcttccatacaggccagatgttcttttccctgaccatactggatggtctcacgaagcccttgtaggatttctagaataaagctgttcattttcccaaagtcttcccggtacaccataccggtttctccatccctccgtgcgttcctcagttggagtaaaatcccctaaatttccccagtcccgcccaaacacctggtagtgctcttccacgggaaatcccaggatttgcggcaatcccaccaaagcaaggaccgtcaggaaaatgcacagaggcatccgccagccccataagaattaggattgccactatcataaaaagcattgtgtactcctcctgtgccgggggtgggacagataaataaattctcttttcatattccatatcctttaatctgcacgattttgcggagcagcttttaaaggaacttgattaacagtaaccggcatatcctcttctgacctgcaatttataggcgtaggcggaatccattttattataaattttcgattttcactttttcgctttccagtccagaataaatgccagtgaccgccacgccaatgtggttttggtgacattctcctctggctagctgtgctcctatccatattgtaatcgtattgaacagaattatcttcggaaacaatttttgctttctttagtttatttacaactcgataccctacatcccaatttctgatttcccggtatttatcttttattatcctcccggcagtccgtccatgacctttccctggcaattctttcaaatcagcattttcagcggtaatatacaacagcagctgacataatttagataatatttccctccaatattttatataaatgattgtttctatgttaggatcacccttaagaaaagttatacctgcttcagttgccgcttttgtgacagccccggtaatcccattactcaggttaatccccttctctaatctgatttctgaaaaattaaaattcaaagtatcttcctttttgactgccatgcatctcagtaaaggagtaccatctttcacctgatcatatgcaacgaaaaatccatgataccgatctcccaatatctgtggtgtttctatataaaagcagggaaatggtaaatttcgcaatacatccaatggtagattcaaatctgcctgcttatacaataagtcttccatttcaggtgcaaagcgatatacctctttatactgtctccatgatgccaacattgacagggtgacggcaagctcccgggggcttgcctccattgggacgtggtacggatcatttaaaagaatattttcatatatctgccaggcgggtatatatatatcttctctccatgggttgtgacctgtagaaagcatatctgctctggctttttcaatagcagcccatatctcaggtaattttttatttgccaattcaatcgcttttaatgggggaaaagattcaatatttttcataatgtatttcatgaccttttctatagcatttatctgacaacttgtaaattataattgagtgacagcccttatactcgaacgaatactaagttctgtctatactttcattaatagtttctatttcatgttccaaaaacaaatgcattaactctatcgtacaaggttcttgttttgaaagtatggtttggcctgaatcagttattatccttgatttattccctttgaggttcctataacacaatacataaggcagcatatcataacccctacaatttaatgctgccttatcatttaaaatatccatgcaacaaattctatgataatatcaacaccaccaagttttatcatcttgaacaattggtaccaaaataacatcggcaatgcacccagacagaaagaaacacccttgcactctttaaatatggtaattaatcccaacttattttcacgcacttccgctggtagatgtaaaaaatcaattcttttttttatgtttttcagatatattccatctgccatatatccaatcgttataaattcaatgatataagtcaaccatttgaaaatgtcatatgctttatctatatcaaaaattatttgattatataataatgcaaaatagacagcaaatagcaaaaaatataagagttcgcaaaaaatcattacagcaactccttcaatccacatttttctatatccaaaccaaaaccctccaaaaaatgccgcagcaaagttaaattttctcttattttgtagacgtttaaagcgtagtaagtacttttcgtttccctttccaacgaactctgttatttcagagactgaatatccgcttaattctttttccataaagtgtcttctcctttattgtttataataccataatacttttatctccataggatcaccttgcatatcttttgataaaaccgctatatattgtcctgtatacccattatgtccttcttccaaaatactgagtttaacatcgttgggttttaaataatacctatcattgcctgtataatttataccatttccattaaaaggagtatattcaactgcaagaacatcacctcctggaaattcttcatctaatgcctcatctatgtcctccatgtcatcattcaaatcaaataccttatccatgccatcaataccatcatcttttaatttttcactaacatttgatgccaacatggacagggtgacggcaagcccccgaggtcttgcctctagcgggacgtagtacggaccatttagaagaatattttcatatatctgccaagcgggtatgtatatatcttctctccatgggtggtgatctgtagaaagcatatcggctctggttttttcaatagcagcccatatctcaggtaattttttatttgccaattcaatcgtttttaatgggggaaacgattccatatttttcataatgtatttcacgaccttttctacagcatttatctgacaacttgcaaactacgaggtcctggatacagaacgtactgcctattggacctagttgatatctgtatctccctgagcatcacagctatttttcttttattatccagtatattatagccccaataggtaccgaaaggtatacctgcattcctaatccgtgaaattttaatattttaggaagtgccaatgtatagatataaaacgatactattaaatctcctgttgttggaaagacaacacctgcataagcaagcagtataaacaataaccagattccccaaaacctgggctttttctttatacaatggcatgccataaaaattgaaaatataatttctaccacagtcaccccagcaaatagccattgaacatggttaaactgcctccaggtagaaatagtacctgttactttagggggaaccgatatgtggatccaatcaatcccctgatcagaaaccgtaatctccaccttgactttattatatttgcaggttacttcataactataagtcgtgcctagtggtatttttccttcggcctgccgttccttttctccaattctttttacagatgtaaactctctccctgcccatagatcaataagcatatcaaaaaactcatctgtttccttcgttttacttttgtctacccatttctcataaattttatccttatttccgctttgcaatgcacgaagtaatggcagaataagctcttcagcaacctcgtctgattgtgttatgtttgtattctggccttctgccaatattggatttaacagggcaaaacacataataatagttaataacatagccatatttctgactctatttttcattgatagacctctctgttgaacttcacttactagttttgactatcacatccaaaaatttttttaatatatggttctaattcagtaaggttaaaagtgactttaccaccaccgccaacacctaaatacagatcacctccaatagaatattttaaatctccatcaaactcaagaccctctactcctgctgacccataaggttttcctgacgtaaaatcataaccagccgttccccctactcctatatcttctagtacagtagttttggcagcgccttcactctttatggcaagattgccatgttcatctgtttcaaaaaatagcggtttcacagttacctcaccttctatcattccccaatatatattcccacccagaccaaacccaacttctaaatttgcatcaacaatcttatcaactgcttgggcaccattataaatcccttgtgctgaattaaacagtaattccctactgtttcctttaatttgcctaaaatcatctggccttgttccataatcttttacattatttatctggtttttatcttttgaattatcgccattattattgagaaacttactatccccaaatatccagtcccaccaaccctctccgccatttttctgtggtctttggccgtctaaatctacccaattcagagggttgcttctacagtacccataacgattcaatgattgcggccctattattacacccgcgtataaatcagttccacagaatcgccccacttgaggtaaatactcccttgcttgtgcaaaatatgtattagatatcgaatctttttgatatcctgtatatccaaatggctgtgattctccttgattttcacctaaatccactccaaattcatcgtattcatataccgattgatgattatcagaagtacaaatcaggcgtagcgtactgcccaaatcatcttgaaggtaaatatggggcgtccccctttcggtcattaattccactttagaatcccaggtgtaacattggataacatcttgtccacctgaagtttctatcttttccagtaagttgcgatactgttttgtaatatccaatagatattctatgctgcgggttggtgtttccgaaacggtgccattagctaattgggttggagtctcatatacaaaagtggcagttcgattccccattccatcatatccatacctggctgcctctccttttaaattgaaagcaacggttaaacggcctgtctcatcatagacatattggttaaccactctctttccctgaagaattgcagtcagatttccccttttatcatattggtaggtttcttctggagctatgccatctgtccttaccagctggttggctgcgttgtaataatagcgcgcatatccgtcctctgtccttttccctatacggttgccaaatgcatcatattcataatgtcttaggctttccctgttcttccgaacttctatcagccggttcaggctgtcgtattgatactggaaataaccattttcctcctgaatctgatgtcctacttccgccacagcatcaggcgccataagtgtagcctgccgcatcttccggattccaattttgttcctcatctgatcatattcgtaatcatattgttccaggatttctccgtttttctggtggacaagtttagctaaaagtccactgtcattgtattgatatctgctgattattgaattcggtaatattttttcacataagcgcccatcctcattataatggtacttgatttcttgcgtgccatcgaccagcttggttaagcgggagaattcatcatactcataggaaacctttttcccattgggataaatcagcacttcacgctctcccatcgcgctccatccataagatatttcgcgccccttataatccagtaccttctttacccgtcccatatcatccagttcaattctggtcgtccccagccagtccttaatctctgtcaactgacgcatggggttgtaggtaaaaacaacatttcgtccatctgcatagccaatcctttcaatatcccccaccggattataggcatacctggtttcaaaaccttcccggtcctttttcagaaccagccgacccgacaggtcatataaataatgttcctgtaatccgagtggatttgtgattgtctctacattgcccagtatatcgcgcttataatgtgtgtaatggatatccccattaacagaatcaggagcaggtgtgcttccatcttgatttagtaaaatatcttttccccggtgctgacagattgtaattaattcccccatcgtatcatatgcatactctgtcctgttcccggcggcatccacgacagaggtcagcttaccttccgcagaataatcataatatgtcacattcccgaggggatccgtcacagaggtcaccgctccattggcgttgtaagtatagctcacttcctggccaaaactgtttttgacggataccggccggttcaggcagtcataagcaagctctaaaaaatcccccttatgattttgtcgccgaatctgattaccgttcttgtcataagcatatgtttcaaaggtcccatccggataaatggtcttccgaagtaccccgcctggtgcatattcataaatagttttccgttttttcgaatcaattacacaggtaagcttattaagctcattatattcatacctggtttgatttcctgaaatatctgtctcgctgatgacgttccctgccttatcataagtataggtatgggattttccaacagcattggttacgcaaatcaggaaaccatttaaatcatactcatatttttttgacgcgccagagggatcagtcacttttgtaagcctgtcccgttcatcatactccatggaagtccggttcccttccggatcaatgaccgctgtgcggtttcccttcgggtcatactcataccggaccactcctcctgtgggaagcagcatctgttccatacggttaaggctgtcatacacataggatatctccgctccgtttggcaggattttcttagagagattctgcatctggtcatattccatacaggtcgtcccaccatccggcctggtcagggactttacctgattcatgacgttatattcctgcctgatgacggaaccgttaaaatcagtggttcccaccactttcccgtttttgctatattcgtaggtacgacatttcccggcagcgttggtaacactggtaatctggttgtacgcatcataggcgaatctggttcggttcccattcccatctatgatgcagacagcacggttgcagctgtcgtattcataagccaggcaacggcctgatgcttctgcgatacgggtgatattgccattgtcgtcataatctaaggcgaccgtacttccatccggcagttcaatctttatggcgtttccttttttatcgtatgccaccttcctgcttcgtcccagggcgtctgtaatttttatcagattaccttccgcatcgtatgtgtttttaaccttctgaacaccgttaacagccatcgaaatcagatggttcgatgcatcataagtcatgttatgttttgcgccatccggaaaaataatctgcgtggtattccctttgtcgtcataggaaatttttgtccggttcccgttcttatcagtttttgatactaactggtttctgtcattataagtaaagcgttcttctccatctatataaattgtctttacatttcggaatctttcatcatggacataagccaccttatttccattctgttccgttacaagggtgcggctcaggccgtcctgataatcataccggatttcgccaccatcggcaaaactttgttttatggtacgcccccggtcatcatagctgttttccagaacataaattcccctgggattgcgtattttacggattcttttatctggcccgtaatcatagaagtatgtctgcccggctgcattctttacttcctttagacgatccatctcatatgtaaacgtaacacacctgcctgtgtggtccgttaccttataaagaaatctgctgaggctgtcatattcaaaattcaggaaagcgccattattattggaaatcctgctcagtctctcccttttatcataagtgtagaatagtccctgtccatttgagtcttcctgcttacgtagtttccctttattgtcaaagctgtaagtggtcatctcctgtgtttcatagcggtaaccttctctttcctgcttcaggcggcagggatgtccgaacaacggctctgctatgtttcctttatcccgcaggtaaatctcttctctcccatcttcccagaggattatgtatctgtcttgttcctgcaaaagctgaatctcataattatgccgccatcccttccccatggctcctgtcctttggtcggtgctgttgtagaaacgtttgaaccggagcggaatccggcctttgaccaataaatcttctttttcataaataaagttcccggtattggcattgaccgggtcccctgttatagcgcaaacagcatcctgcatgcctttcatgaaatcctggagggttgcattctgcatgaggtccatcagcagctgcttgtaagacgtaaaaccagggccggatgcctccaaccatttgcccatcaatgccatgagcaacttcttaatttcatcttcactcagttttccgtttctggcagaagccccattcaccacttttaacagcgacaggatatagttaaacatatactgggccgtctgaggatcctgcgttatctggattgtccccgctacgcttaatgcccccatgactgactgttccatggatgaaagctgcctggtaccggagcatacaggaattgtcccaagcactaatggcacaaatggcgcaatatccacagtatgttccctgtcccccattttaacaggggtacacgctttccctgggcttttgatttctgttttttttcctttaaaattaaattcattattcatggaaacactgctaccgaatatacttcttcctaccatactacattccctccccgtaacttaataccgtgtgtatctttcccatataatctccaaaaaggatcaaaaactgatcagtctttttcaaatttataaatccttccagctttatgatcttatcaagattctctttccaatatactcctgctatattacggtactcataaaataggaaccgcttcgcataggaaacctcgtagctggttaaccggacaaatcgtttcgtaagttccttcctcacgctctcttcctcctgggcatcttgataaagaaactctggtttccaataccttataacctggctttcatccaaatacatctgcttgtccgcaataaagagttcatactcataactctctgtaagcagactggtgcttaggtgaagcatacccatataagacggtttccactgtggctgttcttcctgtcttttcagggcgccaccaagcaggtctgctacagaagactggagatggcttaccttcatttggatggtttcctctatttttctttgtacacgcttcacgatataaggcttcaagtactcccgtatttgttctgtccggtccatatgtctcctcctcgtataataagtttgtaagcaagaaaaacagcttacagacttattcttttttggtataaatggtaaggacatctaagaggaactcccctcatcccgatttccatctatacagttaatcgttacattttaatatggtttatcctgtgttatgatatcagcagagtctgatgtccgaaggcactgcttctcctcctttcagccggcttcgtccgagactgcccgaatagcacgcagcctggcacatatggcacattccgcttacacagaattttcatccccagccggtagccccagcaagaaaggctgactgggtgcatgctcattgcgcgaggtttcggtcaccgtatgcagcacaggataaaccttttgcttcaggcttcacaaatccccatcggaatggaggtgatatcatgttaaagatcaactatatgtccaccttgtttgtaggtattgatgtaagctcaaagactaatgctgtctacgctatggactttgaggaaaacaaatacatctcatcgtcgtttggcaataaccagccgggggccgatcagcttgtaactatgattgctcagtgtatgcacaagcataaaaacctggatacggttcttatcgtgctggaatccacttctgtatacagcgtgcatatttcaaacttcctatcgaccagcgaggtcctcatgccctacaagccttacgtcttctgtgtaaacccaaaggccacttcgaattaccgcaagtcctatatcggaatggaaaagaccgatcccacagatgcatatctcatcgcagactttggccgggttggccgtacaaaaaaactggagccatggcgcggcgggcagttcatagcccttaaacgccttacaaggcaccgtatgcacctttctgagtgcatcaccagggagaagacctatatggtctctaatctttatctgaagttcagtgagcttcagctccttgaaggggatgacaagccctttggcagtctctatggtgccacgtcctcatctgtcctgacggagtttttgtctccacaggagattatcgatatgccggaagaggagctgcttgccttccttgcggggaagagcaggaaccgcatctctgacctgtcaaaaacttcggaactcctgcgcaaggcagccagggattcctaccggttagacaagtgcatgtatgaaccactgaacgtatcactggcaagctcgtttaactgtatccatgcctatcagaaagaaatcaagctgatagaacaggcgattgagaaatgcatcaacggaatgaaccctaacgccctgattatccttcaatccatacctggaataggtccggtatgggcatccgggattctatcagaaataggcgatataacagcgtttcattcatccgatgcccttgccaaatatgccgggctttactggcctaagggtgattccggagatttcacttctgaggacaacaaaatgtcgaaagccggaagtccctatcttcgctactatcttggcgaagcggcaaacagcgtcaggaagcacatccctgaatatgccgatttctatgccagaaaatatgctgaggtaaccaaacatcagcacaaaagagcactcgcgcttacatctcgtaaatttgtacgactcgtttttggattgctggccaaaaaccaactgtacaccggcgaaaagctggacgccgaatataatatcaagtcgaactgacattcggttttgtgcaaagcatatccgaaggtctgttaaagttacccttttttctgaaaaacatatcaaaatctttttcaaaaagttcttgacatatcaccagaatgctacgcgtctggttttatttctgtaattgttttaaatgcctcccaagctgcctccttccagtcatcggcgtcacggtcaaggcagataaatgttccgtgcagggttccgtggttaagggaagtaaagcagagcatgttatacatctgctcatcgatgccgtaatttttaaagtcgaacatacagatagtacgcccgctaacaagggttgactgatcatcttgataaaaaatggctgccggatttgacttacggattacttcttccatctgctctgccagtgattcgatttgagtgtccggtatttgataatccacaatgctgaacgcaaaattcacactgccgtctaaactggtaaaaatcctttgcggcctgttgacagaaggaaacttcatcagctgtatttcctctggcatatctataaattcctccggaatataaagtccaacgtcatcattgatagcccttaagcaaaactttgtaaattgcctgttaatgaatatgccttctccttttatatctgtgtatttttgacgacgcaattctttttttaactccgcaattttctcatcttcatactccatatgattctcccatcttcataataattttataattttatctatttcataatactaatcttaaattaatctaaaacaagccttatccactcccttttgatggtatttatgggaaaaaatttccataatgatgaaattccgtaggtacccggtggagttaacatgattgaaagatatgggagctctttctcagaaatcaatgaatctcttgctactatatctttcagaaatggtaacccatctaagcatataaactcctctatcggattttccgatacatccaaaaattgtaattttatctgggctagagctatctctgtattttccaaactgcagttcctggcagtaagcttgcttagcaccatactttgaataaccccaattcccctttcatgttcgatttttcctaaaatatttcaaatccctgatgtttttaatattctcagcatccagatccaatttaacaaagtcagatatctcgcttacctttacctcatcggtatgctttatctcttcccgggaaacaatccagccaaccgtatcatcatgccactttatgatacggtctgggtcattgtatttcaaaatactgtagatacaaataagaagaagtattattgttgcaattatccgttttatgtagtacttggctccattactatcaattttaaagattgtaataatagtagttatccattttatgcagcgattggaactgttactattaattttatggaacagcatcacctaactccttcctaaacatttgctattcagaagcttattgttccaaatatggtgtcctctttcgcacgtgttttaccttcccctagatgccgtgcaaaccataaacccaatgtccttttgaaccgatggttccatggtcagtgtgctctcatcaaacattaaatcctcctcatttccattataccaatccgacagcactgcctggcagggaccctccagtttggtgcagtatccaaaatatgcattcttcccgtctttcacatcaatctgtgcatggctgccgatgtattttccgtggcttttctgcaggttcagtacacatttttgagagccatactcgcattttagaatggcggaatgacaaacgctttcctttcctctcttttccataatttcctgatacgcgaacattttatgtagattactttccatagacctttccctcctctatttcttccaaatcaatcccgacagcccctcgccttaatatgctttctgcaaaatcctggctgactacaatttccttttggttcttaatatccatacagaacagattgctctcctccaataagatacgccccttccctgccgtttccagcattgttaaataatactgtttgctctgctgattatgttcgcttatgataattacatcccgtttataaacaggttcaccatataatttcaccacgtccatcatcaaattacttaacagcaaaaagggggctattacaatgtctggaaatggtacattttctcctatggaagcagtcaaaatacatctacgtggagtcttgtaaaagtcctgaaaacatagccactttggattgattttttcttgccattcattcagccgaaaccgctctgaaaaaaaagtattctgtctcattatgaaatatctcaccactttattcctcctgtcaaaaatcaggtttatttcccagcaattttactgtggtatattttctgtaatcaaacaatgcctatttttagttaccatcacatcataaaatgaggatccgtatatacctccagtattctaattatgtaaggcaaaattatgctatcatctaagctggtaagtatctggcttggcctatcaacagaaggaaaacgctttcccctttaatatctgtatatttctgacgacgcaggttctttttcaattctgcgatttgctcattttttaccctcattcatcatcactatgctgtgaatttttcacctgaataatttcgctacttacccataatttgagtttctattttcatgtaatgattcaagatttgacagtattagtaagaacatgaaaagggaagttagattttctaaaataaagttgaacataaacacagaaaggacgctcacaagcgatattccgtctcttccagaattcaattcactatatcctactttatttataataaactgtccgcttcctatgcatataattatccctattaatagtattataatctttacatatttttgtttgctaacagaataatgataacctattttacatgaagatgcgaaaaacaacacatatagaattgcctctaatgcaacttctgcataaaaacatactctagctatttcaaagtaatatgtgttgggcttatcacctatatacactcctaaccaaatatcatagattatcctcaaaactaaaaatacgagaagaatactgaataaatgtaaatagtttatcttcttattttctaaaaagaaaacagtaaatataataaatacaactgtaatatgaaaaatccaatatagcagatttgaccatctgaatgttccatcccaacctataatatttgctggtaaaacttgttttatctttataaagaaaatcgtctctattaataaaaaaattgctaaaagtaatagtcccttttttttcatcaattacctcccatataataaatggtttttttattaaagattctaagtttttaacctttcccatctcagtgaaaaaaccgcaatcatagattattcaatgtatcaggtactgaaatagcacatcctttttctactctatatggccatccctatatagtagctaacccactaagtccacctaatccgctctatctccaacggtcctcacttccagtatttctgattactaactcgcttcctactaaagccattaaagctttacttttttaattttctaataatgctttttcgcacaattcttccattgaattactggtagctttactattgctatagtttatcaacgccctttcaaataattcccaatacaaattactatcatctttatcaatatcctcaattatagcagcatttatcgcttcaattaaatcaactgtttttccaccataatagattaaatatgcaggttgccttttaacaatttttagatattctccagcataaacaatgagtttttgacatattctcccttcttgatttggatagatatacatttgatattccttgtactgtctttcactactcagtctgcaatgtgcatcataatattcatcacctgtcaattttaactggtcatcagtaactaggatttccgctttgatttttccttcttttattccagttaccaatggttctattattttatatccatcttttttcattgcattaatggttataaactcaaaattactaggaactatattttttagataggaacgtggtatatcataatacaaataattctggtatttaatggtatcactctttgttccccccaaaacaacaactcggtattttttcgaattagaaacttggaaacaaaatttaacatatgtatattcaatcgcatcggctattgcctgtaaaatatcaatctcaaactgaaacccaaaagcggctaaagtttttatatgataatctttagttgcacgaggtgttgttggataagccccttgttgtacataattatacttatcttttatctccccttgctctggcaatgttatatcaccaatccctaaaagagcacctcctatcccagtcaatgcttttacagtatcaaagtctttttgtgaaatcacccaggaatcaacatcataccagctttcttgcggacctatagtaacgccatgttctgggcgataaatttcaaactttatttcatccactacaatatatttattatcatctgtaatatataccctatttttttcctgccttatataaggcttttgaatagtctgacctgaggtatccgccacaattatagatcctgtacttatcattaagctttcattattatttttcacttctgtaattatccccttcgttccattattctgtcattactcttatctacgtctgccaaaattttctatatcggtacacttctcagaatttcctaatgactatttccctcctcttgttaacttataaatattatttaattatctaatgctcataaaaatacaaagatcccccgtaaaaaaaaccttctgatatttccaatactttaattagtctccctttatcattaatccttattagcgttttttcggtaggtgtagattttgtaatgatataccaggtattattatcatgaataagactatactctaaaatgtttagttcctctcctaatggttctttacctattttttccctacatagttcttctgttatctcaattattttatgctgttcttcagaagttattgacttgtttttttcaaaaccataatagttataaactatcttatattgatctcccaaagaagtttttaaagtattattatcttgaaaattataattcctgccacccgagtagtacaaataaataccccaaaaattgtaacggcttgtattctgtattttttgttgtgtaacctcttctccaaaataatctattatcattttttctggtattctacatgcgcttttgtcgttaacagcatagtattcatagggtttatgaaataaatatcttattgcattaaaatcaacgcaaacaatcgtatccgagttgtataagtatatcttagctttacaatatttataaccctgatacaaggtcgcagatgctagtaatattactaaaataaagaccactctatttgatttaataaaattctttattcgattaaaacaccaatatatcataatgcatgccccatatttgtaatgtcttcctgcctcataccactgaatttattacatttaagaatttagttcacaccactaccagataaagtagcacttggttgatcagaatagccatttgttaaaatatgcgtaatccactcaataacctcatatgatttaatgatccctgaatggtctgcagaaaaaaaccaacatctctttccaacaccggctatgccagacattttatccatcatggtagcagatagaaagggtaccgttccatcacctaattgtccaaggtttaaatcagtttcgtataaacgttgattaatttcagggctatctggaaagaaacggatggaagtaattgttttatagttgataccaacagcaaaatatgcaaccccttgaaaagatgattttaactccttgctcattccaccaagcgttcccaaaacaatatctattaagtcattcttccagtctgcccctccaaaagcaccttccccaagaatatccttatttattatactatttaataactttggagctccttcatatggtgttgcacaagtaattattttatctatttgattgttgtgtctatacatcatatagaattgggatgcaacgagtccccccatggaatgacatactaaatctgctttcactattccaagtctatatattgttctgtacaattccatagcactttccgtattactttgtctccaatcatagctaaaaaaataaattttccgttccgggaacttctcacacagaatatccactaaatttttatatgtattttgtgctccatattcacgaccatacttaagtgtgccagtttctacattttgattttccatttttcttggataaaggtttccttctttaaactgctttcctaaatcatgtattctatttaaaaattcggaatacaacatatcattccagtcatatccttgtggcaaaacaggatcccatatccttgttgtatcatcaaaaatataattgctagtaaacaatcggctccccattacgcctggaataattataattgctttatctacactctgttgatttatactttgtccactataagtaacttccacaatcccatgtttcttttccatttttgcacttctttctcaaaaatttttatatttataaacccattatacagaactgttgaggacacttattaggataaacaaatagagcttttgagtaagaaaatcattactcagttgttgcctttatctccgatgccgcattgagtaaaacctgttctgcttttattttaacttttccagctgcttctatctcaaactgtccgccatcaaaacagatagtgtcggaatcatttaattccattgtttcctcttttttactgatattcaaactgctggtaaacaatcctattttcgccccctctggtgtagccattgatttgtccttgggctttggattttcaggcgactcccccaaacagcggattgcaatccctgccccctcctcatggttcaaaaagcacacggctacctttgctccctcttctggcattgcatacaacgcattcccggtttccggtctccatggataaaaccacttgccttcgtccccatccatgtcaaatgttacacggaccgcctcgttctttgcttcctctacggtcccccacagactcattcctgtaaatccattctggtaatagggctctgttttgatgtcttcaatagaagacagcttataggtgaaccacaattccccctcctctaaccgtgccaccaattcaaaaaccacgcatttcctctcatttagccaaagccagtcacccaatggataaaaattgcgacttcgcagtatgtatgcaactctgccctttccatcttcctggcccgtgtatcttttctttatttccacctttatatccatgtcggatacgttttcctggatattctgtccctctcgcatgcccagccatagattgctatgacctgtctttatatccgggatcaaatagctttcctggtaactggccagacgcctaaggaacttccataccgtttctttataacagataaccggcttatcaagcgcaggattttttgctgtatagataaccctgcctcccagcatcccgcaggcacgtttggctacatctgaatagcgttctgatggatcctgaaaacttttgcactttgcctgggcttcttcatccagttttatggttgctgaacccgccttgatgcagactgtgcatgcctcatggtcttttgtcaggataacgttctgaatgagcccatcaaaaaataccccttcgtttctctcttcctcctgctcattaaccaggtggattgtgattccactcccacggtaattacgttcccacaccgcattatcgcaatagtcttccaagataccctgcagcgtcatctgggcatggtcattaattttccaatacagttcaaattcctgaatggattgaattggtatatctaatgaggtccttgcattgattttcatttagtcacctcttcccctactgcattttaacggtcgatccggaaatctttatcccatcagacaattccatggtgttgcttccctgccttaataggattttatttgatgcagccagttccaaaccggcgccggaactactgatactgatatcatcactggcttcaacagtaacagacgcattacttttaattttgattccctgctgatccgacagttccacagacatccccttattatttgtaatcaggattttatccggagtaagacgaatttccttcccttccttattcctccagatcttattgcttggctccgtcctcaatcctccccctgcgttctcatgaaaagcgctcgatacatatgcgtctccatcttcctcggttgggaaatagagccgtgccgtatcacctatttccggcatgcagtaccaaccagccccatcaggagatgaatataccgtagaaaacgcaaaccagcggttcccgctttgctgattctcgtcatcctccaaactgagctgtacttgttccccttccactgctttgaccttgccgattagagaaagccctattatctccttctgatgcgtctgcgacacccatatcctctcttttttcttcaagtaataggtatgccacaattcatttgcttttagttctgtttccatcctccaaatatagtatatatctcctttgaaggacatgttatccccaagggcatataattccctgctgccgaccttataacaggcagaatatccgctattttcgttggtctcccctctcttttcttcctgaatcgccatatagttttccgtatccaggcttccttccgaccttttttccggaattccaaagaaatatttttcacctggcacctcgcaggaagggacaaggaccgtatgcaatgtgcttgcaagacgctttaaaaatacccagtctgtctccagatactgcatcaaaaatcctggtacagaagtgtcctttccagcagtcattatcatgcctgcatttggatacgactcattgcaacattgtgcgatctgcctgtatgtatagcccggattctgaaaacttcgtttgtgtttcttatagtccattaacctgctcccggtataaataagcagatccatgacacacccatccagcccggaggatacatatgcctctgcaagaatcccacaaaatatattcttctcattcccattctcgtcatatcccagaatctccacccaggtttcctttactgcctcctggatatattcatcccgcttatcagatcggattcgggcagacagccgtacctgtccgtgctcattcatctgctgtatccctttgtaatccagaatagatactatttcaaatggccttatttttattccgtcttctctcatctgcttcctcctgtatattcactggcacacaactgcttcttatctgtatgcgaattggttaatctaccagaatatgacgcctttctttcatacccttggacccattctgccctcctcgttccatatcttccacaatcgcacatattgccttataaaaatcggcattccctgtattctgattgaaacgcttttctgttcttttatttatatatccagccaagacagaaaccgatatggctcccgtttggtttacgcacaaatatgcaaggcaggaatcctctgtttggctcttttcactgtttaaaataacctcagcaaaatatcggatgatacagggatgcagcgcctttcctccctgggctgaccaatctgcaaaaatcagattgatggtgtcatactctgtttccatatctgcaaagtttttatactgatccctaagccgcgccccgctccttagattaaaacggcacagttcaaattcattttcatttttttcttcttcctgatccaagagcaggtctatctgatatgcaatataatctgcagaacggcggtccaccgttatttttattttcaaatactgaatctggtcagacggctcatagtgaattcgctgctcctccatcatcaggcagataaactgaccatacttaatcatccccggtcctaccaccagttcttctccttgaaccttaatatcacatccccgaataatcccttgcccatattccaggtactccaactgcacgtgggaaaatgagtagtcccgaagtgaccacaatagttctttctttaaaatccggttccgttcaaatagtggatataagttctgcatctcttgtctcctttggtgccttcaatcaatatcgcttttgtcccatatctgccaagtcattacggggccatctccccggacatggcctgttccctgcctggctgtgaatgacaggttcaacctctttttgttccgattctttaattgcagctcccttgctgtcactgccctttccagtattaatcatgaaggaagttctgcccccatccggcattcacaaggtagaaccaccatctcgttttgttttacgtcatccgtgttgccctgccaaatgtacttttcatgcaatctcctgatttcaatacaggattgcaaaaaacattctccgcggtacttcccacagtataataattcctaacccatagattaccacagcagaaaccaccctaaacaacatgactttttggtgtttataaactatttttatcctgttggtttttccacctcctttgttccctaaaacaatttttcttttaatactcttcagcaataaagtgtcaccaaagaatccccaaaaaagaaatagtgctacaaaatagagaatatttacgatttccactgttttatatataaacgggttagcgaaattacaggcttgtattaaattcaaccctacgtcaaccataatttcaattaatataagtatgccccattccaaaaacataaaatgaaatgcctgccatactcctccgaatcctccaaataaagctgcacaaaaattgaattttcgctttccattttctaatgctctaaagcgctcacaatatttatctttatttattgttatatattccaaagcctcatcaacattgcattctgaatatttatttttcatattctctccttccttgaccatcattttgtccttagtcatttctaaattctcataaaacaaatcttcaaaatttaaatttacatatccaaaacacatatgttggcctacttattgactgccatctgtagtcgctgttgttactgcatagccttcaccatatctttcgccttcttttcataaatgtctctggcgccgcagaacccccacatcataggttgtcataaaatttatttcatcccatcaaagaaattctgcagccatccatcattctcaaaaaagaactcctcctcttttccgagatacagtttcttatccttccggtataccggtaccacggaaaatgcccagtcttccggtttagcccatacaaagaatttcacctcattttcttctatgtcatccgtatctgcctgctggatgtgttccccgaatgatttttgtatatcctcatactttttctctgtaaaatcccccagggagctgtaacaggtatactggtaacgttcttttccctccaggtcctttaagtacagcttcagcgttaaatcctccatattccgggaaaccattccacttttgcactttcgctttaaccgatggatcagaactacctcttccccagtatgggtcagagccgtaattcggtatggcagcgccggctcctcagtgcgaattgtaatatcggcgaatccatactttttatccttcaggtattttagcgccccatccacgcaggtcatcttcagttcaaaatccttcgtcaggtccccgcttcggcgcttaaactgaatggtcttgccaggcacgaattcctttaatgccccccggaacaggtctatcttgcaggactggccggtcagcttgatgagggagtagtcctccagtaccccttcctcgtacatccgccccatgaaccgatggatgattccatagatgtcccccttcagcagcagctcgatctcatatatgctgaaatacaccgcctcaaattccttgattgtctccagtcccttttccgtatacccggacagcttccatttgtccacggggatccaggtggtggcgctctctgctatagggcgggaggacaggccgatccgcagcgtccccacacggttatagaattcctttttcacaatctctgcaagatggaacaggaaataataattattttttaccttataatagtctgaccgactctgattttcaaactcgcggaaacgagtgggtagaaactcttctgcctctctataagcttcctccagttccctgtacagcgattccggcccatactggtccacataccggaatatgtcaatatcatatccggacaggatttgggataccggcttcaggcccaccttgtaaatccggtttacaattgcaatttttaacaactgcataatccgatacgtcaggttattcccaccaaaatctgtatctccattctcataggaagtatctatttcaatcttgtaggacacccgccggtcccatacccggaacctgcacgaacacaggtccgtggtccctccaccgcaatcaatgatgagcgcctggtattctctcccttcctccacattcccactctgaatcatgcccgatatagtgttataaagaacggatacaccctcatcaatcatgtccttcttttccactgaatagtctgggaggatttcagtaaacagcctctggaattttatcttctgcttcacggggctggagatatggaccgccttgatctcacacttgaaccggttctggaccgccttgattacatggtcaaaatatgccttcaggatttctttgcgtgatacaaacccacgccttccctggcggtctgtgatttcttcctgcttttcataatccccaatccaccgtttaatgtcatagaacacgcagaagccctcgtcaatgtagctggaatctgccaggcggatggcgtcatacccaaacaggaaatgcggccttcccgcttccactgcctggatccccactacactggggaacatggtggtttcctgccagtctgtggaggtatcataaaacagggcatagttcgtgtcatttatatgtaatccgcggtccccatcatggagtcctaatttttcaaagtacagattatccaaatagacgcccgccgtagtattcgaggttccaaagtccatggcaatcggcatagacaggggaaccggcttttttacttcaaaatccagaagaggaacccggtagacttccagatattctggtatgtagtcatattttctggtgtaaatctgataaatcagttctgactccctacgccccatacaatacaggctgtaattctttacgtctgactcccggcaggtgatatcagctgcttttgtcaggtacaggtattctatctggctccccataggaactacattgaagattgcgcataccgtcatgtccccgcctaccaccagggcattggttcctgcaaggtgcctgtcatagggaaggataaaaccgtcataaaaatctatggccagtccctcatacgcggtaatcttggagccgcactggagacggacatcctgccgttcctgcagtctcgcttccttccatatacgctccagtgactggagcccgttttcatccggtgtttcaatcaggaagtattcatccgctccccggtattttaaaataacatggattaactcctctttatccatagggtttaagattccctgtataattttctcccttcggcagatctcccggagctggaacgtggtcatcagctccagttccgctttccgataccgtttatccggtatcttctcttcctgtttcttcaatatatacccatatttatccatctgtttctaccaccctgtcttatccggaattatgacttccgctctttatgcccctgattgtcttctattttttagaaaaccgttccttttaaaacagcaccatctcatccatcaccatggtttcatcaatatccataatcccaaaatgatgctcccaaaataaaaacacatgatagttaattggcaggaacatatcctctaaaaactccagccttcctctatcttcctccgtttttttaacacctacataaaccaatatctgccgcactgcttcattgctggcatataccagagaatgcggatacatacaacgcataacttcccgaaaaagataaatagaacttccacactgatacaatttcaataccaaccgcagcaaacggcggattttttccttttcatactgccccgccactctggccgcctgactaccgcacacgccttccaacagatctcttaaaagaaagcgcagggcatattcctgttttgaaagtccctgacgtaaatctaattgcacaacatactgcataaaagcatcaaacagtatcttccttgccttttcatacccctccagattcctgtcaaacaaggctgaaaattctctggagaatcggtaaagaggattcatttccacagttttcttccctaatccctggatgttgatatattccatcgttatctctgcataagggctcccattgtttactggtacatatcggatttcctctcttggtattcccgcctgatccgcagctaaagcagcttcccatgcatagttcatacaatcacccccacacatcggtattcactgatctctaattgcatctgtgaaatgacaaaccgcaccatactgctatttaagtaatgccctggctgcctttcgttaaatttcagcagcaaaaccttccggctctccatagggaataattcatctcttacaaaccagttcatactttctatactgaggaaatcccgtgcgttttcacatatttcatacgccaccacctcaatataatcccggacatcaatctccataatccggcggaataaatctattttagtcatgagccggatccggctgttttctgcatagcgccggataaaagaatcccgtttccggtttgtcagaagcggtgcattataatctaaggaacgaaccgtttccttttggataatatgaagagctttccagttctcaaaggtttcctctaaggatttaatgacaattttctttctctcacggcggatctctaaaatgtcctcattggctttgattagatagccatccttttcgtccttatctactaaggaaaattcgtgctcatagtaaattccattgatacagggaatcatgaaatcagcgctgtcgaacgttacccattccatattccaaagaggtatcagtccatatctgatttcctctttaaattctccaaaatcaatctctgcttcctccagattgcatgccgctgctccttctgaattaacaaaaacatcatagaacttatccaagtatccggtatttatcgtatcccatggaatatgattatcctgaaatacctgatagagtcctcccatcacatcccgatatcgcattgccggctcaatctcaaataccactgctttactttcttcaccctggaccaacgtaccagaaaagctctttctatcttgaaattctctctgtctatcatcagcatcctccaaaaaaatgcttcccaaccagtgccggcttccatctgacaatttttctcttagaatcctttcgtctaaatcctcatcatttacgggaaagagcgttccattggtcggatcataatggttcttctttacaatcgttaaaactgcctcgtactggttatctgtaatctccaattcctcatataccctgcgctccagttgttggtactttgcttctgtgcattggattacctttccaagaccttctaacagtaactttttgacaaacttcctttcatccagttcatcaatctctcgtaaacgctcctctatgtatctttcaaaatcaaatggatattccaggatggcggataaattattatctttccagttctccatttcctactcctccttaaggactttttcggccacaaatgctcggtactgactactcaggataactgcagataggccaggcccacttttcttttgctcccctgtaaattatataatgcgcagatttcttccgataactcatcccgcaggccattgaccacaaactgaaaattatctctgcagtaatcagtaatatatgcctaattctggcagcagacttaattcttgataatgttcctcaatctgtctcagcgtatctcccagatgacatttgtattcgctgaaatatatcttatgcgttgaaaacacccttctttttttaattcgtgaatacaaacaataacataaaatagtttagaattttttcaaaaatcaagttataagcaaaagctgtaactatacttaatattgaaattgtatcttttatcatttctatagaagccaaactatttaccataattaaatccaaacctacacaactaataaaaaccattaaaaaaacaaatattttaaaactacctgttttaccgaaaacaaagcgatacccttttaaatatgctgagataaacaaaagcactgataaaaaaagtaattttgctcaatataaaataaaaaccatatgttttatggtcaagaaatatgtacatgcagatatcataaaatatacgaataattaaatataacagtaaaaccgtaaacatacttttataacttattgtgtcctgtaaataaaacctatacaatataataaatatcactatgatatgtatgatccaataaaccaatatttcccaccttagtgttcctgaccaacctataatacttgctggaaatactgtattaaacctaaaaaaataaattatctctccaactaaaataatagctaaaataaatgaaccttttttcacaaaaatttcactttttattggctggattgaatcttcctccctcctcacaatcggaatcatccccctcatcgcaggccagaatgcggcttctggtatacctctgtcattctactaatcctcttttaacgtcagctccatcatatcactatccgcgcccataccacttgtataataaatcaatccggattcccgcccccatatgaactgttcgtaaaagcctgtttcggttaaattattatagctattaattctttaaagccgcacatgcttttcctgggttgaccttatacccctgggccgacttcctggttgctttcctgctctgtttcccccgaactttcgaaagcagagctgtcttctgtctcagccgcttcactttgctctgccttccggctctcctgttccatggtagtttccagaacttcaatcaggccatccacttccaccaccttgtcatccaatttcagttctttatataagttctttgcaaacaggtactgctttttggcctccagtgtattcccggctgcctcctgccccttgcccactaatacaaaatcctcggcttgctgtttcttctgcttattctcttcagacttttggtcactggatgctattttcgtccgtaacagctctgcatgggctgtatcccctaattcctgatatttctcaagtgccatggcatagtaagccttggccccatcgtaatctccctcagcaaatgccttgtccccatcggtggccagctgcgtggctcctgcttcgttggaagcttttgcttttgcctcctgggtatcggcttcctctgccttgtccctgctggcatacaacgcttccagtgcctctatgacatcctttctgccttcctcaaagtaagcctttgtagccaggctcttggcctgtaaatacttttcctcagccctctcataatccccccgggccgccagggtatctcctaactgtatgtaatcaaacaccgataaataatccgtgatatgagacagctgcttgtctatataatcatcagccacccggtccgcgtacctggaacgttcctttgccgtcacataggccggctgggcgtccccatattttccgctgctgaatgcgtcatctgcaacattcacagcctctatcagcttctgataatcggagatttcctgaatctctttctttattttcagcttttccgccagctttaacgcttcactgcactcttcctttgcccgcaaaaagttatcatcctggatatattcaatcatgttggagtagcgcctctccatttcatcctcccgtttctgccgctgccggtacagcagccacacgaccaggcttacacccagaactgccaccatgaccactacggtcactataacaattttcttaatgcgccgtttctggttcggatccagaaatacctcatccacaaagatagatgcaaaggtataattctccaaatctcccggctgtttcgacaggagcagatcttctatattatccaggctctcctggggttcatcttttgcttcggaaaatacgtcatccagctctccattgtcaagattttcccatattccacggctataaagtgtaaaaatatcaccgtttaccagcttgattttcttcgatacaaaagggcggaagccctttccctgccccagataggtgtgcaggttgttgcgctgttcatgcctggataaggcatcctcgggcagttccttttcttttacgagctgggtacccaaagacatgtcttttgtctgttcttttacagagccatcccgataaaggcggagcctggtatttcctgcatatccataccgggcctttgcataatccgtaactatgactgtaacagaagcttttaatttttccttgctgtcagcttttgcaagagccttatttgctgcttccaaataagataggattgcacgcttttttatggatgggtgttcttcaaaggccaggataatggtctgggtggccagcctggcactttcagcatccggaaggtcattaagcccatcggctatgacataacacgcatatttttcaagctccacaaaggcaaaataatcattgttttccagcccggaacctgcttctgatataaaagcggtcttaaatgtgctgttctgttttctcatcctgtagtttcctcctgcgtccacttcctgtcttccgtaattttataaccactattggttaacctttatcactacaactgatccgttatctttctcttcttcctcactctgattcaccagctctatcagctgatatgccttgtcctggcagcttccttccccttccagacaattctccatgtccttccagcgggcagtttcatacaagccatcgctcatcaaaagcacatactcccctccatagagcgcgataggcgtgtcaaaaaactccacatcctgaaatccatcctgacccacaaagttataaagcctgtggtgattaagcaggctgatggccttctcccttgtcagctttccctcttcatacttctgccttgccagtacaccgatggtatgaccggagctaaccggtaccagttcatggttccggtatacggcgattttgacatttcccactactgcataataaagtttccgttccattatcataaccgcgccaacagaggcactaccttggttttcctccagttgttttaggatctcccggttggctccctgaaaggctttccggaaggaatgctggggattataaaaagcgtttttgtcctcaaatatatccagaaatacctctaccgcggtacggctggctatttttcctccgtaatgcttcccaattccatcagctaaaacagccatgatcccttcctcggtttctgcgatgccgtattcatcttcctgaacctcccggtctccaatggtcttagaggctccagtctcacaaaattccagacgcttccgctttttcttcattgaataaacacttagccgcactcgtccgattagaagtgcggcgccaaaaagggataaacataaaataatcacttcaggaattgtcatggctcccctcctgtcagctctctgtctcaggattcttgttccctttatcctgccacataaaattctccccgcaaaacggaatgaacacaaatttgctctcacccatttcaatcacatcataagaatttaaaacggtaggagtgtaaacagcggcctcattatggtacaccagcccattgctgtccccaggcaggagtacggtttccttcttcttggggtcaaagacaatgacgccatgattccttctggaaatctggttatcccctaacacctggatatccatgtcatcggcccggccaatgaaatttttccctgatttgattttgtagtcctttccctgcctgggaccggaaatacaaacaagccagccgcatactggggatgcatcctgggcaaatagtaatttttccagatcttccccacttttcccaccggtctccttcttttcctttgttgcggtttcaatattacaataaggacaaacggtcccatatcttctggatgaaaacagatgcccattctggcaccggatcagattgctgttcataatgtctcgctcctttgctttttgtctatgtatccggccaggccggttattgcatttttgaataccccgtttattttaggagcaagtggttaagcccaatatacaggcagtcttcgcgctccaggcggcatggcgtatccttcgaaagcttatataccctgccatcgctggccttctttacactgagtccattggcgcttcccaaatcctccacgtaccagcttccagtggagtaattcagcactgcatgctcgatatccaccatactggcataggcgctttttcctaaatctatatccacctggttctcttttacatcccgtccaataaccatggctgtttttccataaagatcccaggtcatcagcggtttatcctcctcattcaacagcacaatttctgtaatcagccctgtttcttccagctggtttcgctccatctgttccgtgtcctcctgtctgtcccccttatctctgactgtcaataccagaaacaggaccgttaaaatgccggctgaaatcagaatgggtccccgccacataatctcttccggatacacaagtacaattcctatgactgccagacagagacagacgattataagatccagtattctttttttcatccccgttttcctttctcatttatttctcaatccccatatatcgttcaaacatctccgtcatatcaatcggatttgttttcgttttcttatttgtattcagtttgtcctcgtccacctggctggttcccggccggaagccaaagtactgttcaaagtttgaagacatactgttaaaatcgaagctggcggttgtctgggaagtctttttattcctatctggcctcttttgttctggtcctgctgtatggtcctgtaaacgtaccttgtcataggccttccgcttttctgcatctcctaaaactgcataggcttccgcagcctctttaaatctcttttctgcgtctttatccccgggatttgaatccggatgatactttttagctattttccaataacttttctttatctcttcttctgtggcatcttcccttgcacctaatattctataatagtctggctccatccctgcctccttctcctctaatcaaacctgggagcgtgtcctgtcacggactcgcccccattgtctcttatgcggccggatatccgccttccactgttatattggctattttatctttcttctgcttaattaccagcgtaaaggttcctgtaccctccgtatcgccgtaatcttctttataatcaatgataaaggcattggggaagtagtatttcctctccatgatcccagctgctacatgctcaatggttactttgcggtagcagtcggctttttctgccgcaactgcggaccataaagcaagctttctggtgctgtcaaagggatcaccatccactgcggttaagattcttcctgtaatggtcagcgtgcttcctacatctttggttctggcattggaatccagagggatatctgtagtgaactttacgctgcgcacacattcctttgcaatctcaaaacgttctaatccttctactgttactctgtatgacatgccttatttcctcctgttcaattctggtttactcgccgccgaagccgccttcaatcctggttgccgcgttctcatccttcttctgtttcatgtgaaggtagaaagttcccacaccgctctcatcatccacttcttcactgtattccattacgaaggcattaggaagtgtgaactggcgtaccacctggctggctgatacaaccgtaatctcagcgttacggtagcagtctgccttctctgacggaacctgagaccattttgctagacctagcgtcggatcatttccttctcctcccagcttatagagcattttaccccaaacctttacagtcaggccaaaatcagttgctctggcattggagtctgcagaagatgcggaattaaaatccactttagtaatacttctctcatcaaatacgatctcctctggtcctccggtaattttcatacgaaatcccatgctttttcctcctcttcttcattaataataggtttttataatggcagaagtttctggcatacccttccgccccaaaggcattacgccttattggctgataagcggttgatttcaacctctaaattctttatattgccattaaaggtaatgttcagcgtgcagtagccgttctcctcattgatgatataatcaatatcatcgccttttccaagaacaccgtttaaatactccttctttgacaaccactgactcttttggctgtttggattgttactgaaaaactgcacaatggagtcttccttgaaatcccccgtcccatggcgcatcacccgttctatgtaggtagtcacctgagtcttgtaaatcggctcgaacatattaccatctgacattaaatttctggccttataaaccatgatattcgtgatgtcatttcctttataggcagcattttcggaactaaatacgaagccgaagtttttgcggttaatatcatttttaatggaattagtgaatccggtgatttccttcgccatcgtagtgcaggcaaccagactgtggtcgtcagcctctatatcaaaccgcactcccggaagctctgggtcaaccctggcctttgtaaacttgtcctttaaatattccggacactggtaagcagccacgataccggctgccacgtaagccgctcccacatagaccccatcaatccagatcttcatgacgtcttccttttccttggacagctccacggtatcgtcattgtttaagaccatgcggctgtctaaaatcacgccagatttgtctttggggataatggtaaagtttggtacacagggaattgcaaactcactgaagggtttccccatcaaggaagcacagcggtcctcatatttctcaattccttctgtggccagggcattaaaagtggtgctgtcgtcagcctcatagctaaaaaagcactgtacgctgaactccttaaatacatccaaaatccgcattaatgattctacgctgttgacatcggtcttttctactttggcatttccccggaaacgctctctggtcagcttcatcttgctgtactggtccagggacacgtccgggacaatcgaataccaaaccgtgtttgtaaaatcgtttttggcattggtagtgtttaagtatgtaattaatcgggagatattactggattttgccagcatgtcattggatacattggttattaacatggaaggtttcattcccttaaccttcttcggatactgctcgaagaaacaccagattcccaacagcttttcaattaacggttttaccgttttaatgaaagcgtctttggattctttgtagaattctaagtaggaattgtagtttgcaacctctgtctctttgtcaattttgctttccatagtggaagctaacgggcagaaggttcttgcgaccaatgcctccacataaccgttgctttccccgctgattgctttatagtcatccttcagcgcttctatgaggcctgtgttcacattatcgtctacggtagccagggcggttgtctccaccttcggagcctctaaaacccggagttcccctccctcacccatactcagaacccccagggccagaggcgtattatccttcttatctcccctatcacctagtaagagacgggtcttggtatcctcaatcgccagaggcagcatcgccatcacattattgtaattagcactggcttcctcgaacatcacattcaatttgtctgcaatatccagctttttgggatctccatcatctaatttcgcatactcgccataagtatattgaagctccttgcggttctgtctgatagcctccatgacctttctgggagaaatcatgtccgtcaacttttcaaatttgaagtccacattgatagttccctcggatcgctttgtatccaccatggacatcagcatacccatgaattcattctgacggtttaacggaatctctgtcagcatttcctcgggtactccatcgggcttatccaactggtaaactattttttgattattcgcgttaaaataacaatatactgcaggcttaaacttttctaacaattcatcgaaactgcgtacaagaagatgatcattaatttctttgattttgtcgtccgacaggctttccagtcccctgacatcgccgaccacggtaaggaagtccggtttttccggattaatctgctccatgagcatggttcggtttgtctgttttattgcatttcccatatgaatgctcctccttttatatatctttcttctttctctatgaagaaaaggaaaagcgcacacgacctgatctgtccagcgccatatgcgttgtccttgtcatccgtccctgatacgggaatttaaccatgtacttcttttatatttccgtatgcaggaccctggtaaaccggtaaccggatttcttatcccaggcagtccgtgttctgcttttttcatcctcatttaaatcccctcccgttcgctgggctttaaatctttataatggatttccatttctgtggcctcatcctcaaaggtaatggtcaccttttcaccgtaaaataccggataaccaaccccctttttcaggatttctgttccccttaaagccgtacaccgttctgactgatccataataatcacagaatgttccggtccgggataaaaaataatatcatctgctcctatctttccaaacttgattttacaggaggttaaaatctggtttaatgttatcctgccactgtttcggccaaagagtctgtaggactggggtggtacatcctgtccgtccgctgtctggatcacgtacatgttgaatttaccggtataggtgcaggatttggttcccatctttttggccggctccctggctgtcggcggctgggccatataaatcactgtggtgttctttttcttaatccataaaatcagaatgaaaaccagggcaaggaccaatgctgacaggattgcaatgagagggcggtaatccggagagggttcaaagacaggatccggatacttctcaatttgtgcctcagccggctgattgatataataaatcccatccatatcctgagtgttcacagatactcttacagcctccacaccatcggcaggtatggttgttttgatttgcccgttttctatgattccctttaaggaaacatcattcaaagtatagggaatctcaacgccttcgtaccgctcctgctcccataggttctctttcttcccttccatatccataagacctatggtaatgtccgcccagtgttcataactgggcggaacatcttttttaatttccgcttctgtccggggcagctcttcgctccggtaatgcaccgtaagctgaggttctgctttaaattcggtgagaacatgggcctggactcctgaaatatccggtgtttcaaagtaaaaatccacggacccggaaacaggacgtttcatttccactaccgcaaacttctgacccgcaatggtctggccgctttcagaggcataatcggccctgacgttttgaaacccggcttcactggtaattaaaagctttaaataatcagcgcccttgggaacttctatatgtacatttcctccattggcgtctgtaactcctgcagcctgccttggaaaactgagcttatctgtgataatccgctccataatctgggtcaaagagcctgactggccttcccagtatatcgcgccatctgtcagttccgcgccgtcaaatatgtgcatccggggatcatttaattcgcttcccacagctatgatgcagatcttaatgcctttatccctggcccattctgcagactggacatacatggtgcgggatgcctctctctgctccttatcaggcatatcaatctcgccatcagaaagcatgatgatgtaccggtgtacatcttctgtttcggaaaacagccctacagcctggcttaggccctggcccgcattggtatagccggaataactgaccgccccaagctgaccttctagctgttggataccggtgtctaagcttttaatggcctggatttcagtattgtaaactaccagtccgatcctgtaatttgatggcaggctgtaggcagcctgacggatggcgtctatggccagtcggtttttatcctgtgtgttcatggaaccgctggcatccaaaaggaacaccacttcgccattttctgtattatgtctgatattttcttccgccatggaacgattggctgtacccataacaaacagagcgattacaatacctagcagcaatttctgatatcttctcataatacgcacccccggaatagatactttactcaataaatgtataataaaaccttgagattaggactaaatcctcctgaagaagctcacacattaacagccgcttatcgtgagccattttctccactaccagtcttttatatttacgggtaagacttttcctgttccataaatggagatggttatacaaaatatccgtgtcatagcttatatttttaatttcttccgtcttgtctttataccacacatgaaaggacgcttcgtaacgataataactattgttgcttttttctaacaacataaattcactccctattaatatgtaacaatatattttatttccgttatatttccttattttccataattctacaaaatctttcaaaaattacaacccacttgacaaaattgtacacgttcccttccaaaatttgcacatatgaggtatcactccagttaaaatatggctataaccgtaatatactggtcacattgtctatataatatatttggggagccctcctacattgtatcgctcaacaattacgttgaatttattttcgcagacgggaatcttcttaaattggtatatggcaaaatagtaccattgataaaatctcagaagaagggatatcgtatacagtggaggctgtaaacaaggattgaccctttttctgttcttttatttcgagttcaatattttccatactctgcttcatactgccggagcttctctatactgactcccaataaatgagccgactcattgactgcaaagccggaacttaaacgtaaaaagtgcagattctttccaaatatcttagagtaatcaaacggggatgtttcacagccataaatataatacattacaatctgagcatattcccaatatagaatcctttcgagttttctatctgctgcgtttaacacaggaacaggccgcggagcttgctggactatcgcatcagtttttcgcctgcatcgaacgcgggcaaaaaaatatgcgggctgaaagtattataaagctatctaaatcaatgaatgtaagtacggattatattcttcttggagagggctcggagattgatcgaaactatttattagaactaatggaaccgctgaacgagattcagcttaaatgtctggaagaaattattaagaattatctggtagcctgtggatatacagtgccaccattttaaataaataaaagcctgcttttatacaggctaaagttgaattgctgattgatttatttttagtttataaccttaccccaataaagcatcacacatagcacaatatggcttaatgctatcacgacacctgctgggctttttataaaaaaaagagacattcctacgagagattccccaaaccatatgtaacggcttattttgcggtaacggactctttcctcctctgccagtggcttattaacattttcaaccggagcgaaacgtataatcaataagcccgatatgatataagacaccggctgcatgattacaccggcattcgagggaaggattctatatatcacacaaataatacaaagcaatacagcggatacggcagtacaccccccattggtccttgcatgatgcccgccgcaataagaccttaggggaatatagcttgccaggaatagaaagaccggcatgggagcgtggaacagtaccgcaataagaattgcaatcaatacatttataacctgattaagcaagacctcataagcatattgatacagcccacgatcctcatctggtagagaatgctttttaatctgccattcaacaatccgttccgccagatttctgatcatcagaacttcctgaacttcagggcttcttctggaacttccggctggtgatgtgcccaagcgcatgtagcattaacggtataaagtaccattgccagagcgcaaaggtttgccatatttaccatgctgcacttgttttttaactgcataaacaatttcttcatatccaaaatcctcctgtttttttgttataatataacgcaaaaagttgttaaaaactaggtgactgccaaaattatacacgttcccttccgaaatttgcacattttctatttcttacaggcagaaatgattaaagttgtaatgaaattgctccctttttcttccagcataagggttcctccatacttttcagccagcctcttcacaattccaatccccattccatggaattgtttttcctttttagtggtcaataattcctctccttcccactgcacagagaccaaaaaactgtttttgatgtatagaacaagcatatattgattccccataaacagttttacgtctgccttcctgtggccagcttcacatttagcagctgcctccaatgcattatttaacagatttccaaacatggaaatcatgtctgcatctgaaataaaatctacattcaaacagtcctcaacaaaaacagacagctcaatccctttattttgagcctcaagcacgtattccgcgagtattgtattcaatacttcattcgtattataaataatattatgaccccccatctgaatctcaccctccaatttgtctactatttcaatgatttttttatgctgtttattcgaagcaaatacacggatttgtctcagatataaatgtatatcatgtatataatcacgatataatttatgaagacttgcgatattttgaaacttatcatcctccatggcctgtttcaggttagacatttcttcatactttgccagattcatgatacttttgtatttcgccagaacaataaatacctcggcattggaaaaatataagaggaatgctcctatgcacatcagtttttggagagacactgaatcaggaaaatctatatataaaaaggtactcagtacaatcaaagatgagaccggcataacaagaagataccaggcaaacgcctgatactctccaatatccaatttttttagagaacgttcaatcagcagaaggaacaggaaaccaagtacatattccgggagaagaaaataaaaaccttcggaggtgaaccagggtggtatctcgaattgcgtataattggaaatcagccggaacagcatctcataagccacctcgcgtccgccggaaaatatcgcataataaatcaccgtatatgtaaatacaccggctaaagacagcttaaacatcaataaggcaaataacatatacaatataggaataaccacaagatttagcaaggtgctgctatatgcatttatgaaaaaaatctgaacggtagccattacggaaaataaaacatgcattataatattataattccgcaatttaaacatcgttttaaaaaaagagtaaagcatatacacatccacggcgcaaagcgccagcctgccaacggaaatcatttccatattcacgcgatcactcccttccaacatattttgcacggatgaactgccctttcagtttattaaattctttcgctttgctgcgcgctattgggaactgaccattgacaccttctaaccctaatgatttactggtgcaggtactcatatattgaaaatttatgatataactgtcatgggggtagccaaatccatagtccttcagcttttcataagtcagttctaaggcttctgagagcctgacatcagggtacttgccatttttatctgcttcgatgccatatatttcataggcggatggaactaattctatccgtgtacttttcttatatttttctatatagattacatatctggaatcaataaataacgatctcttttgcagattggcggccaggctgggcatgctattacattctgccgctttgtctaatgttgcttttacatactcattaaattttgaaattggcatggtttttactaagtatcgaaacggcgttacttcaaacctttcaggtgtaggggtcgcgataccagtataaaatactaaaacaaccgtagaatccaattcccggattcttttagccgtctcatctccattcattccctccatctgtatatctaagaaaatcgcggcaaatctgatatttttcatgatttccaatagttccgtacccgaactgaactcatgaatgcacagtccttgctggacatccatgctcttaatacgttcaattaagtgttcacgatccattggggaatcatcgcacacagcaatattatacatagaatccgctttcctttccgttaaatttatagcaattatagcaaattttgtcataaaaatcatcccttttgagtaaactttgcatgtcatccccatgaatgtagcacccctcacgatactatctttgcgttttttaaaagttcagcaccggctccaaaaattctgacggatttatgctgattataaagcgcttctttttcatggatagatttgaacagaatgattctatcattttccaaatacgcagactccatttccggattagtaggaggtttgggtggtttaatatggtacggcaaaagtcgaggatacggctctgtttgagctgtacccccatctacctctatctaacgttcctctactcttctatcattataagcatgacaaaatctgaggaatcctcctataataggttttgtggtggttagatgcccaacatccagttaggactaacctttccattgtttaagttgtagaatgtaatggcattggtgtgacgaaatcctccttggaccctagagtccgtagataagcccgtcagcccgccattccatttgcaaccgttcgtttcatgcaggttggactgctattgtacatatccgtatgatacccaggagacagaatcagcaatggataaccgctggtaccatgcaaatctatctgattggagattacatatgatgttaaatgcagtcggtattgtttcaaaaggcaaaagcaccgtcgctgtcctgcaggcagatggtactataatcaaaaaaacatttgatgttgttcactcttaatctcccctaaatgacctttcccaggttcatccagcaccttgagggcgagaccagagtggttatggaatgtactggccggtatcacgtgcctatccttcactccctccacaatgctggaatctttgtcagtaccgtcaatccacacctgattaagaacttcggcaacaacaccatacgaaaagtcaaatcggatcctgctgattccaggaaaattgcccgctatgctcttgacaactgggcttctttgcggcaatattcaattatggatactactcgcacacaacttaaaatccttaattcacagatggacttcttcaccaaacagaaagtctctgccagaacgaatctaatctctttcctggatatgacttatccgggtgtgaacccattattctccagccctgcacgcaatgacggcagtgagaaatggcttgattattcggagtctttctggcatgtggactgcgtccgtaaaattggtctaaaggcatttacagagcgttaccaagcattctgcaaacagagcggataccaccctccccaccatcatccccatccaaccaaggcaaaccggaagaattgtacctggctgccaaagagcttgttgctgtttacccgaaagataaagtctataaagacctcataatgactggtattgaacagctcaagacaaccgcgaaacatgtagagcacatccggcatgaaatggatgcgcttgcttcgtctctgccggaatacaaagccgtgctctccatgcacggcataggcaaaatgcttggcccgcagcttatagctgagatatcacactccggcaaggtaaaaccgattggatggatagtatacggattgcgaattatggtatcgacaactggtgccacctcgtgaactttttacctgaggacgaatcatatgcacagctccgtttgctgggaaggcaaaagagaataaatggcatgtgccttctgttcgtttccgtaaaagcctttctttttagcccagtttgtgtaatccttgacaaaacgtttcccactgtaacaagtaatgttgtcatatatcagattgtaattggcgaaagcggatctacattatctggcggtgagaagcaaagaatctccattgcacgagcaattttaaaagacgcacccattgtcattttagatgaagctacctccagtgttaaccctgaaaatattctcaaaatttcccacacgatagcaaatgatggaattgaccccaggggtactccccgtaccgccataaacgtcgaattatacttacttttacgcttttctaaaccgttagactgagtagttcaaggagggtgcaaactgaaccccgcccccgtccaacagacaaaaagagaaacacagggcactttttgtcctgtgcttttccctatgaattgcatccacaacatatagcggtcgcactgctcaaccagcaaacgaatggggggattgttatcaggtataggcaagtaatcctgactatcctgtggctctgtatcaacggtttcctccgtgattccttccgtctctgcttcttgggcagcaatatccgcaaaggtaatgtgccgtacctcgcagggctgccctgccgctttctgtgcgtctgtaacatcatcctccatatccgaggcgggtatcggctctggcacgtcctccggctgcacaagaatatagaggttagaagtctgcccccggttcttttcacggaaccggggttcctttttgatgaaaccggcgtctaccagttcatgcagggcgcgtttcaccgtggaaatagaaacgtggagctgctccgccatggttggaatggccgggaaacaggtcaagtccttattggaacggtcaatcaggtaaatcaggacagagagcgcacggctctttagactgctctgataggctttctgctttaacttggcttgttttgtcatcatcaaaaattcctccttatgccggggttacgcccctgcgatatattttgtaatcatcgtcttaaactgctttgcgtttgccgcgccgtctgtcggctctggctgatagtccaggaacagcaccttatggtaatcgtcctgcaaggcctccgccacatcccctctggaatcctccacgacaaacggacacaggatataggcatagctgccgtcctgtgtccgtttcagcttggcagtatgttgaagttcccatgcctttgtcccacaaagcataaccagcagatccgtttcttgcggcactactcccgaactgcccatatcccgtacaataaaatgaaccggcgcttccggctcctgcctgcggtactgcaccccttcaaaacgccagccatacccgtcctgctccatgccatagcttcgggcaagaatcgggagaaccctgctttcgttgtcctccacataacaggccgtggcgcctacgccctgaagccagtggcacaggctgatggcggctgtggtaacgccaatcctcggctgggagccaaccaccgcgatacggatattctgacagtcaaagcggtatttcacaccgcccaccggagcggggtgctccttggggctgtaccgggtcatgccggtttcgctcaggcactcggcaatctcctgctggatggcggcaatctcggtatcgcagacgatattgcccacgccgctgtcaaggagagcctgaaagagcgggtcggccggggtaagcccctcgcagatcaccgtcaccctcgcatggtacatagtcaaaaattcttcaatggcttcggcaaattcgctatcgtcatccccaaacgccagccggtcaagcaccacatccgtgaagtggctgaaattgcgcatatcatgcaccacaaactgttttaatagatagctgcccaccagctttttgatgggcatatcgctgtccgggtcataccgcccggtgaagtccagcagattggtatgctgggtagatgatagatataagatcacagcgttccctccgtttccgttagtttcctatcgcccaataagggcctccggctgccccgaacttgttggactcattcataatgatggacaaatcccattcctgttcactgcggcggtagctggccgggtctgccacaaggattttcccgctgctcgtcacaccgcgcaggacaatgaaatgcccgccgtttgtaaaatgccccttgctcataatgaccactaccagcttgccggaggaaagggcgtccacaatgccctgtgcatccaaattcttctcacaggtcaacccataggaagcagcggccgccggtatcaggctgtggtaagagccgttcccctcacagcggtggccgtttgccacggaccagttgcaaagttctatgggatcgtgtgcttccccggtcagtgttgatatgacaatggacatggaggtggggccgcacccggcttccccgatggtgctggacgtgccatacatgacatttccccagcgttcatcaagctggttataataggtcacttccatgccgccgtccgtaaatacaacgccctcgtaagactgtccgctaccgtcaatatagtcctgctcaaaaatgccgaggttctggttataaccatagccttgctggagcgattcaattgccgtcagctcatcgccgctaagcgcccactcctcaaacatggaaatcgggctggtaagcaggtacaggataaaagcgatgagcagaagcagggaaatgaccggcgctaagataatgatgagtagacgttttcgagcctgctcatcggtgacggtctgcaccgccagccttgctaaaagttttgcggtaatcgggtctactgccatcagcggccacccgctttccccatgtaaaacatcttataatccggaatctcaaaattgatatgcagccgcttggcgcccaccataaagagggcgtgtccgcgctttctggcaagcaaaagctcctgctccgcttcggtcaggtcgtagagcttcgccgtttctttcagattcggaccatccgtacccatcagcagcttatagcaggggatgtcaagaagcgcctgcccatactgcttgatgctctcggataaaaagtcgatgacactgtggctgataatgcccagagccccctcgtattttctggcgcgtttcataacgttgcggagatagacaagggactgcggcaccttctggtcgatcatcagatacgcctcgtcacagatcagcagcacccgttcctcccggttccggctcatctgctcccagcagtaggtcagcaggttaaaatactgcgtccgcttgatgctgtcgctggtttcctgtaaggcgttggtatcaaggcagataaactggctgtcggtggcgatggtgctgtgtccgttccaaatgaaactgtcggagccctctgcaatatcatagagcagcagggaaaggtcggcgtatgcctgacggtctttttccgtatccgccttttcctttaccagcttatagagctcgaagaaaataggaaaatccgtgggtttcagctccgccacgtccgtatcccatgtgatgtgaaactgcaggtacagttccaccaggcacttcttcagcacggctttctgcatatcagtcagggaggggatatacaggttgaaaaagatttcgaggtttttcatatgcagggcaaggtcattcatgccgtacccctcgtcacggtagagacggtcggcttccttttcgctctcatcgtcacggggcgatgggcgcacctgaagggggttaaaccgaccgccagcgccgcctacggcattgatccattcgccgccgaggttgtaacagaggtctttgtactcggattccgggtctacgacaaggattttcgtgcctttcatgtactcggacatgatgatatgcttgattgccgtggacttgccaacaccggaattgcccatgacgacaaaattactgttggtgcggtcgccgccacgcttccacacgtccacaatcacaaggccgccgctggaatcctgtgcaaagtagtagccagccccgtcattgaatccgctggacgcaaaaggaaaaccgcccacaaaggtagacatcggcacaattttctgcaagatgctttccatcttcccactgttcggaaacgagggagagaggtgacggaagcactcctgttgcagattgggaatcacccgcattttgcatttcatcacgctaatcacgctttccgcacatcggcacacctttttgaacgtcttatcgtccttggcaatcgggcatacctggacgctcatcagccccacggtttcgccctcccggtcaatctgcataatgattttttcgccgtcctcggcggccttttccgccctttgtcgagaaagtgggtctttggcgccctcggcatacccccgctgctgtaccacattgtgggagatagcggaaatcagtgtggcgttgtccaccggcttaaagccaatggacacaatcgtggcggggatattggtgattttggaaagccactccacctccaccttttgcggataacggatcaggccataaacctttccgagattttccccgatggaaaggctgttcttctgaaattccagccctacgggggtgataacgttcagcagggcgctgttctgtacgtcctgctcctgcactgcctgttgtttacgcataaatatcctccttgagtgtcggtacgctggcgctgtactcggtgtcctccaaatgggtataggacggattgttgatcaggttcagcagacggacaatttccttttccgtcagcacatcacagccgattccgttgccggtgaatttctccgccagcaaagccgcacgcttgaacagatctttttccgccccgtcctcctgcttctcccaaatggagatataaaactgccgctccacgatttcaccggagagcgcatagccgctcatctgcaaaatctcctgccggagcaattccttttgcttttcacccgcttcccttaacatggactgcatatccgcaattaaaggggaaatatccaccgggcggctgaccgccataaacttgaacgggtactgaatgtctgacagttcggcggtgagctgccggatcaggctgtgtttttcggatttgctgtacaggtcaatgctgaccccgtgaacccgcagaaacgtcagcaccagcccgtccttagtgtaaagatacttgtcctttacatcccggacattgataaattcctgtgccgtgcggattgcggcgctttcctcgctgctctggtgtttgggcttctggtgcttcagcaccaaaagaaaaataccgccccccacaagggtgacggtaagcatgataatcgggaataaaagtccttccatcatcgcccctccatttcttcgctgttatcggaattatcgtgcatttgccgtaactctgctgaatcgtccatgtccggttcttcgcccagcagcctttttacagtttccataaatactccgcagctttcaatctggctgatatagtaatcctgataatctttttcaccggaagaatgtaatttcccattatattcttccagcatttcctgcagaccttggattgcacatccaatcaactcccctgcgctttttccatctgataattcccggtagtaaacagcaatattttctaaccgttcctcatcgtccactgtttcgcccggacatctaaaaaaactgtcccatatgccaaaattcagattttcaatctctaccgctaaactgccacgctcatcttgtggtatggaatattctaccgtgggaatgaagtcctccggttcagcctggatttcccatttctgcacagcgtcatggattgtcacatctttctgacacaagatttccagcgtgtcacccgttttaacagctaggccgggaaagaggtaaatatcacatccgtctatttcataatgcttcaaatccagttcgttgaatgtggattcgtcaatgtctacggcaatttccagttccctgactttgaatccgttatgccttagttcgccgcaccactcctcctgcctatataccagatgccctatttcgctcgtcttatcggcacagacatacaaattgccaagctggaggcattccagctcctgcatggcataccggctgttcaacacagcctctatgcgttttacattcatcaatagtgttcctccatctcatcgccgtcctcgtcagtttccccctccaaattctcctgacgaccgaacatccgccagtagcgttccctgtcctcctgcgcctgcggggattttaagtattcctccacccgcatggaatcacgggcggcatccagtttctccgcaaggccggtgctgttgtgatagattgagagcagcctgccaaaatcggtgatgccacgttcctctgcataggcaaggagtttccgcacgttatcaagccccacgtcaaggtcaaggctgtaaacacccatggtacgataccatgggcagtttgggttgtattccatttgaatcaagttatcatcaaggtcgaggataaaccgcatctcaaactggctgtgttccttatagtttttcatgcaggctttcatcccggcagacgagacgggacaaaaaaacatatccgcgtccataagccgttcctgctggtacttgccatcatagtccaaatgctcaaagatatgggcgatagacttctgtccaggtaactgcgcctgcaatttcttcgcctgcaccagacggagcagcggcgacaaagcgtttgccccgtggtaagcgataaaatagctggtttcgcccttttctttgagtataaaaaacgccctgtttcccatagccgcaccctatcgtacaggaccgatgtgccaatcgtcataaagtgatccccgaatagtcaaatcatcggtcagattaattcgcagcataccggccggcgtccatgcatcgatacactccacataggtggtatagcgcccatccgggaagtagggtaagcgcccggcgacttaccgtatcgctacggcagttttccaaacgctcccctccgaaccgtacttacacctctcgatgtatacggctctccatttacttatcagtctaattttcctgcgtgtaacttcgtatgacaggctttgcacagagccattgtcttacgctttcttgctatcatgcgcttttcccacgtctttttaccttgtaaatcttttagttttttgacatggtgaatttcaagctctacgttttctgcgccacaccattcgcattgacacgcttttaaacgtgcagcaaagctggttctggtcgtgttgccgtatagcctggggataaggtctacctctccttttccgatattggttctgtctttacgaaatcctttatcgtagaaatatacagtttttacgcctgctttggtcttgtactgcactccaaagtttttacgtccgaacttctttcttaccccgctgacgtgaagctggtattttgcgctaaaggtcttgaacatgctctttttcataatgtaaccaaaggtattaagtatgcttacattgtttgccagacggtagtaattgtatagccctcggatttcggcattgtactgtgtcaggatttctatgtcatcatttcggataaggttcgccctgtgtaccgggtggtagatttctttgccattttcgccagttttaatcttgagagcaccatagtcggtcagttctttctgccacttttcatgtggtacaagaagcttgattttgctgttccttgcccgcacttttcttccgtttttgtccttgataaaaccaccgtccacatacgcacagatgtcgtagcccaaaaatcttgccttatcctgcgcattggttatcagtgtcttttcgtcagacaattccaaccggagtttttgagacagaaattccttgaagtccgctttgattgcttcagcgtcacttttactgcctatcacaccgcacagccaatcatctgcgtatctgacataaaccagtctccggtagccctcgtccattgggtctgtgcgggtatattgatacaactcgccatacagccctttcagatgaagttttgcgtttgctttttcttcgtcactgaactgttcccaattttccttggaatacctgtcgtgttttaatgtgccaattctgctcatgatttttctgtattcgctgtttccctcacggactttccccttattaaacttctctgtgtattcctccacatatctgtcaaattcattgagataaatattagaaagaattggactgatgactgaaccctgcggggttccgctgtatgtgttgtgaaatttccaatcttctaaataccctgctttgagaaacttccagattagccctaaaaagtattcgtccttaatacgcttccgtaggatacccaccattgtctgatggtcgatattgtcaaagaaacctttaatatctccctcgacaaaccatttaacgccggtaaagttcctttgaatgtgcagcagtgcggtatgacagctccgctttggtcgaaaaccgtgcgataagttgctgaaatttggttcataaatgctctctaaaatcattctggttacttcctgcaccagcttgtcatcaaaagacggaatgcccaaagggcgcattttcccattctttttcttgatatactgccgttttgcaggattgggctggtagctgtggtctttcaggctctcaatcagcctgttcacccgctccattcccataccgtcaatcgtctttccatctgttcctgctgtcatgttaccctcatttgcatagattttctgataggctaacagaaaaaactctgggttatagagattacggtatagacgctcgtactgatagctttggtttttcgcattcttacttagactgcttaatacatcattcggatttctcaatgcctcacgcacctttctttattttgtattaagatggtaaactgccgcccttcgccatgtacaaggctttcccttgcccggactactacggcggctccgttgccatgggtcatattcagtgtcatctttcttggatttctccttgaaatttgtccccttgcggcattacacatagctgttttgacagcgttgacctttaggcaatccccgtttagattgttaggaatagcacgttaaaccgtcggatatggcattcgtcctttatctgcttattgcagttggtcggtacaagtatcacggacagttacacatctggttgatgtaactcctgtaccgccgaacgcttcaactattctgcgttcgtgcaacgccctgtgcccctcggactaccattcaggcaatcaagcctttatcctcatatttaaccttttatcttgccgttacgtcgtagctacaatagtttcgctaacttacggctttaccgacatgctgcactccccatcgggtttcccctacggataagtcggttgataatacccctttgatacttggggaatcactttgctaacagtgaaattcactaacaacccgcgaacatggagtttgtgctactccatgcccttacgggcgcacccacaccggcgaaaaatgaacggactgaccataggtgctgtacttgtttttctgaaattcaaagctactggatagtccggtattcaggcgttttaggagcctccaataggtcgcataatgaaactcagggaagtaggcaaccacattttgaagtccggtgatttggctgctgggcgcgttggagcgtatctgtgccgacacgcttgcgttcagcccatatccgcttttcattagattccccgaggcggttgggttcttctcgtcctgtttggtctggaacgtggctgtcaggctactcgaatatggaatccactcatactcccaccacccatgatcgcaatagtatccgtcatcatcttcatccccgctatgccatacccaatgctcatgccaccagcaatcccactcaccccatgttaggctggtcgtattcggtgtgttcggttttgatggtatggaaaaaccatcatttcggtcattagcctgtggatcaggtggcgggttctcgtttagatcaacaatctgcgctgtaatattctttgtgctgacagaacagttaccctgaaccgtgattgtaatagtccccggctcctttggtgtccgccatttcacccatgcaagctggctgccgcctttcgggatataaatatccgtgtgcgaatacgtctttccattgatgatgaaacgtgcatatgccggtgaatccggtgtcttctgggagccggtggataaaaggacagaagtaatcacttctgtatcgcaacggtaagtgacatcgctttctttaggcggctccgggtctggtgcggagaaacggatgatgcccagccctagattgttgataatggtttcatcctcctgaacctgatcggtcgggccatcccatgccgggaaccctaagtcggcaatctccaaaaacatagccatcggaaggtttttatgcgtgacattaagcaggttatttttcagttcccccgacactttcttgttatataaggctgcctctgttgcggtcattgcgtacatgatgtcgtggtatctaacgtataccatcggctccagcaatagcttatatggcccgctgaccagttcctcataagggaatcctgttgcagcagcaatatcctgcatcgttccctctctgcaaaaatagctgcggacggccgcaatactggctggatggcttttcgagtttacaatgtatggtatggcctgttttggcctgaaacatttgtatttacccgtgtcgagtaccaattccatccctttgcagtaggttagtttactcgacttttcaaaatggaccgtaatatcactattccctccattggaaaaatcaaccggtgttgtcatcggagcattatcactgtcacggattaccgtaacccgtacaccgtcacgccccggcgaccaccagcttgcccctgttgcctcccccatgttcccaccgccgccgtcaagattcggatcagccgcatatgccgggattgcaatactcaatattatcaaaatactcagaaaaagagcgtatatttttttcatccacacctccaaaaaacaagagatacagccgaaatgactgtatctctcataatcatagttctgttttacatttcaccaatcggtttgccggttcctgcattgggagcctcgtgtacctcagaaccgccgcccttatcttctacccaaccaaaacccgggacataaatctttccgtcctgtttcgctccagcctgcggctgttccggttccggctggggtgtatgctctggctggcactgaccgcttgcgtctgggttctccaccggcacgctgctttccggcgcatccgtgggcggttccgtcggaggtgtcgcttccaccggcgattttggcttatccgcagagggctttgccttcacagctccgctcacagttcctgcggcagagttgctttccttctcctgccggaccgctgtctctgattcggcttctgtctccggttcagatgacggttccgattcagctgtggcctccggctggatttccggtactgtgacggtcggctccgtttcaagctggttctccgtcagcggcaccgacggctgggggttgcccaacgttcccatgtaccagaacagacctcccgcaaggcataccgcaacagcggaaaggagaataatagcgatgcgtttctttttgttatattcgtttttcatagtggacctcactttcattgattggatatgagcagttcagccctatttacccaaattcaattctttacttgactcaattataaggggaatctgcctgcgcgtccagacatttccgcgtttccttagaatccttagaatttgggcatataggctgcccgtgtacggacttccatacgaagcggcggcaccatgctccacccaaaggacaggggtacttcaatggtaatccgggcgtctgcttcaaagtttttactggtgtttcccggcgtcagaggcgcattaaggatttccacctccagcccggacagccgatattcatagccttccggctgccattttgtcagcgtgtcaccgcccatatccgctcccaaaaggacacccatacgggcaagcacatcgtcatagtcaaggttttcctgccagcggtcgccagacagcacatagccgccggagtacccctcccgcaaaccgttgtaggtttcatcatagttggtggtcgccaccgtgatgaccgatgacgtaagtccgtcacggactccctgcacaatgacagccagccggaaaaactccgccatggcgcacatcaggagcagaagccccaaaataagggcaaccgtcaggacggtggcttcgcctcttttctcccgcaggatttttctgattttcataggctccacctcacttgtaatagacttcggactttcccgttgctttggctgtgatcttaatagggaacgagccgaaaacgaaaaagccgatgtccacggtttcagtcagcgtcgcttcaatatcgccgtttaactgtacctttttcccactgtaataatcacaatcccagcggatagacgggtcaagaccggtttccgattttaaatcattgatacggctgtccacgttggtgccgcctactatttccgcctgacggacaatctcggtggcgaatatatcaagctgttgtttggcggtaaagaccggcaggaaactgacggccagggcaaccaccagcattaagcataaaagcccgattgccacatcaatatagccttcgccccgcttggattttagtatcttatgaaacataagccgccctccttagaatatccccgacatggtgccgaggatttgatagcccatcacgcccatgaacaaaagcagcatacaggcaaggagcataaaggaatatttgcggattttgggcggccgttccagtgccagcttttttaagcgttggagttccaactgcttcatatcgtgactgagcatacggaaaaacgccacgccgtcatccccgcgcaggacgccgatcagcccccgcaccacatcggacagcatggcgctggacactctagcctcgaaccgggtcagcgccccctcaaagttgccagttcgcatatccgccaccgtgatccctaattcatttttaagggcagcaccggcgtttcgctgataggtttccagcatggaaagcacatcacggcttgcctgaagctcctgtgtgatggtggccacgaaccggggcagttcatattcaatttcttcccgccttgccgtgatttttttgtccgccttggtgctttcattaaaatacaccgcaatgccgataatcataaaggccggggcaatgatgggaaccaccagcagacagggaatggcacagagaaacaccagcccggcttttaccatggcctccgctacatactgctcggcggtcacgggaatctccgccgatttcaaggtggcggtcagcctgcgccgtttgtaatcgtccatgggcaggatttttgccagctttgccgccagttccgtaatgatggcgtcggagtttttggcctgcttcttattctttttgaccgcgcccagcaccgccttggtcgccttataggtcggcaccttgaacaccgccgctaatatcagatacagccccagcgaaaagaacagggcaaacagtagcaaaatcatgttctgcaaattcaaagcacctcctactatctcttaaattcgatgggccgggtgtgcctggcaacggctgcgatggacacaaagaggaccgttccgctgactgccagcagcacctttccaaaaacggtgaacatgagcgttttataccactcggcgtttaagaagtacatcaagggaatactacccagcagcaatacgatcatggtgatatactcttttatcggctcaaatagcagcaagtccagctccgccgacaccccccgcatatcgctgagtttcgacacaataggcggcaggatggattttaagttgtaatcatcctgacacgccaccaccgcgtccacccattcatggaacacggcattgtcaatgcagggcttcatctgttccagcgcctctttgatattggaattgattagcttagcctgcagcaaaaagtttcggaacacctccgccacaggcggattcaaataaggctggttttcctcaatggcgcggatgatggtgttctttccccgcagatagctggtggtgatgatggaaagcgccgtttccagctccgtgttgatctgctttttgtgccgccctgccgtaaacttcacataatagaacgggagcagggcaaaacccaccgccagcaccggcaccagatagccgttcttcatggtaagcgcaatcatcacgcccaacacgaacaacagcatggacaggatacacagcgccgtgaaccgcccggtttttcccgtcacacgcagggtttccctggtttccatgaacagcagcttcaagcccctcggctgcttatttttccggcttctctcaatccgggttttcatcgaggggttcttcggctttacaaaagccgccagcccctccagaaaagaaaagggcgataacgagagcatgagaaagctgcccgttaccgccagtaaaaacgcaatcgttacaagtaatgtcaattcttttattcctccatttcctctaaatcttccataaagtcctcataccccttttcacgggtcacggtgtcggacacctcacgcagatgctccaccatgtcgcggtggctctccggcaggacttccccggcaatccccttcaacacgtcagaaaacgcgccgagaaaaccccagcagttgtccgtttcctcgccattctcatataaccggaacccatagcactggcctgataggtaataatcataagtttccacttcggacttcagcagtgcccttgccttttccacgctctcggcggagcagttcccatactcggtgcggatattctctgcggtggcgtaaatccagcccacctgaccggaatcccattcggcatgctgggcgcgtccgataaacgaggatgctgacatacgcaggccggaatggtcgtagaggttcagcggcaggataatgttcttctgtcccgcgatttccagcaattccgcattggacatggtttcaatcaggttgtcctttaccccacttttactggcttccagactaccctcaaaaaaatcgccatgataccactttttgaagtaattgtcatagctgctgatttcccaaccgccacgggagcggtcgaatttcaactctgtggtaggcgctttgccggagcgcacaaactcaaacagggcatactccgataccgtgcgccggaccaaatcctgcaaaaagtcgctgggatcggcaaagctgtgttcatcgcccagattgtagcggttgtgccagcacaccatacgcccaaaattgtcataatccgtgcgcggattcaatggctcattatcatacataatctgtaacagataaggctgtttcattgcgacaaggctcatttcaaaacacctcctctatgcactgaaaagccgctgctgcgccgtgtaggacattccattttcccgcaggcgtttgagcaggctttccgagggcggctccaccttttcatagtggccgataatcttcggcttgccgtccaccatgcggttgtccgtaatattgaaccggaacagggtgcgcatacgctgcttgctgccaccggagcttccggcgtccggcagatattcatactcggaaatctccatcaggcggcggctgttgtcctccagcttttttgcaaaggccacaatggggaacgctttggtcgccagccccatgagggtggcgtcatccatggaatagctctgcttgcacagcgtcaccatgcggtaataggtatcagcgcaggaattggcgtgaatagtggtgatgaccgcatggccggtattggctgcgttgatggcctgcatactctcggcgcctttcatctccgcgacggccacacaatccgggttgatggtcagcgtggtttccaacagcttcacaagggtaatgttctgcttgggatcgtcggaaaagcgggtgacaaggtgtaccacgttattcagcacatttccgccctcgtccgtcacagtcaggtcaaattcgcggcagccttgttccagcgtgacaatccgcttgttataggggacctgccctaaaatccatgacatgagggtggtcttgccgctggaagtcgccccggtgatgcacatggaaacaccgtgacaatagcaggccgccagcaagtccagcatttcagcggtcgccgtaccaaagcctacaaactgttccttggtcagcttgcggggattaacgatacggatggaagcggaaagtcctttatccttgtcaatcacgccgtcccccatgaccgtgatgcggattttgttggacagatgccccaccacgatggtctgtgcgctgtcaaaaatcatgccggacttgtggagcatacggcggattacatcaatggcgtgctggggtgaattgaaatgctccttactcggcagaatgtcgccgtttgagtaggtgatttttacatctttccattggttgatattgatttcctccacatcgtcccggtacaagtatttcgtcaggaacgaaaagccggtcatttcaccgtaaatcagttcacacagttcccccggttcggtgtcagccacgccgatccggttcgcttcaaggtatttctggatataggacttaatcagctcccggctctcgtccgggtcgtctttcaaggcggccgcatagtgttttgtgatatgctcctgcacttcctttaggacttcgggaaaaggccgcaggcggatttctccgcccagcaacccgatattatgaatgttgattgcttcctgcaatttcgggttcctcctttcggttgaggatgatttcatataactgtttgggacagaccggggccttgtcggttctcggcctgcccggttggttccagctccctcccttattggtatagcagtaggaaaaaccgcttgccaacaggcttttgccgtcctcgtcctctaaaatataggtgataagcctgtcatagcccaatgcctttgccgcacggcggcaggctccgtacagtttagaacaggcgttttgtgttccgtccgtacacagccgcagcacctccacggtagtacgctggttaatccatcgtgaccgcggccgccccacgatggcaacgccgcacagccgcccgtcctcatagcaggcaagggaaaagcggtgtccccgcacggccttgtggtggcggtgatattctgtcacataggcattggcatcggcaagctccatatgccggaccgtcagcattaaaactcgccccggtttctggcaaagggcagcttcaagccgccttttgccgcctgcaggggaacggctgaaccggcgcctttcttttttacgcctttttcctttacggcgggcgctgtctggagtccgaacagcgcagccacaatccggttaatctccgcactgtacggggcgctttcctgtgtctgaagcggcagaaacagcgcccgttcattgtcctgctgttccagttccgccacatagggcagcacataatccacgccgccgtactgcccggatgcggactcccaatcctgtccaaccttcagacacccgattgccgtctgatggcgttccttgtcaaaccggctgtccgccagcatgggcgtgtgggtctgataataagaaatgcctttgaggttcgccgttcccagccgtagaaccctgtccgcaatctcaatccccacaaaggatgcggggtcggcctcaaacacggcggcacagtccagaatgatgtagtcggccagataccgcagggaaacgaacagttccaccgccttatccctcgtgattttggggtacttcatcaggctctcgccgcccctgtaccccagcaggctgatatattcctgccccggcacggacacacaggcattcagaatatccgcctgcgtcagccctggtgcggtcagcagttctcccagtgacgtatcgtggaccgcgtccgggggcaaaagggtcggaaccaccggcgtaaaggggtcacagaacaccactatgacatttttcttctgttttgccagggccgccgccagcttgacggcagtggtggtcttgccgctgccggggctgcccatgacagctaaaattttatcctgttccatcgtgacctccctcccttattcctgtgcttcattttctgtgcctgtgtcggctgcttcaccgggagccggtgccggtgcgctgtctgtattctggctttcacccgaaacgccctcgctttcctctttttcttctgtttctacggagtacagctcctccagcaccttaccctgttcatcaaggaatttccgggcgttctcactgccgccacggtacacaagagcggcatgaagtttcccggtctgctccagctccgcaaggagccttgcctgttctggcgtggcaaggacggtgatggtagaggcaagttcggcgtcctcgccgtccgacctttcctcctgcacgttgttatccgtgccgctgctggctgtggtggcgatgatttcaacatattgcagttcggcgggaatcaaggtctgccttgcttcgcccacatcactggcaatcagcgaaacaatgtcgccccgttccagcttgccggacagccctgcggcaaaggatttgatggtgacggaaatcgcccgcttcgtaccgtccagctccgtcagatattcatttttaagctggggtgtgtcggacagcttgctctccagcacatagtcgcctttgtaaaggtctgtattggcgtacttgccaatcacatcctcggccttgtaaacgacgtttccgggaaggttatagccgcccacctccacggtggtgagcattttcggcgtgatttcatcgccctttttgatttccgtgctgacgcgcacaatctccaccttggatttcagggcgtcgttgaacatgggcgtcagtccaaagcagatgacaagcgccaccacaatgcagatcagccccaccacgatacggttttgcagtaatttcttcatttattttttcctccaaattcaaaatttaagttggcagcagcgccataaaacagccaaaggccagaaagggcgcaagtgggatgcttggtgtttcacgccggaaagcggcgttccataaaagccccataaacagcccccataccatcatccagacaccgcctgtcacaccgagggcaaagccgctggccgccatcagcttcacatcgccaccaccaattttgtccgttttcacggcggcaatcagaaatgggaggggaaccagcacaaagcccagcagggccggtaaggtttgtaaccccatcagccccgccatgacaatgaaaaggtgcaggaagtccggtatttcataagtagcggcgtcacaggcgcccgccataatcagcgcttgacacagcaggatggaacgcagcgccttcatggaaaacccatgcaggcataaaaagaccgccgccaccgccatggtgatatgggcggtaagcggcagttcctcccgtttcaggtaacggcgcagagccatgtcacagagccgccctgcaaacagtgcgaacagcagggcggcgataaacagattgatgtgatcaatccatagcatgaaaatcctccatttcctttagattttgaatggcttcccgtatgtccagcccgtcaatttcatcccccagacatacccagccatcatatggttcccttgcgaacaactccacacggggaacatctcccataagctgctcaatgcggcggtgcacctcgtccggctttttgctgtggcgctccaccggcgtgtctacaatacagtggacgcctttggattcgcgctttggatggcctttcgacgcaatcaggcacagttcagggttggctcttgtccagaagcccagcccccaaaaccatttatccgtctgttttctacaccgcttcacccagcagaagccgagtgtcttataagtaaatccccagcgccggattgcttctaagccttccaataagcagggaaacgtcacccacagaaacagaacacagtcctccgctgcaatccctgccacatcaagggcataaatgtcctctttccccatggtgtgataatgattttcggcgctccgtccctgtccttttttggaatagacctgatacgcccacggcgggtcggcataaatgacttgaaacctcatgcaccgcccccaatctctgccagctgcaggccgatttcatacaccacgttgacagtgacagcgttacccgcctgcttgtaaagctgggcatcgctgattccagccgcccttgcccggtcaaacaggaagtcctcgaaggcttgaagccgccagcactccctcggcgttaacctgcggatacggcaacacagcattacgcccatgctgccaccggtaagcagagtttgggagcattgtttgccaacacggccacggctcaccctgctgttgggataggcgagattgatgccgtcgccatggtgggccgtagtatagccttccgcttttgcctcccgtatgggaagtccctcatcataacagcagattaaaacaccatgctgattctgacaggtgagcgtaaagcagggttctcccgactctttgaatcttctgccgttctgccgcttattcagtcggccaggggtaatgacagccctcacacagtccgggtgtccctcacagataaaaacaccggaggtttcccctttgaaattgccgattccggaatactgccttgcccgcaggcagcgggcgctttccgtaaactgcggcttttttgacaggtcaatgaaggtggcgcagggcggtatctgctgttccaccgcatacagaccggttcgtccggcaaagccgacgccatttgccgtcagggtaatggacgtgccggatgggtcgtaaacccgtttgccctgctttccgtctatgagtcttttaacaggcgcagggtttgctcggccgagaggaaatatttctccggcacgtccgtttctaagatgtccaacaaggtacaccctttcccggtgctggggaactccgaactctttggaattaacaacacaccattctgtgtcataccctgcctcccatagttcaaagagaacggtggtaaaagctgtgcctttttcgcttgacacaagatgtttaacattctcaacgataaggtatcggggtttatcttggggagccgtgcctttgagcagaccaacaactgtaaaaaaaagtccacttctctctccatgaagtcctgccattcggccgctgatactaatgtcggtacaaggaaacccaaaagtccagatttcagcttttggaatttctcctgctctgatttgcttaatgtcctttgcgtaccattctccgttacacgtttttccgtcacagtcttctctcacctccgggctgcacattttacaggaattagggccggagtccaccccataggggcaggcttccagcccatacattgccatatagcttttatttgcgtatttatcaatttcgacatgaccaatacaggtatgtccgcttctttcgagacctctacggaatccgccgattcctgcaaacaggtcaagaaatttcaaataattatgctcctttcttcatcccccactcgtcaatcatgcgataggggaaaatctgctggctgcgccagaaccggaccatattgccgatctggtcaaccacgctttggttgttctggtctttggtacacatcatcaccgaaccaaaaatgccggacagaaccgctacaacggtcagcgccacattcccggcaatcagccacaacagggcggcaatcgcacccccgaacagggaaccgatggtgctctgcaaaagctcccgtttcccgaatccgttaaaaagttcattctccgcctttaccccggttgggatgtaaagattgatttcgttcatttccgcctcctatgccccgtaatagtagaacacaatttctttgatctgccagatacattctgccatcacatagaacatcaccgtgttctttgcccgtttcttatactgcgcctgttcttcctcggcaccttgaagccgcaccatgcagtagataaaacggaacacggcgcccgcccggatcaggacgatgacggccatggaaatatcgtcaagcgtaatcatgccgccacctccttacttcatcagattttttgccatgccgaccagccggacagaatggtaaatattgttgaccatacctccccctccgcctgtagggaccataaactcgctcaggaaccttggcgttttgatagcgagaaccagacaggcaatcccccaaaagacattgaggttaattcctacattcatcatcatgccgacccccagtttgcaaaggctgatttgcaccattaccgccaccgtagactgaaaaaacttggtcagataggtcttgaatacgcccttgtcattatccaaaagaccggtgcaggcaaggggcaggccaatccgcaggatcataatctccacgccccgcataaggaactggaaataaagaataaagtagcagatgacaaacaccagtccgaagatggcagtcacaagccctgccgaggacaggccgtttacccacgcctgccagtcataattggttgacgcgccgattgccgtgataagctggtttgtcagtttctccgtaatgtccgccagccagccgtacatgaccggaaagcagaccgccacggcgattgcctgcacaaaccggataataagctggatcggctcactgtccgggtcgccgtccgtccacatcacgtaacactcaaacccttttttgagaaatttcaggataatcagcgacacaccgaaccccagcaggatttcaaacagcacgtccaccatgctacccccgccagccgccgtcatgtactggtcggcgtggagtgtcatgggaacaaggtcggcaagcatactgtcgataaaagtcaccgcgccgtttaacaccgccactatcaacagcacaaggataatttccaaacaatcacctccctgcccggtggaaaatgactttcccaccgggcgttatctttcttcaatccctatgcctgcggttcgtcagccgcaggctgtgctgcttccgtttcctgtgctgcctgttcaaaagcttcaaggacggtatccttgatctgccggtgcagttccggtgttatgggaaagcagatgtccttatattcgccgcttttcagttggcggctgggcatgaacaccgacagccctttttcacagtctgccacacgcactccggtaatcagaaagctaccatcaaggcagacagtggcaatagctttcagccttcccttatctgcgaactgcgccgtgatttttgctgtaatcttcatatcgtgtcctccaaaaagatagggccgccccatacgggacggccacgccggtcattaacccttgtagtcaaaaaggtctttgatacgctgggtcagggtggggaggatcgtgtccttaaagagcatatacaaacctgccagcaacaaagctcccaccaccacagaaatcaagatcttgacagcttttctgaaccttggatgtacacgattgaaaaagtctccggttaggtagtgccagaagtttggttggtaaattaattttgtcatttcatttccctcgctttccaattttgtatatataaaaaacacgactgaatttttaggttcaatcgtgtttttcatttcaattctgtaatattttatgttcgcatcctaatgcccaattggcacatctatgtgatcgatagccacacattccccattctttataatataacattcaacataatgtggaccataaaattgtgatgtttcgtgcttatgtttatgatgttttttctcaatctgtcctcttatttgatttcttttttcagcctcttctccaatatttcttactttccaccacaccttgtaatctccaggtacattagtatcaacaacattgaaatctattgaaaatccatgtggtaaaaatctattaaactgtggatatgattcaaaaaatctcccaatcaattgatttgaaattccatttgcactcacagtacattccactttcacataatattgctcgttgatattatccacttcatcttctatatattcttccgtatcactgaatgataaggatttctgaacacttgcgacagaacagctttcacttacagtactatccgtattccaataatcgtgattgaaaaaatcatgccatgcattcattgcatcttcttctgtacaatcatcactaaatagtccttctaacttatctatttctgattttagtctcgatttccagttattcatttttgtcctgtgcttgtccgttagcagtaatggtaatgtttcatctgttgggttacatacttcaatgtcgctttcaagtctgctcactatttctttcatagtatagtaaaaaatttcatctaatcgatcatgtgaggtatcaatcttctcatcgcataatactgactgtaataagccgcccggcatattaacccatgtatctcttgatttacaaaacattttagacaaacgaacggcttttcttaaacattgtcctttatcctttatttctttagaaaaccaatcattaattgctgctggatttctttgtgtccaagaactccccgcatgctcataagtgtattctgtactcccttcctccttaaatcttcgataaattgcaaaatctatatgatatccatcagaatatttaatccgtacacaatttgtcattgtttccggctccgtattaaactgcttacactttttctttaaagcattggccacgatatatcttgcagccagtgcacctttatctgcccctaaattatccctttcaaatactatggccacatcaatatcataatcattactgtcattttgaactaccgtatgcattgccatacttccttgtactctagtttcagcaattttataatctgtcttattttcttcgttatattcctttagaccagatttcaatctattaatatttatattctttttccttcttaaatcattttgcttgtcatttgataaaacaactttttgagcataaaattcattgaatttctttgataaatcgtacattctttacctctctagcttctaactaattttcctttttcattatctgagaaattttctgttacaattattccaaaaggatatttaggtgtttcagaattaacataatgataagatattatttgcggtattctgtttccatttaatgcaatcattttaccaatttctaatgatatacaacttggtattgatgctaataaatgtatttttttcactttacaatatttaacttttatctcttctaagcaatcaatgatttttattttataatcattaagttgctctcttgattttattagattgtcttctggattatccacgtaaagttttataacgtccgtgtctctaaactgattcatatcatgttcttgtactgttctagtaatagaaatcgatactacgatattctctgattctaatctttcattttctggatattctttttttaattcagggtaatgcctttttgccttttttgctaattcataatatttattttcacttcttctatattcgaaatatctttcaactttgctgttagccaaatatgtacctgctaatatagtatatggtatcggtgccatccctgtataacaactcttaaaatctctacttctctccacgaatttcagacattctttttcgattttttttgttattatttcatttgtactctcggtaatcccacttttaaaaatatcaacgaagtcaacagtaatttccttcaatttaaaatctgacaattttaaatccgtgatatttttcttttcacttatctcaaactgcgaataaataccaaacatatttagtacaaatattctatctcttatatttttttcatatataaatccaaaaacaattagcaagccaccgcaaacaattgataccccatttaccccatttgatgtgattacatcagtccctaaagcgaaccctaataaattaaccaaactatcaattatacttgggaacgctgtaactataagggttatacctgttgctatcattgctcctgatgtactgctttccgactttgaattaattatatttattaaaaattcagttattaatacaactataatgatagctgtcactacaacaatattgtaattcaccaaatccctccatttcaatctttgaaattaaatccttacattatactacttttattgtcacaatcatcatactatgacctagctttacttcgtatttcctccaccagccgctgtaccatacaggctggccacatctccgatggcttttccttcccatcattcacacacttcttacagcaccgctccgctatctgaattgcctttttctcatccccatactgcatcaacttgcggtaaatatccttatccttcttaagatagttttgccctgtaaccttctcaaatttatccgcaaaccggtcacagcatgtataggattctcgtatagctggcatctcaccaaaataggcatacatccaaatttcaaagcaaggattggaccaaccagcaccaacaccacttttctctgccgcctgaataatgttgtcaaaatcctttacctgatccctgtcaaagacaatccatggaatacggtactgtggctccttatttgcaagttccaacgcccgttccaccagttctaccgtcttggctttttccacttttattaccaaacgatccttcagctctgctggaatactatcccgcaaaccctcaaaataattcttctccgtctcctctgtatctgtcacaatcaggtaataacccaactccggtactcttactcccacacgctggttccggtctcttctttttccggccctgcggtcgctaggctttcctccgcttttattcgccatccgcagccctccctgtaagcatcttcatcggtttcaatgctggaatggcaccataatttcctgtaagataattctttgccaaagcctcgtctctgcgtactttattaccgtcctcgtctttaaactcagctagtgaatacaattctgatactccgtccctgtttttatttaccatccatatttcgtccctgcgaagcagttcattggaaaactgccatatatcatgggtagtaaaaacaagctgggcattttgcgtgttgatctccggagataaaaaggtcagtataatattccggacaagcaatggatgcaacctggcattcaattcatctacaaataatgttccaccgttatccagaacatctttcaatgatgggtaaagagcaaacattttcagtgtaccgctggattcctgtttcagcggtatcgaggccatttcctgactgcccacctttctatggagagcatcaatcgtatagctcttgctcgtatccttctcatcttctggcggtaactcttccacttcaaaatcttgtattgcctcatcaaaggatgcaaaatactttaccacgttctcctgcacttccttactatctataaatccatctggaaggactctggagcggaagaaattttctgccggatcaccgaaatcaataatatcattgtttaggaaccaatccctcactttcttcagttttgcaacacgcagctttgctcccagggagacaataagagcctccttattcaatgatgccttaatattctccacatggctcttggaaaacccattcatttccagctcttcgccttttttgcggtaaaatacggttctataattatttcttgctgtcttggctttggaatatagccattcctccactacctcatctgcttttagagaaaatccatattgatatatcttcccggtattttcagaattgtctacataaaaaacctcaaatgtagtctcttcattacagctgttatcatcaaatagaaacggagttactttcatataatccgcttcctttttccggcggttttcatcctcatctccaaatttaaacgattctgccacataataagtcatatagtcaaacgcatcatacacatttgacttaccgcttgcattagcgccgtaaatcgcagctaccttgagtagcttgtcatttgcgatatctacaacgtgatcctcatgttctgttattttagtcgctgacaaatccaacgacacctcatcacgaaatgatttgaaattcttaaagttaaattgtatcagcatattaatctcctcattctgctctctataaacccttactattatagtatataatattttggataaaaatcaacatctaatttcacaaaaatataaaattagatgttgatttttatccaaaatattattttttctcttgcataagaaggaataacctcccacgcagtaactcacactccctttccaattcctccttctctgcgcgaagctcctgtatctttctatccttttcagctacaatatccgccaatttctctttctttgtaatcttctttggctcctgcgtctttatcccggaatatccataatccacaagcagttccctgatatgttctttagaaaatacagaccgtgaaagccctgtgaactccaccaatgctgtaatcgtcacgcttcttccctccgccttcaactcctcaatcgctctcaaaaccttattgattgactgctgacgcataagctcctgtttctcagttaattgcttgggcagtcctttattccttcccatccccgtaccctctttccaatttttccacaacggccttaaatcctgcagctatcgccgtaaaattatctgccagctgtctgtcattcctgaatttctccgctttagattcccagtcaaccgcctgctccttgaaatatgccagttgctccatttccggcacaaaatccctacaactgatgcattcccaaacaccgctcctgcaatgagtgacatcagcacatactccccccggtaccctgtgggcgcggatatttttaagcaatcttgactctgtaacggaatccatgttcagaatccttcctccaaacagcacaaatggattctctgcctctgtctgatacttcattggttctacaattgtctccgggaacaggtttagatgagcatacgatgcataaagcattgccgtgccatggtgtgccgtcatctccgcaatctgcggcagagtaaatccggccttgagccggtctgtaaccccattatgacggaactggtgcgaagttaccacatactctgctcccttttcatcccgcacatcatatctcctgcaaatctcttttaactgataggatatatacggccatgatgccacactgtatctgttttctgaataccaaacgccattttgcagaatctgtgaccggtatgcaaacagcgcccctttcttctcttctggcagataacattggtacgacattgccattatctgttgttcctgaattagagcaatcagatgtcctcccatttccttattctcgatgtgaatagtacgcatgattggttctttatacccgccattttgtttccacataggaataaagagacagtaatgtccatcaaaaggcttgagacattcaatcttcatacccagaatctccgatatcctggatggaataagccgcagcagccagtaaatacagcgcattgtcacaggaatatcctcttccataaatacccggtcaagctgcttcgctgcatactccggtatatatttctgatctacaagccgctttgactgatagggattattgtaaaaaggattaggcagtttcgttttttcaaaatcactcatccgattaagaaaaatacccacagctgaccagatactgcttctgctactttcactgtagtcctttctgtccaaatattctttaaaccgggacgcggttgtcacctgaatttctgatagtgaaatatctgccataaaccgaagaaagatggcgatattccccacgtttccacaaactgtacccacgcctttcccctccactaatcggatcagtgcaaagtatttcaccatctctctatgctgctctggaaccattgaaaaataaatcgtgaccttgctcagaagctgggattgatttttaagccgcttctcacagatccacctgtcactgtcaaaaaaaatgttatcagataagctgtccaaaaaatcccgataccttctttcttcacacttcctgtaatactccatatactcctgttttggtatcgcactcatagacagtcacccccgcttttctctatcatctcaacggtattcctgtaaacagccagcaactgcttttcctgccggtactctatatattcttcataatccgcaatttccgcccgttgatagcccttaatcatttcctgcactcgtgcttcctggtcctgcaacaactccctccaaaatggcaaatattttattcctgtacacagatgtggacagttagcacagtggacagaacggctgcggattttacatgctccatcgcacagtttccttgtacagaaaccgaattctatccggcgctttcccaaacgaaaatctacatataagagtcgcctctcttcttccgagaacgtggtaagctgttccttggataacaacaggtgaaactgctctttaaaaaacttggtattcatttctgccagcttggctgatttaacttcggcataatactgcatgactgtgctctggttcaaatgcccaagctgatagacaagttccattgtggtggcaccgttctcaatcatgttcaccactagcgttttgcggcactgtctgctggtaaaattccaaagctcgccgctgtcatcacaaatatcatatttatgaatcagcttgtttattttcataatgaaatactccacattcagcattgcaaccttatagcctttcttctgatgcagaaaaatatacgaaagagtatgttctctgcgaagttcctcactggcagtaatctgctttttgattttctctgctaactccgccgagatataaacactatgatactcgccgattccgttgcggcgtctggcctttagcgtcttgtaaggaatatattttagtttcaccgccccatcataacgagcggtttcaagacagtcttcctctaaaaatgccacctctttggcccgcatcccggtttcggagaatatctggaataccagcctgtccgtctcatccagttcctccagccggtcagaaagttcttctattaccttgtccggaatgtatggtgtattcttatggtatttcttagcgttgacaaaatgcaggctctcaaacggattactatgaggtttgggaagtttactgtcattttcgtccgaacaaagataatggtacaaagttcggcaggcagagaacatggtcatgatttttgattgatccatctcctgctccaaggataactgcagcttttttacgtctatatgatcgatatcagaaaaataccgtatgcggtcatccatttcacaaatccggttcactgcatcaaaaatggagagatggcttctgtcactggcgcgtatatggcctgaaaacctcatctttaggaaacactttatctcttttcggaatgacggctgatttaccttacgaaaatccacagtcagcagtttcagaccggttccatgtctttgatataaaatccacacatccttatgcagcgacatttctttcctattttccttaataaatcgtgtcctctggatttctgtttcttcctctgtaatctgcttcagcagcttcagaaagtccggttctgcacctgcaaaccctgtccggctgtcatttcccagaataaagttattcattttcgtaaggctgattaattcccgcctttgcgtataactgccggcaatatcttttaaataagcaagcgtctggtctggtatctgcatcagatacctggatacccttacatcacccacccggtttgacacttctgaaagagaagaaccacttttcataaaatatctaatgactgaaatccaatactctgcaaaagcctcttcattcatctggcaaaaatcccctccatttgcctgatctaaaatatatcggaaatcataatgaatttttatcgcttcatttttcagcatctttgcaaacacgtactcatagccaatgtatttggatttcagacacttttctccatcagcccactcccgtgcaaactgcattgcatagtaagaaaagcattgtagaaacgcttccctgcatgttagtccgattgcaacgaaagcaatccctccaaagacagtaaacgcctcgcaaagtccaatattgtcctgctcgtaaatcctactttccaaaacactccggtaatcctcaattttcttcctcattaccggttccggatactccttccgatacggaaggcgcacctcggttccctcgatgtcccagacagcagaagcggtaattctctgtgcgattttaatcattaccgccaccatcctttttaccatggcgtttgtatacggcgttggccataatctcgctgttatggttcatatacggctgaatagaatcaatctgcgaccagccaaacaaagctttgatttgaatgtctgatttttcctgctccggatgcaatgcgttatgctccaatacctccatcaccttcgtgctcctgccgctatgggttctgacacctactgctgaaatgccacaacgttctgcacagtttttaaggattttgcgatagttatgataagtgagcggctgtcccgccgatttcccacgtaaagtaaggaataaccagtcactgatgataccgccctcattttcagcagacggccgttccacaaaaagataatcgttcagtgcctttgccgtctcttcccctatccgaacagttcgaagtttgttctcatacccactgaccgcagattgtctcctcttggagcgtgaaggctgtatcagccgttccacttcccggtaatcaccaagccgtatactcagcacctcatcaatccgaaagccctccagcgtcagccggaacaccgcctcatcccgcagcgtatgaaaaccgctgcaaaggagcgctttctcttcatctgtataccatttaatatattctctgcttccttttacatcgggcagcatccggttaatcaggtatttatactggtaagtgtagatctgtccatacagataggactgtggccggcatctgcgctctccttcgtaaaacaccatctcactgccgtaagtctggtcaagccatcggtaaaagtctgttatggcggttacatagccggatagcgtgctgtaacagagactttcctgtggacccaatattcttagattttccttatctccgtaaatcaaatgatccacaaactccagaacctgtttgttagttgccgcctcataattcgtatgttgcttctcatgcaaaaagttaaagtatacgcacagcttgtaggcgtaactttttcctgtgccaagtttattgatgcttttcatctcaatgtactgatttggcgccaacatggggagaaatcggtctgtcagcatatagcggcagacctcatctcctgctgtggtttcaaatagaaaccgttttacctgaaatcgtttttccatggttaatccttcccgcgtctctggcacaggctaactataccatgaatccattctatttacttcctctatccggcataattgaacatttcctgaatacgtcttgttaattcaggtaacacaacgtctccgaataaagcgtataatccggccagcagtaaagcgccgagcaccaccgatatcaatatgataatcgccgtgtcaatgtagccttcccctctgttgtctgccaggataccgcttgtccttgcatacagcttcatggcctttatctttatggaattcatcttctctttcataggattttacctctttccttatagtttatatcgtgtacatgaaacaggaagtaaaccagagtctccacctaaaccatttcccctggcaatcccttatgtttaaagggattaaccactatctatatcgtatacatttatatagtgttgctgtagttaagaaaataaggcggtgtccacgaatccttcaccactgcggcttgttaaagtgtccttgattttttccttagcctgtacccccatgatatagccgcgcactgccagattgttgaccttctccgttgccttgttcatcatgtttttcatagtgtttgatctccttctttgtttgtttttttaattggatatagaaaaaccgcagggttttcctgcggattctcacgggttacttatatcggcttactggtaatagctgatgatgatattgagggtggcgctgcccagcaccgcgccgatgcaggacacaatggcaaccacgatacggttgttccattttttctgatccatctcatcagccgcgcttctgcggatgcagaaatagataatcagcagaccggccaccacgggtgccagcaccataagccatgtggtggcgtcctggatcagcttttccgtgcctttggcaatctggctgtcctgaatccctcctccggacgcataggccgttatactgttcgccagcaggaaaagagcggccgccccggttgtggctgccgctctccatttactttttacctttctaatcgtcatcctcactcttgtctgagcctccttttttgtatccttttaatgatgaaaacatagcgcctgcctgtgaagcgaacgcctgcgacttctgctgtgcttctttgagctgcaagtccttagtgtaatacacccagatattccacagcgggatttccccggtctttttggaaaggacaggccgggccacctccctgctctcccgcaccttccggttgtgctccgggtcgcccagcccgcacatccggttaaaataccactgtgacaggtcgggcgcatacatcatggctgggtgggcgcggctgattacaatctgattggggcgggagatccgccgtatttcatccgtggtcaaaagctcccgcgccacaaggctgacgctgtgggagctgctggggttgacgtaccgcccatgctggctggatagctgataggctgaggtggtgtacttgcccagcttgtcacatacgtcctgcaaggtttccttatcgtccgcctgcaaatacacccatgtctgacagttggatttgacgatggccgctgtttctttatcgtatttctgggtgagctgctcaaaggattgcaggaacagattgaatctgcacccgcgcccgcctgccacagtcagtttgtttgtaaaatcattcagcttggtaaaatttccgaactcatccagaacaaaattcaccctgcgctccagccgcccgccgcgcatatccgactggcgcaccagcagttcatagagctgtgacaccatcaggctggcgattggatagtaggtggttttctcgtccggcaggatcaggaacagcgcctgtttttttcgcccgatgtcagcgatattgtaatcgcttttgtgggtgattgagtagacggagcgggaaataaacagccgcagggtggtcagggcggaggtgtcaaagctaccctttgtccgactgggcgccacctccgcaatcgacatcagcgcccgcgccggatggctgttggggagcttcttcatgtattcgctcatgggtgattttcctcccacagatttgctcatctccgcaataaaccagtagacgttggtgaggttctggtactccggccgcttggtattgtctaccaccacgcagaggattgccgccgctatggtggatttctctccattctcccaaatcttctcgttggacgtgttatcgcccacaagaatgttggtgatgtcccaggcatacatctcggcacgttccatgtccttttcctttaccgcgtcaatgaccggttgaagcaggttgtaacgcgtgcttttctccgggttcttaaaatcaagacagataacttcgtaccccagcttttttaagaataccgatgtgtagtcaaatagttccgcctttggatcgctgaccacaagactttccccagatagtgcaagggaacagatggactgtaccacaagacaccgtgtttttcctgaacgggtcgcgccgatggtcaaggtgtgggtgtcgtccccgatgcagtacagtttttccttatgtccatgcttctccatgcccaccacgattccgccgcttggaaatagctgaacggggtcagactctccgcttctgctctccgggaccatttctgccgtttcttcctcctgcggcttcaaatcaggagccgtaacatcataagccaccgtttcaaaattctcgtcctccttttctctgctttgtttttcatatatagaaacaggcggaaggacggcggctttgtccggctctgtcttttcagagccttgccgcagttcctcccgcccggtttctgcttgcgggtgttcttttttcttcataaagggcagatcgtcataccctgtgttcagaagcatttgaatgaccggattgtcggggtcgattacctgtgttttgaacgtcctgtccttttcatcctcccgcagccagcgtgaggaaccgtgctggaactgcccaacgggagccggggtgcagatgtccccggccaccttgattaaatcactctgataaggccggtcattctgcacccaaaagaggacacagcacagccagataaatccctcaaaggacagaaacatgagtagctgccgctgctgcgtgaaaagccctgaaatacactggaacagagggataagggtcaacctatcatactggcgggataaaagcccatgaagcgcggccgtaaaaaacaggttgaagattgtgccaaagccaatgatgactccgcttaaaatcagcttttctattttcttcatcggcacagttcctcgtctgccgccgtttctgcctgcaatgctactttttcaaccaatgcaggatagagagtggccagccattccagtgtttccggctttgggatgccccaaacgtcgccacggccaactaccatataatcatcgtccaccggatgccgcagatgtatggtatcactatgcacaaagtcaggacggcagccgggaccatgggtgcagagccatagctggttgatgggcgtccggtacttcccggctaaattttcatgccgtaagagtaccattttcccctcgtagttttctttcgcaccgtcaggggtacagtccatccgggaaagcagatggttttcatctgcgctgattggataatacagcggaaccgttggttccctcataaaaaaggtcgggatgccatgctcctccgcaaatgcaatttctccacgcataccctcgctgatatgctctcccatcacccataattcctcggaatgggtcagcagctccagtccaagttttaagccctgttccctctgttccggaatcgcatcgttgcaccactggctgaaaataatatgcggggccagggcaagcacaccgctttccgccgccagcctgcaatatttcaccgcattgcggatgttggtatcgtagtccccacgaaggggacttgcgatatagacctgtttcaaaaaatcacctccgtcatgtggctgtatcgctcatcgccatcgttcgctatcatcatacttgaatgccctgaattatccctgcgtgtaccgtcatcctcgtactcaaaaatccgcagattgttaatgtccccgcttgcaaggttgagtacgccaatggagtccagtttgctgtaatatccccatatgctgcaatcaccacataaagcgcagtcctccttcgtggccgtacccttcggaatgtttacaggctctgtctcgtcaacaatggctggcaagggttctgcagcagtaacttccggttctgtccccgtcgcacaaccagtcagacaaagaatcatggcaagcaacacagcatatccctgcttcaaggctccactccatagtccacctgctcgccgtattcttcctccgctgtgatggcaggcgacacttcctgttcctccatatccttgacctgctccaactgtactgccagaaacaggctatccggagcgttgacttccggtatccggtattcctccggcatacacgcattatactcgaccgtgtatccctcaaaccggtttttcaaggtggcatacagactgtcctccgacacaatcagcgcctccgtctcgtcaaagacatttttcagttcattcagcggaattgcgctggcggtcatatcataaaacaaatattccccctgcttctgcccaaattcagtagctatgggggacatgaaattatccgctaccgcttcatgcacggcaaatttcatttcatggtcatcctgcgtgaagtagatgccgttgcggatatgaagccgatccacgacaccgccctgtggcgtttccatgggaggattacactccccgaaataatccgtcagattcagtctgccatttcgtttaatttcctccatctgctccatcacggcggtttccacccgtttgcaggccgccatcttgcgctgaagcacttcaaacatagggatgtccttggtgttttcatcatagtaaagccagtcgccgtcctgctcggccattcttaccgccttagcggatagagtcttttctgctgtttcttttcttgccatgatgccggtatgctcaatcccgtccgcgtcccgtgcaataatcatgtaaatgttgagggcgatttccgtacaggtgttgatggttccccatatggattcgccttgtggtggttggttcatttattcacactccttttggggttaagtttaatttgctatcacttacctgctaagtgacagtatataaagtcaaaaaactaccatacaatatatctaaaccaatcaagtgaaagatatattttatggctactaataaaaaggatgaagtcttttacaaaaccggggcactggcaaccgccgaacaccgctccttaaccaactatattgaataggtgctgttaaagcacatcaatgaggtggaacaggaacagggcgtaatcaagcctgatcccgaaaaaggcaatgattcacggctccgcatcctgtctgcggagccgttttcttttacgttccgtctgttctaattatactttgctctatattatagtgcaatagctttactataaataatttatgctttttattgaagaaggtacaataatatggttaggaggtttgctatgccgaataatcatattgcttttgaaaacaaggattattatattgaaatcgggctgaatatttcattttaccgaaagcgggagggaatgacgcaggaagcgttagctgagaaatccggtgtcagccgttcccatttaagcgcgattgaagccccaaacatcatccgtccgttctcaatggaaattttgttcaatattgcaagagctttaaatgtggaaccctacaagctgctccaattcagagagtaaaggcttcgttgctgacagcggggccttttatcgttccagcacgttttcaatctggctgaacagcttggtaaaatcaaatgcccgctctttcttgcaaagctccggtacaatatcctcgatccggtcaatcagggccgccaccgagtttaagtcctccgcgtcaaggtcattgtcaaccgtacgcattttgacaagaccagcgtggaggattttcaattctgtttcagaaaacagcttcttttcatccacaaggccgctgcgcagggcaaaattctcaaaggcggcctccttgttataaaaatactgccgctggatggcgacgttcccatgctcggcgtccttgcggtaggtggacagcacatagtcaaagatgggatggtgcttacacgccagcaccaccccgttttgctcattgatttttaccacaccgccctgttccttggcggcaagtgaatcgtcaaagggcttgtcagagcagatgccgcagccgatagcagttgtcctcgcaaggctctggagccggtcaatcagcttctcgtccacctctacaaacgggtttttgatgatggcgtcctgcttgccataaaaggcgatgggcttatcccggtaatagagattggccacatagtccggtgaggacggcggacgtatggaaaatccctttttctcgatggcttcaaaaaacgccttataaaattcagtcttacttttcatgggtcatacccctttctggttcattctgaaaacagtggagtggggacaactcctgctcggagggaagataatattccatctttgccatcagggaattgatccggttttcgtcagtggtatccagttcattatccagacagacagccctggtacagcaggataccagcagccgcagttcctcatgggagaactgcggtgggctttgcagtgtcaagccgctgcgctccatgaagctttcctgtgcagccacagggtcataaaaatactgtccccggtaaaagcgccgggtgttatgcttgggaacggctttctggcaggtcacaaattcatagccgaacagctccgtcctgcggcagagcagaaccacggtggcgctctcgaacactttataataggcgccgccggtcaggttgaccgtttccatgcgttccatgttggggaagggcggctcactgtggcagtcctgcgccctgcgtgtttcttccgccgcctgtgtcatcgcccgtgcgttatcgcggtcataggtttcatagatgatctccccatcccgtgtcaccacgcagagcaggggattcccggcgtaaacctcggcggcaaggtcgccgtccggcagcggctccacccggaaccctgcctgccgcagccgggtaaagaagtgctctaaaaattcctgtcttgttttcaactcatttcctccgtcttatcattttttgatagaaatgccatacacagtctggcggccggctacccatggtacagctcggtacacttacagggaactgatacggacagcccttgcagggatggccttcgggatactcgtaaaatgcggcgctgccatggttggcgacaccgcacccgtcataatatcttttttgttgtatatccacggttctcctttccggcatggaaaagcccggccggaaagcggctgggtcaatgctcgtagcctttatcttgattttggagatacaattctttttttgcgtccttagaaagattgccgccagcattcagacgcccgtcctcaagctgctggttattggcgtccgtcaggccggagagcatggagagtgtttccaacagcatggtttccatataagacaggcggagttccttccggtactcggcggaccgcccttcactatccagccggttcagcgtttttaccatgcctaaaatccgattggcaataatcttatccgcttctgcatcaaatctggttttcattgaagcaatatagtccttgctgccgccatagagcagggtcatttttagcttactctgcacataagcctctttctgctcacgcaatgcggggacgttcttcaaaaggaaacgaaccagcgcatccacctgttttttcacatcaggcggtaaaagctgataagcaatccgaccatgtcccgacagggccgccttgattttggacacccggttagcgatggcgtccagtaccttatctccaaaatcgaaggtgtctgaaaactcgtcctcagcgtcgtattcctcccgcaaccgtttatattttcttgcttcaagctggcggatactgcgttcaaactcgtccaccagcccatcagtgagccgccggatttcagcggcggcaaaattcttttcctgtccgaatgcccggattttatcggcaaaggtgtctttaatcatctgcctgcggattgcattaggcacagcaggcggcgtaaaagggtttttgattttggtagcctccggggaagtatcccaaaacaccacatggatatgggggtggttcttctccttgtgcagcgcacacgcccatcgcagattttccacctgtattccgttctttttcgcaatcgtcaggatatggttgtcaatgtagcgccgccatgccgactgattggtcagcagcagttcttcggcgatggcctcgtcaaaggaaaccacactgcgatacatggtgatgtgcttcttggaattttggtagaccagacgtgcgatgtcccgccagtcctcaaacgaggtgacggctccgggcgccagctttccaaacaggccgtggttcatgccctcgttctttgccacccttggacgggtggcgatataacggatatgggcatagttcttgcttgctgtgcttttataattaggattcttgaaacgctgcttgtaaactatactggagataggccgtcacctcccgtcagcgttcccaatcgtcctctggtgcgccgtattcctcgtcctccgccgccttacacgtacgggcgtaattttccattgtcatgcggtaacggtcggcttcctcaatcagatacctcacgccggtagccgtgctgggctgcgtggtgcaatacggctggcagaaatgaaatctgtccatcaccgtatcttttttggggcagagcatatccataaattcctcatacccaaacgggcagttcctgcggatttcctgacacgccacattcaggccggtcagcgtatcgtcctgcgccagcttggacagcaccggttcgcccaccggctccgccgccgcaagctgcaccttaatgttttccgtgccgcccaccgtcagtttagaagcctctgacgtaatgccgatacttgccagatgattacgcaaatcatacaggctgcacggcagtgtcacaatcagcttactgccgtttctggcattatttttaatcactccggttatcataagttcctcctttcaatgctccatatcctcggtatcgtcctgcccagacagcttttccgcccacatctggtcaatctgccggtggacacgctgcgtccgctggtagggggaatcgtccagcagcatttcaggctccccattttcggctgcctgtatctgcacctgaacctcgccggacgcaatgaaaatggcattgcacgcctgctccatatagggatagcccagtctggaaatatcaaagggcgttactttgcatttgcccgtccacgaaaacaggttgtgggcaaggtcgataatctgccgggaagtttcatcaaagcctttagtcaagcgtttgattttcgcaaattcaatgccgtccactgtcacacatttccgggcggtttcaaaaagctccggttcttgggacagcagataaaaagccgcatgataggaacagtccagaggtctgttgcccgtcaatgcggccagctccatatatcgttttgtctgcgacaagtttacacctacctttccaattcttctggccgctccatgctgttatctcctgcctgccgcagctgttcctttaactcctgcgttgcttccctgcccgtagccatgcttaaacagtgttcttccctgtcataatagtacacttcgtcggaaagccgctcctccggcgatacattcgtctggtttactgacattaccattgcctgaagttccttggcatccatttccccggtatccagtatcaaaatactttcatgaatactgctggggagaataaagaaatttgcgccagccccctgcgccagatgttccataacctccgggtataacaggactgttgctccgcccacgctcgtggagttggaaaggacatactgttcatacggctccatctggaagtttttaatatcttccccgatacaattatcccaaaacatattttttacaaattcaagcatactgctgattttcgccgggtttgcctccatggtattgtgcagggcaagcggatataattcctccatggatttgttccagtacgaatacagtgcatcggacaccagaatcgtagcctccccatattcctgcgtcggcaaatgtatccgcagaaccgctgtcaagtctgtgttctcaaaatctctgtgtggtgtatgctgcagcttttcgctgttaaattccttattgataagctgtacccgtaaaaactcctgcactttatcaaaatcagtcacgaatccttttacatcagatagttcaaagtctttattctgtgcataactggaaatcaattcggcggcaatctcctcaatcgcttttcccttttggcactgtacaaaaaaggaatccagataaatctgtggagatactgcttcccccggcgtatgtatcacaagagccatgaactctgtattattgtttttcgtaactttctggatatacacgtctgcattgatgttctgttccgacagactttccttaaccattttttgtatctgcattaaaaatttactgtattcaatatcgtttgccataagcgcctcctacaatttatccgcaaaggaacggagatggtccgtgtcctgcaaaaagctgttaatctggaaatcctttctctgcatatagtccacgcccagcgtgacggcctcattcaacatctggtcaaactcgtcctgtgtaccatcatgggctacattcatcaatacctttatcaataagaaaaatgcagcggcgtccatcttaccggacttcatcagcatttttgccagccggtttgtctgctgctccaccaccgccttgatatccccgatgtggtagacggcggtaaattcctgccggatgatgctggcgataaaatcaatatcttcggtatagccgtccactgtcaatcccttttttatgaacctccgtatttgttcgttgcgggagatatgctcccggtcagccagcttgtcaatctggccgcacatttcttttgtcagatagaccgatgtgatgattcggtcggccttttttgacattagcgccctcctttcggcgttagtcgaaaattaacaacgcaagttgctgtttaacaagggtacaggctttgcctgtacggtgtttccgtgggttgtttaacaaccctattcctgccttaactccaaaatccaagattttggcataaagtaacccccaccgcaagcggtgagggctgttggtcgctccgctcccaaaagggcgaaaacaaaagtctgcctgtgccacatcaataatgttccaggaaggccgtggcataccggcacatacgctttccatgggcgactgccaaaaccaccgcaacaagtccgacgataatcccgccgcaaatcaaaactgctttcatataagtcctcctggctgtaccccattctccgcttcttcactggcctgcaacatcgcccggaacgtagttaagtccttattgaagtccttggtcctcggggtctggataaagcatagatagcctagttttgtaaatttctctgcggaaatctccgcctgcgcctgtccgtggttgtgaggcgtgccatccgccagcttgccatctatatcgttatcgtagcagaatacgatctccgtgacttccggatggagtttcaaataacgggcaagggccttatccgacaggcatccctccgatacccggtgatcctcccgccagtcaattccgtttagcttacagagcgtggcgtggctcatggcgtcgatgggagcttcaaattcatacacacggttggaacgcccctccatgataaagccgtaggttttatccgagttttctacatcctgccggaaatggctgtccgcgcttggagcacgtagggcgcagtaccggggttttccgccctcatcatagccaacaaaagcacagttatgaaagctgtatccgcctttttctgtcctcgccccatatacccgcccctgttccatcatggcatagacgatttccttttcaatgccacgggtacgggtcaggtaggcaattgtacggtcaaagctcctgtcccttggcggcagcaccagctcgccgcgcggtttcttctccacgggtggaatgtaatgctctgtctgctcataggcacggcagttcaggatcatctctgccgcgctcttgaagtcgcttgcccccatgtactcctgcacaaagtccacaatgttgcctttagaaccctctttcgagaaacagatatacccccgcccgtgcttgaataagtacaaaccgccgctgtgttttacatggacggtattcctgtcgcccttttcgatttcaaatccgtgccggacggcaaaatcaatcaggttcgtgttataaatctgctgcatctgttcctcggtaaagggcatggtccgtgattgcgtccgcattttctcacctccacaacgcaaaaacaccgcccggaagtgataaaaaccacttccgggcggcgctgtattttattgacaatcaatctttttttccgaatgtttccttcagggcagacagtgtatccacatcctccagatccgtctccgaaagagggggataacccttttcctcacgcagcttatttccttcctccagcagtgtggaacgcacgaaagcgtcaaaccgttccatcagttcctcatctgtctctttccgcttttcatcagccatatctgcaatcctccttattttttcagcgctccatttcctctccgctgtatgccacattctccgtcacatccgcagaccggtcatctaccgggtaagacccccggcgttcctccatcacccgcgccagccgctccacgcgcccaagcaggccggcacaaagggcgtccgtgcgggccgcgtcgataaagagggagccttttatcagttcccgcagttcctcgtcaatccccgccagcgctgtaatgtcaaaccagtcaaaagaggtcaccagcttgatctgctcatcatgggtagtcttaaacggcttgctggacgcctttgcgcctgcattgatcatcgtccatggcttgtcgaaccagagggaggtgccgctgtcgtaaatcggcgcacagcctaaccactctaatgtgcaggcattgcggacagcaccaaagttgtttaagtgcctgtcctcgttggcaatcaggtagtccaataccagcatacggtcaaggctgtccttcacaccggggatgccaaacgcctcacagcagtttaagtaatgctggtatacagagacgtggttgggttttggctgcgtctgcatgatatgccacgccgtcaccagttctgtatccggcgtaatgaagtcctcgcaaacgctgtacggataatcctcctgcacggtcagcgtgtatgggacatgggggatatgcagccgctccatgatcctgcttgccagcacctcattatacggctcctgctgggtcgcaccgcttcctcctttgagcaggcagcgtttcccgtcgaggatcgcccatttcttcttcagccagccgtccgaagtattatccggcgacatcaggctgaccgcttcgccgttagacgggtgaccaaacaggatattgcccacatcctcggaaaacggattttcaaaaaagttgacttcatgccacgaaacctgcctatcggcggggcagatccaatactgatccgacagggaaagccccaggcatttctccaacaacacctgcggggaactgatgtgcagttcctccaatgcatggcgcaggccggcacggcttgcagggattgcccgcccccgccaccattcattgagcgcggcgcggtcaatcttcccttttttaacagggatgcccaccggaacatgagccgggttaattatctcctgaacagcggaaacagaggtcgtttcgctgtccagacggatttccgccacggggatttccctgtgcatcagaatatatgtctgcattgtttccaccattttctcatctccaatctattgttattattctaccaaatcgcaggaacttaaacaagcggttttacattgcttttcatccgtgctccagttccccctcatcttctggcgcggcttctgtgccttggaaatggtatttggggtcataggggataaattcgtgttccctaaaatgttccagcacctcccgcatctccggtggaagactgctcttatccacatggatgtcatcggtcagcgtggcggtatagccgtaatcataagctccataggtttcccggaggaacttacgcacatcatccggcatttcctgctcagactggctgatacagccataacgaatcaggaagtctgtggcacagtgttcgccggaggactgcaaatccaattccagcagggcaatacacagctcgccggtatccttggactgcaccacgccggggagcaacacatagccgcctgccgtatcacggtcaaagatttccgtaccatacaccacctgaacaccttggtgcagtgcgttcagcacagacttgacataagccttttcttttgtggcatagtctgcctgaagccgcacgtggtcaatttttgtcatcacagtgaggttgatgtaatccacgtaaaagttcataggttcgtacctggcgtccggttcttcagaaatgggtttctctggtttaaggctatctccttgttcctgtggcggcaggatatgaaagtcatccacggtcgtgactagggtaagggagcgcccattatcccagcgcatatggagctgcccttaatcgtcaacgaattttaccgtcccacaaaggccgtccggcatatcacgctcgccctccatatggtcaagctgaatccgtgtgccaacggggtatttctttttgatttgctccacctgataaggctttaagaatccctcatagttcctcctgttcctcatggtcatattccacgcatggttcacactccacacgttccgactgccccatcgacagctctgccttgcggataatgctgtccagcaaaccggcgctgtcccggccggcttcctttcctgactggatagcaaggcggcagatcaatgcgctttcctccggtgtaaatagcgggacgcagtcctgcttaagatactgcaaaagctgattttcctgcccggttatgccaaataaaccgtcatgaaacaaatgctgctgaaagttttcctggccggcgatcagttccttcgtactgtcctgatgcagggcaaaacactccagtccatgctttaccgctttttcagcgtccagtgggccaatgcgccgcacgtcaccgacagtataaccataatcgtggagccgttcctgctccatgcgatttaagtaagtatcaatctccatcggttcggctgcctcccaaatcagtccgtgtgctgagagaaccgcacgagcaagttcctgctgattttccaccagatatttcacacgctccaccgtcccgtaccgctggctgatggactgccagtttttctgatactcctgataagaaaaggtgcggacatcattcggactcttgaataccacctccacataggcagggtcaagggaatgggtgcagagatagtcaaggtgcttctggtagtccatttccacaatatcaccaatgattttcctgtcatcgccctccacgcgtttcaggccgatccaataggcctttacattttcactgccgcagccgccgtaaaacatccaggtattggctgtacttgtgttacggatataaacgtcccgttctgggaaacaccatgttccgcctttccgggtcaaccagaagaatccacggtatcctccgcgatcctcagcggcctcccgcagcttttctacatcgtactgaaaatctgtctgaaagaaatctgtgttatgctccatgattttttgcagggtggcaatcacgtccacatctgcaaaggcggcattggaacgaagtgcataaccctgcgcttttaaagtctcacgaagctctgaaatgatttcctcccgtgatccccggacagaacttccattgtagcggttcctgtccgcaaaaccctcgcccatatccacggtgacgatccgtagcccgtcctgatggggaagagcgaaatggatcttgttttccatctgcccgtcatcaaggggcagctcctcaaaaatctgccgcaaatcgccggatatatcctcctgcacctgccgtatttcctgaatcttctcacggggcagggttaaattccatagctcataatcattgtgattacgcttgaaaagggcattaatctggctgtattccaagtccgtcctcctgttccggctgttctctgacaaaaatcaggtcgggaatattatcctccaccttttccatgacagcctgcaattttctcccgtcctcgtagatgatctcatcatcgtttcgccctcggaacacgcaggcgtcatggagtgccaccagttcatccttggtaaaaagctgcttcttatcaatcagtcctgcacggaccgcaaaatcaagttttgcgccctcatagttggtttcgtagtaattcccccgatgaacccctatacggtcataatcgtactgccacgttgtaaaacggacttcattatccttacccattcttgcagcaagcacggtgtcaccaaattcggaaatcagccggtagccgtcctctttgtggattcctctaagcacaaacggccttgcatcggcataaaggtcgtgggcctgcttcatatccagcaaaagtgcgttgagctgctttcgctccacaaccaggggattgtccgggaagtaacgcatacccccatacaattcaaattggcacacctccgtctgtccctgataggcaatcagacacagctttttatcactgtttgcaaaagcggttcttatctcaaagccgagcgccgccgccctttttgtaaaggcggcggccagctccggggatatatcatgcttcatagagctccctcctatctctcatattcctgttcttcctcctgttcgtaggtcttcactgtgtccggctcaaaaccttgatttttaattctggtgaaccactcgctcataaactgccccaccccttttacctgttcaggagaagcggtctctgtttcataaaaaatccccatttcatcctgaaggaacgaagtggggtgaatggatttgtttttcttatcaatgataaaggtaatttcagggtcgcgcatggcatcgccgtctttcctgtaatagtgggcaatgctgtactcaccgccaccaatggcctcgagtgtcaaatcctcatagccttctgatttcagcttcatatagtaagcactgccttccagtatggggagggcaaacaccgccagtttctggtagagccgttgttccagcgtgagcggacttcttggtgtcacaggtgtgcctgctgtgtttactgtttcctcttcgctgccatcctccgccatcacatcatcgccgtcgtccttaaattccagcgcaaggtcaagggataccttccgctgttgcagttccgccagccgtttctcatccgcaaaaggtttctcgctctctgctttagatgccgcaaactgttgattcaggctttccagattaatctcctcgtcttttttatgctcggcaatacgctgtgccagattttcgatacgtgtgatgtttcccagttctgaatcccccatatccgtctgatacgtacatttcccgcaaagctgaatattcacaccgccagcccaatcgcgcagtagccgaaccttaaacccggcataagcgccaatatcaagggtatcaccgctttcccgtcccagtttacgggacctcaccatgaaatgctctgccgccttggtacgttccccatggatttttccatcaatgaccatctgaaattcttccagccgctctttttcataggtggaaaggtctgcggccataccctctattttacgggtcgttttcgctattgcatccggataacgcttggtaatattgaaccgtaaatcattctgctgtacctgccacgccgatttcagcacggtcagacggttaatttcattatccacctccattttttccttcacccttgggtcagaagttgcaagcgccttaaactcagcatactgcaaaaccgtttcgtctaaatcctcacaggttctaagggcggaacggccggtcatgatctggctgatataccgttgtttctgttctaaaatctgccagaggtaggcatcaaaggtattttccgtgatgtaattcaagatagagatttcctcattctcgttgccctgccgcaagatacggccatcgcgctggattaagtcggagggccgccacggtacatcaagatggtggagtgcaaccagcttattttgaacattcatgccggttcccatcttttcggtgctgcccatcaggatacggatttcccccttccttaccttttcaaacagctgttcccgctgggcgtctgttttggcgtcatggattaacgcaatctcctccggtttcacgccctgtgcaatcagcgccgccttcatcgcttcatagaaattaaagctgccgtcatatttaggagtgccttggtcacagaagataagctgtgtcagccgctcctctgctgtctcatggtaaatctgcgccacattccgggcgcagacattgagcttggtattcgggtcatccggcagggtggggtctaacgcccgtgggtcaatggagagcaggcgggcctcatgggtcagcttcaggaaattatccacactgctgtccactgtaccggctcggatattctccgcccgttccgccagttccatgacaatccgtttctgctccggggtgcaggccgtctttacaacctgagtacctcctgtcttcagttttggcgtgggcaagtccagcatatccgccgtcttgatgtctgcaatcatggcaaacatattcatcagttccggcaggttatgaaattgggagaagcggtttttcatctgatagccgttgccctccggtttaatttccaatgaggaaaccaccttgccataggttcccgcccactcatcaaacataagcaggtcacggcgctccagttcctgcggctgcaaagttttttgcagtacatacagctccgccatcgaattgctcactggcgtaccggtcagatatactacgcccttgccgccgctgatttcattgatgtactggcatttctggtgcatatccatcgcccgctggctgcttgccccgctgacaccggccacgttccgcattttcgtataggagaaattgttcttataggcatgggcctcatctacaataagggcgtccacgcccaattcctcaaagttgatcacatcatctttcttgtctgcgttaaacaggcggtcatagcggaactggaggttcttgcggaatatctgcatctgtttcagggaccagtccttgtcgctctttgccttctgttcactgatggcttcggtcacggcatcaatctccgcctgcatggctgcaagctgccgttctctggacaggccaatcagttcaaaactggaatgtgccataatgatagcgtcatagtccccggcggcaatccgcccggcaaaacgacggcggttcttcctctcaaaatcccttttttccgccaccaaaatattggcattggggtacaactccatgtaggcatctgcccactgtcctaccaagtggttggggacggcgaacagcggcttatgtacttttcccagccgcttcagttcataggccagggcgatggctgcgtaggtcttgccagcccctacctcatgggccatcagcaggttgccctccccataaagtccatgggcgattacatcccgctggtggggccgcagatggacatcctctgacatgtccgggaaaacaaggtcggaaccgtcatacacacgggggcggatattgttgaatttatcattgtaaagtttcgtcagccgcgccccacgctccgggtcggcaaacagccatcgttcaaactcccctttgatctgcgcctgtttttcacgggcaaggatggtttcctttttattgaggacatatttgactttatcctcaccattctcgtccacatagtccatccgatcctttacctccacaaaacggaggttcaaggacgcttccagtatctcataggcgttcatgcgcccggtgccgtaggtctggttggccgttacggaggacttttctgcacttttgcctgaaataaagtaggcaccactgaacttggaaaactccagctccacagcgtaacgcccattccggttatatccagcggtcttaaaagtttcatacatgaaatcctgatacacgtccagcggtatccacggtgttcccagggaaaagctgatgtcctgcggggtcagcggttccggctgcacggtgcgtagagcctccacattgcgggtaaaccgttccggttcttcctctgcccgcaggatggctgtcgtcagcttatccttgacatagccgcttagatattcccctgcggtctgccagccggagagcgggttcccgctgtattcgtcagggtcttggtaaatagcgtcccccagctccgctatgatttcctccggctctgccttcctgccgtcaggcatctggtacagccacgacatataggaaaggtcaaccctgccttttacattgagcgaaacctttaaggcttcttctgcggaaaataccaccttggatatgaccttgggtctgatggtcgccttgtagaacatcgcggacttttcaaacacgcctttttctgttttgctctcccactcaatggagcgcaggagcggggcgttagcgtcccgtgaaaaggcaatcacgttgccataagaattgaggtagccgtatttttttacaaaacggtcgtaaaccttattcagatggtcgatatgcccttgcagcttctgttcatactccaccgtgggcaagtccccggactgctggttctgaaaatcgataagcgtgcggacagcggcggtgatccccaccatgccacggatacgctccgcctttttgcctgtaatatcctgcaagtacatacgggaattttcctgaaaataaatggcgtcattctgtatggcatagctgaaattgcggaccgcagggtcagcggggagggagtcctttaatacgcccttttcctcggcatactccgatgtggcctcgtgatactcgccctccagataggaaacagcccgttccagccgctcattcagatcgtcaccctcgattgggtggcaggcggtggttttttcattgccaaacatgctctcgtcaaacaccatcttgcccagcaccatttccgggtggttgataaaataggtgttcagagggataccatcctcattttcctcaatggaaatccatgggctgttgtcctcgtccggcacgatttcccgttcccgcttttgcaggaacaataagtccgtggtagcctctgttccagccacctgcttgaacgcgttgttcgggagccggatggcgcccagcagctccgccctctgtgccaaataccggcgcaccttggagtttgccttatccatggtgtacttggaagtgatgaccgccacaattccacccggccgcacctgatccagtgattttgccagaaagtaatcatggatacggaagttatggcggttatagcggggatcgtccacccggatcgagttaaaggggatattgccgatgaccgcatcgaaaaagtggtcgggatagctcgtctgctcgaaccccttgacctgaatttctgcttctggatagagctgccttgctatctccccggataccgtatccagctccacgccgtacagcttggagttttccatgctctccggcagcacagaataaaagttgcctgttcccatggcagggtctaggatgttcccgccccggaaaccaaaccgctccagcgcacgatagacatgtccgatgacactctgctcggtataataggcggtaagggtgctttcctgcgctgacagtaattcttcctctgtgagcaggctcttaatttcctcatattcactttcccagccggattttcccggcgtcagagcatttgcaagaccgccccagcccacgaaacgggcaagggtaatctgttcctctgcggttgccatgcgtccctgcgtctgcaattctttcagcagacggatggcggcgatgttatttttacatttggtctttgcacctccgtcatagagatggtgttcttcggaatagtggtaattcaacccccgccctgaaacacggctgtcaaagtccttcataaccgcgtcggcatacccatcattcgcttggttcacttgcagggcagcttttagtgcctctttggtttccccggagttgtcgccgctttgaacggctcccaccaccatctccgcaatttctccctcggaatagctgtttttcagcagtttgctgtctgcgatttccgaaagcggcacacgctccctgattttaaacccggcaaggttctgaagctgggaaatctcgccgatttccacggtgcgcccatcatgcaggaaccgcaggatttcatatagctggcctcgatagtagatgcggtcgccctctttaaatgggagctgctccggctcggtggtgttcttatcaaacagattgtcattgtcgccgccgtctgtgtcctcataggtatctgttttaggtgcaatatcaaacagtgtgatctggcggatttctggctctgcctgaacggacggcaggctgtcctccaataattcctcctccgtaagatgctgttcttccagcgcttctaattcttctttttcttcttcagtcagatagacatcctgccgcactaactccacaatatgacgttccacctctgcccatgaaagctgctggcggaaatgctgttcccctgtgcggtattctatcatgataccatttgttggagtggcctctaagtgccgtccttggcttgaaatactataccagccatactcctgcttgataaaggcctgccggtctttcttcgactgcatggccagaacagcacggtaaattctctgtttgccaccacttacaccggagccgagcctcaaaaaatccgctatgatctgctctccgtctaacggttccggctgtccgcccatatcctccagttccttcccggcaccgttcatctcatcggcttcatccggaatggcgtaatcgtccagcatactgtcctcggcactaaacggataaataccttgcaggatcaggcggtcgatccggtcagccagttcccgatatgaaaaggagaacctctgcccctctatctcaaaagcaaggccgtcatccatagcagtgatatgtaggtaatcgccggttttggttgtgtaatccgtatccagcttgccataaaaggatctgaacacatttgcctttgtagactttttatgcccgcccccgaaaaaatcgcagatttctttcagccattcccgtgtatcaagcgtcacatcatcagcgcaaagcaccacatccacgaggtcggagatttcttcctcgtcaagcacaggcatggcgggaggggacatttgcctttcatatcggataatatcctgctctgtcagccattcgggtttttcaggcacagcatcgtataactcccgcatcttggaaatctgtgctgtcacactccctgcccacaaatccttttcgcttctttgccctgctcctaaaaaatattcacagtcagagcgcaggcggcttaacagccggtactgggtagcaagatcctgttctgctgccggtgtggtctgctccggtgtcgtggctgtcactgtaccgctgttttcttttgcaggcgatgcggctggaatcgcggctggtattgtctctcctgaaatttctgccgttttaggcgggacagaaaaaaagccgcccacagacggtttcataccatctgcgggcggcactatgtgttccttattcgattgtcttacctgaccttcatcaccagttcgtccaggacgatctcctccgcctgctttgtcaggctgttcatatggccggctctctccatcgtatcctcggtgtccggcatcggctgtttcagcaagaactgctgtatcaaccgttccttccgctgctccgcttcttcgtccaccttcaggatcacttctttgactttgccctgcgccaccagttccgacaggcggtgtgggtgcttctccatcatatactctttccaaagtttcccgtacctgcccaccggcatcctgtccgtctgtgggttctctgaaatctgaagttcggggtacatcattccgttctcgccctgcctgtaactgaagttcattaacggttctgttctcatagattcggctcctttcgattttaatcgcttctatttcctgctggatttcttttaaaataggacgcgcaagggaaactgtacagctccccagcgccatgaacatccccaatgtgctataccggatgatattctcaaagctgttttcctcaaatgattccgttgccacgccacatttggaaaaaaccgagtatgccacactgttgatgacaagttcctgaaattctgctttgactgcctcctccggcataccgtaaagaggactgttctcttcccgcaccttgaaattttccatataacccggaagtatctgcgctacccgcttacttaccagttgatacaggcaggcttcaatgctggaggtcggcgcagcgtatttttcatggaaccgtaacatcaggctggggcggtactgctcttccagctcccaatgatagcgcataaagttccaaaaactctgctctgtcccattagtgtccatgaagtcataaagatatttcaggctggcagacggattgctcatatcaatgacggcaatgctcttagctcccttattcagcctgcgcccgattcgttcatcgtgccagtcatcccatgtgccgagctgcgtggcatccggtttctgtgcgtaaatcagcacagcattgtcaaaggaacgcttataaaaccgtgccacacaggacaacaaacctttccattcagtcggggattttgtgtactcctgtaccgcctttttgtagaggtcggcaaggatggtcgctttactcaagctgtcacctccatttcctgttctgattttcaaagtaaacggttaatgccctatcaatggttccatcctacctttcaaaatcctcattttcggtttccggttcaaacttcatatttgaattttggttaaatctgttctgaaagctgtcattcgcttctaggattatttctaaatcctctggattccagtcatagcaaggttttggtattgcttcattgaataaaccatgcccttcgctacaactccagtctggaataggtgctgttttctcattgaaatctccatatgttttagggtatactatctcaggcggttctttatcacccaattgcatcggaaccaatactggcagtaattcccttatgaaatcttgatcataacaacggtcaatatatcctatccttgttgtcaacaaaggatacatatgcaaagtaactattgatatgtccgtatattgtgcgtatgtagcaataaacgaagcaatattttctacatccgctttaatacaacatgcatatccatctactattgccgctaataatttttgattcatattttttcgatttaacctcctgcacaaaatggtctttagcaccgtttcaaaccgtcccttccatttcctgttcccagttttcaaaataaaaggcaagtgccctgtcaatgatttcctctatttctttggttgtctgctgtgtggtaaaatacttggagattaccgttggtttaattttaaaaggctggggcttgtcgctcttgggtttccttgttttctcgccggaaagtatctgtacgatagctgtgtcggttagtttgctggtttcgtagtagctgcggagtagtcccgcctttttcatatccaccttgtagctgtcggactccatcaggtcggcaatctgttgctgctttgccgtgtcctccacaaaagagaggtcataggcggcaaggaaagcaatttctccggtgtcaacccgttccatcaggtctgaaaccagccctgcaaggcgaatatatttcgccaccttatccctggataaaccatattcctgcccgattttatcccggcttttcaacctgtgctgaacttcagcagaagtctgattttctttgatttcatgcgggtttaagagggtttcaatctctgccaaaaggtcgtttctcttgccctgcgatttcagtgcatcgtaatgttccgcaaggcagtatgccctctccgaatggctcatgtccgtaaaggaacgctggcgcagattggtttctgttacaatcagccttgcttcatgaaacgtcagattttctttgatgatgacagggcctttggttagtccggcaagttgtcctgcatttttacggttatgaccgctgagaataatatttttcccatcctcagtgtgccagacaattaacgggagcagaacaccaaactgtttgatactgtccaccatgtcagtaagacgctgcccctcgtacagcttaaacctgtgatttggaaaagactccatctggtcaaagtccatctccatcataccgcccatctgcggtacaggaactccctccgctgccggggacttcgattcctgctcaaaattgagcatttcatcaaaatcggataaattgattttcggtttagccaactgcacacacctccatttcctctgagtcttcgattgctaaaaactcgtccgcaaacctcccataggcaaccgccgcaggattctccggcagaaactcacaaattgtcttatggtacagcaccgcctccgccaccttaatggaacgggggatatgggtcttaaaaatcggtactttcccggcaaaacccatttccaataatttattgacctgtgccgacaggattgtgttgggagaatccatggtaatcagtatgccagcgatccgcaggcgatggttactgttctttcggattgcctgataatgcttcatcagttccgtaagtccctgcgtggaaagaagctccgcctgtgtcggcacaatgatactgtctgcgcacatcatcacgttaatcatgggcgtacccatctgcggcatacagtcgatgataatatactggtatctgtccttaatggtgtcaacataccgggaaagcatacgttcccggaaatctacgttacacaggttcctctccagtgtaaatagctggctattggaggggataacatccacaccgcacttggttttcagtatgtagctatctggctccggcagcggttcatcttcaatcagcctgcgaagcaaggtattgattgtcacctctaatttgttagtatttttcacaccgaagataatactggaatgtccctgaccgtcaaagtcgattagagcagtcttgtatcctcgttttgacaagaggtaagccagcgtggtcgccgtggctgatttgccgactccacctttctcgttcataactgcgataatttttgccatcagcgtttcctttcttggataaagtatttggggtattgggtaaatagggtaaaaaaataggacttaatcggtaaaaccctcaaatcaaggttttctgattaagtcctattttatcgcatccatacttgaacacatagtcataccggccctggcggtcctcattctcggctgcggttaggagcctgccgtcatcatcgtatgtgaaggctcgtttcgtttctatgatctggaagttatagataccgtccttgtcatgcttgttgatatgcttgttgccgtgcgggaacaggtcatcgtgccagctctcatgcttcccgtcatgcttgtcatcccaggcatacgcatagaggctttcggctgcgtcctccgccacgatgaacccgcggtcatcataggtgtaatcataccggctgactatccattcacactcatcgcaccggttgaccatggatacaatctggtccctggcattgtaggtgttgtaggtattcaccccgttggggcggtggatttccgtcacacggttgatggcatcatatacataggtggtggcctcaccggagccggcggtcaccttggtaatccgtccaagcccgtcatattcataactgctgtcaccgcttcggtccatcatggagacacgccggcccaggacatcataaccgtacaccacgccttcgtttacggcgttgccctccccgtcctcataggctttctccaccaggctgttgaggacatcgtaatcataggataccctgttcccgccattgcttatgcaggaggtcaggcgccccccgatgtcatatcccatcctctcagtccgcccggacgggtcatggatgctggtcatgttgccttccaggtcgtaggtgtaggcagtggtgcgcttcatggtatccgtcatggaggtcacattccccatcacatcataggtgtaggaagtggtcagctcactcggcatggtcacacgcaccaggttatccaggatatcatagctgaaccgggtcaccaggccattggcggccttcacactcagggtattcccatgcggatcgtaggtgtatgcttctgtaagccccatgcggtccgtcacactggtgacacggcttcccgggtcataggcggccatgattgtctcctccagcgggttcttaaatcccacctgacggttgtccttgtcatacgtgtattcatagacgtatccctttcgttccgtttgtcaaggacatagtgcggattttttcaaaaaagattttacgggggtatgagcgcgttatgcgcccatatcccgtttaatcagccgtttaatcttgtcgctcatgttttcggtactggtggtgctgaaatggaatgacactctataggccgttctcccgatcttcttcacaagcgccggtctgtcctccggcgcgggcgctgctgtggtgttctgggtcattttctcattgctcataaggtcatatactcctttcccggacagcccgccggtggcggcggggtaattgtccaaacaatcaggttttcggttcaattttgggttacaatcccctttgccgccgctttcgtggcttactcctgttcctcccggaaattcctgccggaaaagaggacgggcgcacaccattccagtatgcggtcatagattctggcgtgggccagatcgggcgggttcttgatttcttccagcttcaggttggttgtgataatcatgggcttgcggctgcggtagcggccatcaatgaccgtaaacatctgctccatcgcgtactcggtgttacgctccacgcccagatcgtcgataaccagcaggtcatacattcccagactggcgataaaatccaccctgtcctcggagaatatacctgtcagccggtccaggatagtggggaagttcgtcataagcaccggaatatcccggtcaagcagcgcattggcgatacaaccggcgaaaaaggatttcccggttcccacatccccaaacagtagcaggccggtgttgtcccggtaggcttcatcccaatgctccacataggcgcgggctttcttcatcagcggatttttcccgttgtcgttggcaaaggtgtaatcgtacagatagcggtcttgaagtccctgcgccctccggcgcttgatactctccatgcggttccgctgttcctccgcctccttgcgctggcgttctgcttcggcctgacaggggcagatacagcggggcatgaaatagccggatttcccaaaacagggaaaagcggtctgccggttgccgccgcatttcttacagtggataagcccgtcagccgggtctatgtattcatccccggcaagggtcggatcggcggcagctttgtcaatgatggcgcggatttctgtggtaatctcaatcatacggtttcgtcctcctttacgctgtaatcccggttccgggtgggcggcgctgctttctttctgtcctcggcagcccagcgccgaatggtggcggcatggttctgatactgcttgccggtagatgccatatactcggatagccggtcaatataggtctgccacaagtccgggagttcctcttgcagttccgacaggtctttgtcagacaaaatcacattttggtaacgtccataggagcgggcggtctgtcccttttctaactctctatctctttctctatctctggtggatgaatgtcggacaaatgtccgcccatttgtccaccacgttttttctgcgcctgcaacgccattctcgcctgcttttttcgttctccctcggtagaggactgtccgatcaggagttctatattgctcatataataggctccattcgccataacctccacaagccccaactgcaaatagattttcagggcgcgctctacggttcccacctgttgccgggtgagggtggcaatcatctggggcgtgtacgggatgttctcgtcaagctggagcttgccgccatgtttcagcgatttcagatacagcttgagcaggatatacgaatacagaatcccgtcctgcatactttccagcaggacaatggaatcatcatcaaaatagttttctttcagtttcaggtaataatattttcgattgtctgacataggtttgctcctttgggtctgtaatgggggcctgtccgcattttaagggccgttttcagttccttatccagcggcagcaccgccgcccggaaccaccggcacagcagggagtaggaaatgctctggacacagacacattcctccccatcgtccagcgcaaggcagttgccgcaatcgtaattacagcactcatgcaccagtcgccgcgccctgcggtactgccggtagtccatgacggggattttgtcacgctgcccggttgccatagcgcacatggcagcggcacacgggcggctgctcttttgcaaaaaccggctccggttgctctgcgcctgctggcgcgggcggcataggcggcaccgggatttgaatggttatcgtaatcatcaaaattgctttctgcattgagtcctccttaaaaatttgtaaatttcatggctgttgagttgattttgcattgcaattcgcatataatataagtgcaatgaaatgcgaaaggggttgatactatggcaagcacgacaaatttcagcgtccgcatggacagcgacatcaaaaaacagtgcgaaacgctttatggcgagttaggcatgaacctgacaaccgcaatcaatgtgttcctgcgtcagtctttacgtgtcggcggttttccctttgaagtccggctggaacagcctaacaaggaaaccattgccgccatgctggaagcagaacgtatcgcgcgtgatcccagcgtgaagcactactccgatgtagaagaagcactccgggagctgaaacgatgaaccgtgatattgtttggacgacacagttcaaaaaagactacaagctggcattgaagcggcacctcaatattgatttactggatgatattatccgggcattatcgaggggcgaaacattgccagagaaaaacaaagaccatgcgctgtccggcgattggataggacaccgggaatgtcacattcagccggactggctgctggtttaccgcattgaggacgatgtgctggtactgacactggcccgcaccggaacacacagcgatttgttcggaaaatgaaagcacaggccgccgtatggagaatttttctgtacggcggttttgctatgctcatagctcgtgatcctcctttttcctgctctggtcgggctgctccttttccagcttctcggcgactttccgcaagctctccacggccttgatttcctcccgcatggctttcatctgctggtactgcaaatctttctgcgccgacagcttatccatttcggcctgccatttcttcggggtgatcggctcgccggcagctttcagattttccagataccgggcggcggcttcatacaaagcaagctccgcgctgtgacgctgctcaaatagttcccgcttgctgggtttcacttagtcaagctggcggcgggttcccttgtgcttctcatactgcgcccacattttcaggtgttcgtccagcttttttctccggcgctccccgctgacgagctggccgcgcaaatcataataagcgccattcatggcggagattttttcatgtagctgctgcatggaagtaatcccgttgctgtgcaagaaattgaacagggcggcgctctgttttaatgccttggccttgccatagttggaatgggccgcgctacggttcatttcatgctgcgcctgccatagctgcgtcataatgctgtctttgccctgcggtctggcggcttcttccttagaccagttataaagccgggtaatgcgggccttgatctctttcagcagcttattgtcggcggcaatctgccggttgacattccctttctcggtctggatgccgcgcttctccatctggaaagcggcaacgcccagatggatggaaggaatcttatcaatcccctgacgcttatagctgcggtggtctatccggtctgacaggccgatagccgcctgcgcccggttcacatattccgcccacgctttgcgccacaattccacattccctttgtcgttccagtccgtggtatcttccctgtgatttttccagccgcctttcccgtccgggatgcggttgccctgtgcgtccagctcatataccttgcggcacttcgcagcccactcgccattttctttcagggggcggacggtcagcaggacatggaagtgggggttgccgttccctttgtcgtggatggcaaaatcggcgcacatccccttgtccacaaagttgtctttcagaaaagagcggacaagggcaagctgctgttctctggatagttcgcgtggcagggatgcttcaatatcacgggcaagctggctgtcctttgctttctcaatctgctccacgctgttccagagggagcgcggtcagaaaattccggcggggcattgggcggcagcatgatctcggtgtgaatgacgccgcgctttcgggtatagtcatgggtctgcccgtcccattcgtttgtcagcttcgtcctgctccggtaagcggcagcttctacggcagaccggccctcgctgcgcttgacgatcttaacgggaaaatggcagaaatccattggtacagcctcctttcgggtggggatatataggttccgtggagcatgacagacgcagggcgggtgtcatgctgcgcggggcgcacaaggggtttggggagtgtagctccccatcgcgctcggagagcgcaatagcccccggcaggcgcacgacaccggcaacggtgtataagtgcgccgttagtttttcaaagtacctctgtttccgggctttcgggcctgctttccggcagcttcggcactcccggcaggcggaagagtgacagcaaaaacgacttgacttcctcgccgggcagaccggcaagagagggaaagacgctttccagaattgcgccatgctcgatcaggcggcgcgtcctcgccctgcgctcggcatcggtttgtttgttcaacaggattttctgccggttctccaactgccggatttcccgctgtaccttttcctgctccgtctgtaattttttcagttctttcataggcagcgcctttcatcgttccgggcgggtcagctttttgtcgtgataaaaccgccacgcaccaacggtggcatggctgataatcttgatttctccccgctcggcgctggctctggcatttttatagccctcggcagagaggaaaaagcggtaacgcccgccgggtgttcccacagggctgttggagtttaagatgtccagtacaaccatgtgccgtgtgcttggcaggctgcgctccatcccgaacaggtcatgccccaacagtggcggctcttgtattccggcttcggtcagccggtcagggctgggctggccgttttctcccttaaagcaggcttttacacctgcaataaaatgactgcattccggttccggcacctccagcagcttgtcaatggtgttctccacaatcgcttttgtcagcggttcttttgccgcccgccggacagcccgcaattccgtcaggatcgcgtccttatccggcatggcgtattgatagatcagttccaattcgctttgtataaatttcattcttcaaattccctccatttctttttgtcaaagtaagtacgcagcttcttcaatccgctgcggatggattcggaaacaacgctgacgctcacgccctcgctggcgacaatctcctgtattgccatgccggacagataccgggcgcggatgcggcgggcctgcgtgggcgttaaataggacagagcttcttctaatcgttccagcgtcagcaggaaaaaccgttcttcctcctgctccatgagaatttcctccggggatttttcaaatccgcacagcgcgtcattctcaatcccgtcctcccggtcaagggagaaatatgccttgtggtaatacatctttcggatgcggttgttttcctccctgtgcatgagtaaaagggcctcggccacttcatcggaaacctcaacaaatgtgtctttggtaaacagcgggtaatagtattttttcaggttgacggtctgcataggccgcacctcattccacccggttccggcggctgtaatactcttgcaggcgcttcaaaccggcgtggacggagcggcagaccacatccttgttgatgccctcctcctgtgcgattccgggaaaatttaagccacgcagatagtagctgcggacgcggcgggcctgcaccggcgtgatctgggagagggcttcatccagcatggacagcagccggtcacgggcggcctgttcctcctgaagcacaagcacttcctccggggacgggctgtgttccagcgcatagttctccgtccagtcataggcgtccagcgagtagtacgccttgtggcggcaagtccggcggtaatagttctccatctcccggacagacagcagcatggcctccgccacctcatcgctgacctccacaaacacatcctcagtgtagtaggggtagtaatactttctcagattgcttgttttcatgggctaacctcctaaaaatggagagaggacaggcagcttcaaaactgcttgtcctctctgatgatgtgagggaaaaagttcctctcactggttggcactatggaggcagtcatcatgaaaaagataaaaattgagtttaccaatgagcggctcatcccagccagcggccttgcagttgtcggtgccattctcggcaaaagcgacttcgtaaagcggtgcaaccgtatggatgtcaccccaaaccgttcacagcaccagatcaagaacggggatgtcctgctcacttatatcggacttctcaccatggggaaacctgcttatgagtccgtccatgagtttgatgacgacccggatttttacaaatacgcacttggcattgtcagaagcatcccttctgaggagacgctgcgccagcggatggatgacattggctcatccatgcgttcttatatccttgcggaaaacatcaagatgctcagggataatggcattgtaccgggaaaactcccgaacggttatgtgcctgtggatattgatgtcacgccctttgataattccaagaccaaaaagcagggtgtctccagaacttataagggatgtgacggctatgcgccgataatggcatatattggaacggagggctatctggtcaactgtgaactccgggaaggaaaacagcattgccagaagcatacccctgagtttttacgggaaaccatccgtatgtgcagggagattacggatgaaccgctcctgatccgccttgattcaggaaacgatgccgcagagaatatcggtatcctggtggaagcgggctgttatttcgtcataaaacgcaacctccgcagggaaagcaaagaggactggctgcagatggcacaggaatacagccaagatatcgaaactccccgtgaagggaaaaccgtctatatcggcagcgactggaaaccggtttcctataaaacagcggatgatacggaaaaaaccatcaccgtccatgccgggtacgagatcataaaccgtaccattgataaatatggccagttccttctggaaggcgacattgaagtcaatacctggtggacaaaccttggaatgacggaccgcgaagtcataggactctaccatgcccacggcgaatgtgagcagttccatagcgagatcaagaccgatatggatatggagcggctgccatccggcaaatttgagaccaatgagctggttgcggatttccggtcataaatgtcatcctgccaggtagcctttgagaaaccaaggggaaagcatgcccttttgaaaggatttctagtgttactaaccgtcatttgaaaccaaaatcaatccagatacattaaaatactgtctttgaagaactatttatcaagaataagccaatccgatttgggattagcatcataaaacaaccagtttcacggattcaggttaaatttaaggcttccggatttaagcttataagagaagttattcctatcctgcttctccagcaggatgatatcctccttcacagtaccattcaagattgtatactggacatccacgttctcatacacatcactatagcggattgcattatcccccacacggcttagggtataatctccgccctccggtacgatttccagggaatcaccgccttttgtgatggtatacccgcgcccgccgctcatcttttccggtaagagcacggtcatcggtccattctcgttccggtaggtagtcccggttgataccatgcttctcatccttctggcattggaacccgtggccacggatatttcctcatcctccacacctgcctcggtcagcatgttgttggcttcaaggacctcgccgcttgtatcctgataaagcccggaatacccgccaacaacggttatgtattccccgtcaccggtttggtaggtacggtatcggtcattaaactggaccagctctccttccggttcttcaatcaggtcatcataaaagtcctccggttctctggcctccttttcatcctctggcttcgaaagaacctcggcaggtaaggtttccagctctgcttatgtactttctggcgcatcaggtccggcaggtcgattaccgcctgctccgccgctatggctgccgttctcatccgcttctttggcttcttcggattcttcggtttcttctgtagattccttggtttcgtacttactttcatctgtattgcttccagtctctttatctgcaccaccggactcctcttcttttccggtttcggaatcaccgccggactccgaaccatcgccggtttcggaacctccgccggactccgaaccgccccctgactcggagcctccgccggattcagaacctcctcctgactcggagccatcactgccagaaccgttgctatcagaattagagctactgctaccagaatcattgctggtatcggagccgctgtcattgccagccccatcaccactcccggaatttcccaggtcactaatacctacttcgttagtaagagccgtcggcctggcaaaagacacataacgtggcctgttatgaatggcctccgccccttaggctatcagcggcaccatattgggcgccatcaaagtagttaccaataaaagactggcagcccttcctgctaattgtctgcatcttttccgttttctcacaaaacatcccctcttcttttgttttttgtgcatagacacttatttaaactggattttacaccagtttttatatatttccaacagtttccgcacgaaatgcggctttttatgcacgaaatatttccaccccaatcggataggggagattttaacctccccttccacaccacgtagcgtaccgttcggtactacgcggttcaatagtttactcggactttcagatagtgggcagtcatatcgggataaccaagtctgtccactatgattcttttggtgagtgccgagttgagcattcccgccgctctccacactccctttcggcagttcgccatctcatgcaccttccactctggtaaatgtaacgcccgcaacattttatatcttgtgcgtaccttcttccattgtttccagtacaccgctcggattctgtggcgcagccactcatccgtctgttccatcaggcttttcatgtctgcatatcgataatagttaatccatccccttgcatagcttcggagtttttcttccctctcctgattgctccatttgttccctctggttgtcagctcccgtatccggttcttcatttttgccaccgacttcgggtgtatcctcatgcggcatttccctttatgccggtaaaagccgtagcccaggtattttatcttgctgacgtggctcactgtcgttttctgaagattgactttcagaaacagttttcctgtgatgaatggcacaatgttttccattgtcctctctgcgcttttcctgcttttgcacagaatcaggcagtcatccgcatacctcacatacttgtgtcccctgcgctccagttccttgtccaactcattcagcatgacatttccacataagggacttagcgggcctccctgcggcacgccctcggtcgttgcgtgaaatcctccgtcctccattactccggctttcaggtacttgtgtatcagcgagattaccctcccgtccttcaccgtcctcgacagcacctctatcagcttgctgtggttcaccgtgtcaaagtaggattgtaaatccatgctgaccacgtagacatatccttcgttgatatatttcctacatctttccagtgcgtcatgcgcccctctgccgggacggaatccgatgctgttgtcagagaactgttcttcatataagggcgtcagttcctgtgcgattgcctgttggattaccctgtctaccactgtgggtatccccagtttccttgtttttcctttctcctctttgggtatttctacccttcggactgggtttggcttgtatttgccttccctcacctgctcgaccaattcggactggtgttctctcaggtagggtagaagttcatccacctgcattccgtcaatcccaccaacgcctttgttcgttttgaccttcttataggcggcatttagattgtcgcttctaagaatcgtatctagcaggttgtccgtccgaaagtccgtgttggtgtcggggttcccggtaatcctttcatgggcgtactctcctgtttcccttccctgttccgcaggtatctctcgcaggtagtcctcaatatgaagttgtctgtacttaattccatgtccggtttccatttggtaacgacacctcctactgttcagtccttcccggtgcgtttgcgaccgcccggtactatgacctctgctgacttctcacggcaagctttactccgtgacagcgaatgttttatcgccactttcacgtccgtgagacctccccgggtactcacacgttctttcccacttatacctgccccgtttactgctggcgttccgtgcagttattggactttagtttgttaggcaacctcatccacgcttcacagcctatccggacaacttttacaggccagtggtttgcctccggcttccttcagaccccacctcacgatgacgcccttgccattggctgcacccttcccactgccgggcgggtcagggactttcacccgttagaacgtgcgcccgccgggcgcacttaaaaaggggctgctgcactaaatagggtgcttcagccccttctttgttcccttataggaaacttcgcaaatcggccaaaatggtgtataatagactagaaataaacaatggcaagctatccgcatctggttttagaaatttattacaaaaaaactgcactatttgagtgaaaggtcacggaatccccatcataggcatcaataccggaagtggcaatggcggggtacactccctacactgaaaattttttaccattctccccaagaatacgccccagctgccggaccatttcctcatatgggaccgtacatccatggccgcctatggagatagacggctttgtctttccgtgataatcgcttccgcaggtaatcatcctgaatctgccgcacgcagccttatgataaaacgcggcctgttcctccgagtggtagctgctgaatgcctctattccatccactcctgcctccagtatgggatccagcaattccgcacggtcttttaagttaacccccggatgcgccagcaccgcatatcccccgtttctgtgtatggtatcaaccacctcctccagttgggggtattccattttaacataacagcattttccctgagaataaaaatcccagtaaaaattcacataagggttatcgcctcttgctccgcctaccctgtagggaagaagcaggggatggtccttgtattcctccctgcccaggagcacctctgcgaacatttccccggtccaccggtccttccagtaatgctctccggccagctccgccatatcctccgctgtcacatcaaaccccatttccctggttgcacagagcatctggctggatgccgccgctgcctgactgcttatattatcttcaatacaggcaaaatcatggcttgtatcgtcaattccataccccaacacatgaagattcacccccctgaacgtacagtcaatctctatgccggaaacatacgtaatcccggccctcagggctgcctgtcttcccgcctcgtttgcccgcacactgttgtggtccgcaatggacatgatacggatgccgttcatgccacactgtctcaccagctccccgggactgaattcgccgtcatcactgtaatagctgtgcatgtgtaagtccattaacttttccatcctgaaccctccccatcctctctgtcatcccaatcatcaataccacaaataccaccagacacacgggatacagcgtcacgctgatgcgctctgccacaaccccaaacagcggcggcatgaaagtggagcccacataagcgcaggccatctgcatacccatcatggactgggaatactgcaccccaaagttatcaggcgtttcatgaagcagactgggatagataggagcacagcccagtcccaccatgataagtcctgccagtaccgccccgtcaccggccggaagaaacagcagcacagttccggcaaaggcggtcagctgaccgcagcgcaccatgttcctgtcccccgcccggtccgtgacaaaaccgctggccagcctgcccagggtaatacccaggtaaaaaaacgaagcccattttgccgctgtctggggggcaattcccttatgcagcaccatataactgctggcccacagaccggctgtggcctcaagagcacagtagcagaaaaatgcagtaagcaccgcctttgcccccggaagccgcagcccctctctcatggtaatctgcttgtgggtgtcatcctgtccgctgcttccctccgtcctcaccttccacagaggaagcgacagcacaaggcaggccaccagtgcaatctgaatcacccccaccaccatataaccggaattccacttaaaacctcgtgtcagacataggcccatgatatagggtccggccgttgcgccgataccccagaagcagtgcagccagctcatgtggcgggatttatagtggagagccacaaagttattcagtccggcatccacgcttcccgctcccaggccataggggatggcccaaaggcacaattgtataaaggaatgggaagaagaaaaaccaaacagggctgctgctgtcattgcaacgcttatgacagtaacctttccggtcccaaaggccctgataagcctgtcactgaaaaggctggaaattatggtacccccggcaataatcatgctgataatgcctgcataggacaccgaagcccccagctcacggtacatggacggccatgctgaacccagaagtgcgtccggaagccccaaactgataaacgccagataaataatcacaagtaatagctgaaacatctcatcctcctgtttctaagcacccaaaagacccgctgaagcctcccgcgcgcagaacatatattaaatacacaccaaaagaatatcgtcttttccttcttgattcaacccaaatctcgacttataatataagaaaaacgaccaatcggaggattgacatggcattacaggattgtgccctgaatttaaaccgcgcagggagggaactgcagccccacgggatgccggacttcccctgcgcaggatattcttctgtatatacagacagtgccggggatgtggttccctggcactggcatgaggatttggaagttatttacgttgagtccggacatctgagactgcaggttccgggtaagacctttcatctaaaacatggagaaggcgctgtggtcaattccaatatactgcattttgccgccgcagagcccctttgcgaactccattccctggtatttcaccctcttttggtaaccggcgggcaagattccgtatttttcaagaggtatgtggcgccgcttcttcagtgcaggatttttgactgctgtccgcttgacccgcttgccgaagactccggagagggaaatcccgctgccgtcttcacctctgcctttgatgcattttccggcgaaccattgggatacgagttcgtggtccgcgaaaaactgtcccgtatctgctgttccctttacatgtactatgcccatgcaatggattccagggaaccagttccgaatacggataatatgcgtatccaaaaaatgataagctttatccatgaacatttccacgaaaatctggacctggcccggattgccagggctgcggatatcggagagcgtgagtgcctgcggtgtttcaaacgcgccatccagacctctcccattcagtaccttctgaaatacagaataacccagggggcttccatgcttcttcgcagccctcacagcagcatttcctccatagcaggcatgtgcgggtttaacagtcccagtaatttttcgcagatgtttgtgcgcttttttaagtgtacgcccagggaatacaggaaaaccaactgcccgccttctatttgctttggatttccttcctccgaagccaggactatgcggtagacgatgaagagatagctttaggcgtcagatgtatcgcagcccctatttatgattaccgtggcgtagtaaattacagtctgtgtatctcaggaacgaccaacaatataaaaccattttccatggaccgttatctctcagcgctgctgtctgccagcagtcaaatcagttctgcgctgggttataaacacagcagacagagcccggaagttcaaccacccggtccgcatggagataacggccggaaaaggggctgtgaaaaaatagagtagacggactctatttcccacagccccctcactttttgatccggaagtctgttacttccctaaaaaagcatatacctcccccttactccgtataaacgtagcatcatggtccgctttggaatagctgttgcgttccgggccgcagatccggatctttttcacatattctttcagcttttgtgtgtattctttcagcttctcgcaatatctctgctccctgctcttgcgatggcctctgccgtggacgaacgcctcctcgtcgatccggcactgaaaagcgtatcgtccaagaatcatctccagaccctgcggagtatattctgtgttcgtctcaaccttcagtccggtataggccaggtcctcattgatctgatccagcagctgtgtgattttcgcaaacagccggtatctggatttctccgttgcttttttccatacccagctgtatttgttcgcatttgcctcaaattttgagccgtctatataaagatgttccagatccacggcgtctttttttcggatatactccataacggcacggaaaatatcttcggcctttccgtcgatttcattattaataaagtatccgaaggagcggtaaccgggtgtttcgtaatccatcaggtacatataacggatattggttctgcaccggtcctccaattcccttaaacttgcgtatcctgtgtccataaagccgaataagattgttttaagcatattgacccgattatatcccggcctgccatagcggtataatggttcaggcctgagatactgttctattccgatctcctccatgatctggtcaaatacccataccggatcgcagatatccagactatctgcaagaaatactggaaatcttccctgctttggactataataagacatggtattatttttcatgacagataaattataccagcaaaaaaagaacgtttccagggtaaaacctgaaaatgttcttttttcacagcccctttcgcttttgtatatctgtgaatacttgatttccttttgcctatccacataatatctcaaagcattgataattacatgaatcattttatactgggtaagcggtcgcttacttattgtttaatgccgcctgcgccgcatcggaacaaacctcaatcagattgccaagcggatgaacgcaaccggaaatgtctatgatgccgatgtaaaacaaataaaggatctgatggaagaagtatggcgtacacaaaaatccatgctatcgaaacaaccctgcctaaagcagtaaaatatattttgaaccctgccaagacagacgggcagatacttgtttccacctttggatgcggtgtagaaactattccttatgactttgcctgcgcccttttcaagacaaggcagtctgatgaaaacaaagcctttcatctgatacagtcttttgctcctggcgaggtctcttatgagaaagcccataaggtaggtcaggagcttgcggacagattaatggaagggaaatattcctatgtaattgccacccacacagacaaagggcatattcacaaccacatcatttgtgcgcccataccggggcgaagtgaatccgcaataacaagcggtcagcgtgtagtttcatgctgatggtcaatgacttaccaagcggagaaatcctaatgggaacaaagcacgtcattaaaaccgtaagttggctagtataactcgattttaataagtttacattattatcctgaaaaccaagggaaacgtgcgcccaaagcacggacacgtaagccaagaaatcagattactaccaatgcttaaattgtaaacttatttaaatcgagttatactagtacagcattgccaaaataataatgaatagacgttgcttttttattgtagtcggtgcataataattctatctctaaagaatggatgggttattatgcgaaggaaaacaattgatactatcccggttttatctgatgccatgaaaaacatattatctgctttttcaaaaagccgctcccttccgtcaggactggtcaaaagagccagcattgtcctgcttgcgtcacagggggaactcaaccagaatattgcaccacaggtcgggcttcattataataatgttgccacctggcgcagtcggttcctcgcggcgctcccagccttgcggaggattgaaatggacgccccggaaaagcttgaagatgagatacgggcagtcctctccgataaaaaacgccccggtgccccgtctgtttttacgccggaccagatcaggcggatcatcggccttgcctgcagcagcccaaatgattttgggtacgaagtaagccagtggagcctcccgctgttagtggcagaaattaaaaagcaggggatcgctgaacagatttctgagaaatctgtcagccgtttttttaaaatgaggtagatttacatccccacagaatccgttactggcttcattcttcggaaaagacggaagccccggaatcttttgcgcggaaagtaaacgaaatctgcggcctgtaccagagtgcccaggaacaaagccgggaaggtgcacacattgtttccacggatgaaatgaccggggtacaggcgctggaacataaatatcctgacaagctcccattacccggccagtgcgccaaaatggagtttgagtatatccgccatggcacggccagcctcatcgggttctttgatgttgcaacgggccgtatggaaatgccgtatttaaactccacacgcacagaagaggattttgtggaagccgtgaaagcattggcagggacagacccgcaagccccatggacatttatatgcgatggcctaaacacccataagtcggaagcccttgtccgctttgtggcagaagcctgtgcccttggcgtggaactgggcaaaaaagggaaaacagggatccttaaaagtatggaaagccgggcggatttcctgcatgacccttcccaccggatccgctttgtctatactccgaaacacagttcctggatgaaccagattgagatatggtttggcatcattaaccggaagctgctgaagcggaaaagctgcctatcaatagaagaactggaagcaagcatcctgcgctttattgaacaatacaatcttacagcacacccatttaagtggacatatgccgggataccattagtaatttaatcactgatatttaagcaatgctgtaaatttatggctgctaaatatcgtcagatttctttaaatgatactttttcagactgtcaggatatgtttatggaagatacaccttccttcttccagcttctggatgaacatttcgatataaacgatttcatcccctctgtctttaccaatgctttttatcagcaccttggccgtaacagggtttatcccttaaccggcttcctttcctctctcatcctccagaagattttttctatccctactgattctctgctcatcctttttctttccatctgtaaggaacttcgtgatttttgtggtttttccaaagtccccgatgctcctctgttcaccagattccgccagaactttgaaccctatattgaactcatgttccgccagatggtcgattatacagaacccatctgccagatgattgattcttctcttgcccggatccttaccttcgacacctctggtattgaactgtttgtgaatgaaaataatcccaaaactctcaatgctcttatcaaacgcttaaagtctttttataagacaagccggatgtggatccctacaagatggcctacgggcttatgccttcgcaggctgcttcctctcccgatgccaaacagatgtatatcaatgggcatttttgctatgccgataaattcggcatcctcacgaatggtcttggtattgtcagggacatcgtattttttgatgatgattttaaggctgcacatccggaacttccggttgagaaaaagtcggattcctctgatgaagataagaccatcagcgattccgctgctttaaagccggttctctctgactttttctctgcacatccggatttccacccgaatacttttttaggagatgccgcctttgattctgctgacatttacggcttcctgaaaaacgagtttggatatcagaaagtcctgctcccatacaacccacgtaacgaaagttcccttaaaaaagtaggctacaatgaatacggatatcctacctgccccaatgatcctctgctggccatgaagtattgtggcgttacaaaggaagaaggacgttctgaccgtatcaaatggcgctgccccaaagttcatatgaaaaacgggcattggatttgtgaatgcgaacatccttgcagcacagccaaaaaaggccgaaccacttacacctatgaaaacatggattttcgcatgtttccgggaatccagcgtaatacccctgaatgggatgccctctataaaataagaacttccatagaaagagccatcaatcacttcaaaataaatatgtgcatagctggcaaacataccagaaatcatgcaaccacgaaagcagatgtttttcttgccggaatcgccagccagcttacagtgattgttgcctttcgtatgaactgtccggaatatatacggagtttaaaaccgctggttgcctgaaaaagtattcaattatcatggttcgtaaatctatgggctataagtgcgcccaaaaatctgacatttatgtcattccagagtttttctggatactgaccttttttctccttacctatgggcgctttttttcgtccaactaatggtaagaaatcatttaacaattacctattttctcacgaaataaaaatatccctgaaccaagatgactgtagtcattccgaattcagggatgtcttattccgatatcttatatttataaacctgataccgtgacaagtttcacgattgctgtacattccagctcactgttgattctcttattaccacacgagattccatctcatacatctggggctgagtatggtaatttatctgatcaagaagtacttccacagctttttttccaatcatctccaaaggctgtgccagcgaagtcagtttaggattcatttcccttgcgagcagagaattgtcaaaccccgcaaccgctatatcatgcggcacggatatgccctgcatctgcaatgctgatatggcttcacaggcagaaatatcatcgttggcaagcaatacttcactttgaatccctctgaccaaaatataatttttgacattttctgataccccggtagcattcatattcgccggcggatcacattcgattacgtctgtaagttctattccgttcgccaaaagataatcccgtaatccttggaattttatagccgatgtagatttcttgacaggtccgatatagcctattttccgaaacccgacactgagaaaatgttttgccatcagttccccacccctataatgggatatataaatcgaatggaaaccttccaccttttttgtaatcatcgtaactggaatattcaattttctatatgaattcagactgaattcggttgagacagggaccgctataatcccgtccacttttcttttatttaatcctgttaatatatttttttctttttccaaactccggtttgtattacatataataacactgtagccttcatagaatgcttgactttcaattgcctcaataatctcactgaaaaacggataggcgatttccggcactataacgccgataatatttgtgctatttcccgctaaactctgagcaatcagattcggttcatatcccaactctttaacccaatggagtacttttttccgtgttgcagccttaactgacggatgatcagagagaactctggaaactgtcgccctagaaacacctgccttatcagcaatatcttgcatatttgacatatctctatttcctcctcccacgatacagcaatatcctatattgtcataattacatgaaagtatcgcatttaaacccaataattttattttagaagatttgctataaatagtcaatctttcacggaagaaacaaaatgtcataagttcggcacagtctgtctactttaaattttatatttgtcccttatctttttctgaaactttctctaaaagccactgctgtgaatctccgtccctactaatctttccgatttccagcccaatttcggacagctcgcttccatgaaaacgtctaccagataaagtgtctttgtacaaagcttgtttttctacatgcgtcaatcttaaacgttttgacactgtattgggacgagacataatctgtacataagtaatcaatattttttctccatcgtcactgatatacatccacgcatattcgttcccaatttccagtccctttaaacgatacaggtctccgaactgaattatatatcttacctttttataaaaaccaatatatttttttatttgaattttttctgcactatcaatcttgttaaaattcaattcaagtcccagattcccccacattgcaacggccgccctagtttcaaggctgactcttctccctgtttgatgattcggaacatccgaaatgtgacaacccattccaatcgacggatatacgagtgatgtcccatattgaatcggcaatctctccagagcgtccgtatcatcgctgacccatatctgaggcatataataaagcattccaggatcgcaccttccacctcctcctgcacaaccctcaaaaagtacatccggaaattctttcgttaaggtttccataatatggtaaagtccaagcatatagcgatgtggcaactccttctgctgttccggggacaggtagagagaccctgtatttgtaaagttccgattcatatcccatttcacataagagattgagttttcactcaaaatcttccctacactccggataatatattcacatacagcaggatttgcaagatccagaacatattcatctctagatttttctattctccgcccttttacctgtatgacccactccgggtgctgtttgtacaattcgctgtccggggataccatttcgggttcaaaccacaacccaaatgcaattttccgcttacggatatcactgattaaactctccagattccctcctagcttcttctcgtaaggtatccagtctcctattgatgttgttgtatcatcccgccgaccaaaccacccgtcatctaatacaaataattctgcccccgcctctgctgcctgtgctgccagcgagacaagactgtctctcgtaaaatcaaaatagttcgcctcccaactattgagcagaactggtctctcctgatttctaaaccttgttggcatcagacactcacgatacaatttgtgaaacgttcgggacatctgtcccagtccattccctgaatagaccagaaccacttccggcgtctggaactcatatcccggatttagcttccattcaaattcaaatggatggattccaatctggaaacgactattctcatgcatatccacctctacctcagcaaggaaatttccgctatatacaaaattcattgcatagacttctccttgatcttccgaagtatccggcgatacaagtgcagcaaacggattctgtccatgtccgcctgccccccgtgtactgcctactgcctgtattccctgttccagatgccttctcttaatattacattctcttccccatgcacccgacagatggatcaaatccaagtcactgaataacaaatccatatttgcagaacaaattttttcaatatagaacgcttcttcacctttattttttaccagtacagactgggtaatcgcattgtatttttcaaaaactccgaataccaacgtcacctcagtctgctttaatgtatcacaaagtacgatttcaagaacctcgctatcttcatctgaaagcactgctggaagtctctcaggttttcttttccctctatatgtactgtaagaacggtaacgaaggtctgtaatcctggatccgtctttccacctaaaagaaaatgccggctcccgcaaatctgtatacccgtatgaagggtaaatctgaggcatctgttctaatttaaaattcttttttccatccgcatcaggcaggtaacttgccctagaaatttcttcaattatatatccgatatcagtcggctctatttttcctccccagtgcggtataaatacgtgtctgctttccggaacaaaaagaaccagagaagtatcggaagtatttaggaaaaacaattgctgatttttctcatttttcaatatttgaatcactgttttgccctctttttatcactcttccataacttcctttggaacgacaaatatccacgccaaaacaaaagctgaaataaacgttaccgccgccaaaataatgtacataatcaactggtgtggtgaataaatatacaataaaattcccggaattgtcgtaattccatttcctgttccctgaagaccgataatcatcgcaatcattccagccactccgtttacacagcagcttaaaataaatggtttaatattgtatctcagaagcacaccaaatagggccggttccccaattcctagcaaagcagatgcagtggcgctgggaccaattacacgaacttctttcttttttgcctttaaagcaatagcaaggcagacaccagatgaagaaaacccacacatacaaagaattgcattcatcggattaaatcctgtatttgccagaaggctaatctcaagcatgtttgaaatatgatgtactccagttagcgttatgattgaccagaagaatcctattatcagacctccaataccgaaaggcaaatgtagtgccacctccatagctgacagaagattattttctactccatgcaagattggtccaataacaacaagtgaaagaagaagcataatgagaagaaccaagaaaggagtaaccataaaatcaaaggttgttggaaccgtctttctcaattttttttctaatttacttccaagccagcccgccacaaaagcaggaaggatactgccctggtatcctacaataggtataaacccgaacagataaattggaacaactccgcttgacggatcggccacagaataagcgtttggaagtgcgccgttgactagcatgagaccaagaatcaatcccagcaccggggaaccaccgaacaccctgaaagtggaccagcaaacaatcgccggaagaaatgcaaatgttgtccccgacaatacatccactaagacagaaaatgtctgaggtacttctgcagttgtcattccgaagattgaaagaaaattatcgttgagaagtgcccccttaagtcctaggaataaacccgtagcaactagagccgggataaccggaacaaatacatccccaaaagttcgaattgccttttgcaaccgattctttccatccattttcgcctcttttgcttcactctccgttgtttcattgatgcccagcttggtcacttcttcatagactcggttgacatgtcctgtaccaaaaataatctggaactgtcctgctgtaaaaaatgtaccttttactccctcaatatcccccattcctttttcatctattttctctttatccacaacaatcagacgaagtctggtagcacaatgctgcacggatttaatatttttctgaccaccaatacatttaacaaccgactcggcaatctgtttataattgtatcccatgatatcctccttattccttgtaacatttttattcattatgtacgcgcgttcatttgtttatattataaataatgcaataacaactgtcaacaaaataatacatcaaatttaatcaaaatccccgaacaatgttctttcgccagttctgacataaaagggcttctgaggaattattcaggataatatttattcatctgttttgaaacagcatacaaaagatttagattaatacttatatccggaatccgctgtcacacttggataacggaatcccagcttttcctccattgtctttaaaaatgctaccagcgtccagacatcattcctgtcttgaaatatatctaccccaatgatatattcactatctactccgatttggacgttatagcccggtttgatctgtgcattccgcatatggtcatccttcatgtgcataaatgtagcatccggatctgttttgcagtagttattccttccctggaagctggctgtatgccagtcataaaccgtctgccgctctaaaaatcggtggaacagctccaaatatcgctggttccggctcttccgtttccctcttccatgtacaaacaccgtttgttgttccctgcaaacctgttccaggaaacgacagatgttctgaagatcctctgtccgagtggcttctttgacgcagaatgactggatatactcctgattgatccgtataaccgcatcctgtatcttccagaacattttttcttcccattttccaaccgattttttccagacaaaggtgtatttattggcgcaggcctccagctttgttccatcaataaacacggtttcctttgacagttcaccggagttttccagccttctgaccatctggtaaaagagattttcacaggcatccgccaaaaagcctgtgcggaaccgtgcgatggtactgtattccagtgccttttgcccggccagcagccacatgaagttgatgtcgcgtttggaggcagtttcaattttacgggaaaaataaatattttgggaatacgcataggtcaggatcttgaacatggtctttgggtccactgccggatttctgcctttggcagagtaagcctgatacagcaagctgtaatctaaatcctccaattcgtggctcagcagtcggacagaatcatcgttgggaaccaaacctttcaaacttaatggcaaaaccagttgataagctgcgccgagttctagtaaatttttatggtattttattttactcggcataatttattatgccatggattgcggactcttcggagtccgttttctgtttttaagcaaaaagaaagagccattgctccatagattactcatctattttgcaacggcttcttcatttgtaaaataatttaattgatgtgttaatataccccgttacagttaaaaatgaaatcgttccagtgcatagattggccgggtaattgttttaccctcaacaccgccatgggtattacctttcaggtaaagaagataatctgctttaccgtcataaagcgcctttttggctgtatttccagactgcttaccagactttacctcaacagcataccgtgtccgctctttcagactctgtacgtaaaagtcgatttctctattcttatatgtggcaaaagccggtgtctcaaatgcaatctgctgtggaaaatccagccttttcaccaggtttatatatacataattttcattaagcgtcccatttatggaagccttatcaagaccagcttgtgtcatgtagaaattcgcaattcctaaatccataaaataacaacgtcttcccggtttaaaatcaagaatgtcaagctctacaatctttccacagaagccaataatgccaaaatgatacaaccagttgatggcacgaaccaccgttgccttggataaattgctagtacagcattgccaaaataataatgaatagacgttgcttttttattgtagtcggtgcataataattctatcactaaagaatggatgggttattatgcgaaggaaaacaattgatactatcccggttttatctgatgccatgaaaaacatattatctgctttttcaaaaagccgctcccttccgtcaggactggtcaaaagagccagcattgtcctgcctgcgtcacagggggaattcaaccagaatattgcgccacaggccgggcttcattataataatgctgccgcctggcgcagtcggttcctcgcggcgctcccagccttgcggaggattgaaatggacgacccggaaaagcttgaagatgagatacgggcagtcctctccgataaaaaacgccccggtgccccgtctgtttttacgccggaccagatcatgccgatcatcgtccttgcctgcagcagcccaaatgattttgggtacgaagtaagccagtggagccttgatgatacgagccgtttcccatcctcttttgtgatcgcatcaaaaacaatgaccctgttatcctgaccaacagccctggcaactctttgtaccaatttcatctgcgtaccctttactatatcaatacattctatccggtattgaacccccttttttaagatatcaggaataaacatatattgtgttctgatgactaagtgattttatccggattcaattccgtataattagtcagttcaatccccctgtttgtaaaatagctgcccgaatctgctgcccctgtcaaatcatccgtaattgagaataatcgtttcatgccttcccttctaaaaaaggaactgccggttctgccttaacggcccaaccgacagttcctttttttatccgcatatatagtcattctctgtaataaatctatctatctgttccagtgtaggagttgaatcagaacagctgtgtcctgatatcgtaatggaggcagccgcagccgcatacatcaaacacttttccatagtaaatccactgattatcccataattaaatgcaccagagtaagcatctcctgcaccgaatgttttgaccgcttttacaggatatactccgccatgatagatatcctctttggtatatatacaggaaccttcctttcccctttttatagacacatattccgccccacgctcaaggaaatattctgctgatttcttatcatccctgttcccaggaagaaacatccgctccataacatcgaattcttctcgtgtaccgatcaccatatctgattgaagcgctgccatatggtaatatacagatgcttcctcctccgtatcccacgtatcggtcctgtagtctaaatccagtatgatcctggtgttgtttttcctggcataggacatggcaagaaaaacgctttctctggcagggctatgtgtaagtgatgtgccggatatcagaagcattttcgcatcggcaatatatttttcatcgatctctgtacactgtatattcaaatccgcgcaatcctgccggtacataaaataactgcacttcccatcttctctgatctctcccatggtcaatcctgatcttcttcccgtgtcatcagtacgtatatgggaaacatccacaccttttccattcaaataggaacatataaatcttccgaaggcatcatccgacacttttccaatatatcccaccttcagtccaaggttagccatggcaacagcggtatttgccggagaccctcccacgtatttggaaaatgtctttgcatcttccataggccctgtctcatttgcgtacaggtctaccgttgcccttcccattgctattacatctatttttctaaatctgtccaattgcattatgtcatctccatcactcatgttccagctcttccaatagttccattgcttctttcactgaatatccgccatgtatgatcgactttaccgctttgacaatcggagtgattttgggatactgtatgataaacctgccataggtaactcccgctgcaccggagtccagtacgtccttcgtcattttaaacaattcctggggagttcgacagttatcgcctccagcaatggcaaccatactgggggttccttccactacccttgcaaaactttccggatctcccgtataattggtcttgatcagatcaactcccaactctgccgcagctcttgttgcatacagtatatttttccaatcatatctggcttcatcttttaagcagtttcctcttggatatatgtgggatatgacaggcattcccagctcttttgctttcttacagtaatcagccagtgtagataactgctgcggctgtttgtctccacatacaatacaccctatggacactgcgtccgctcccagtcttaccccttcctctaccgtggccaccggtgtgtcaaaatccggctggtagggagaaaaagtagtgcatttcaataccaagggtgtaatacctgcatgttggccaaagcaccgttctgccaatcctttatgcatggttattgcatccggtcctcctgcacacatatcatctatggtcttctggaatgtatcaagtcctctcataacccccctggccatactgtggtccacagtcaatccgaaatatctgccgtccttttcaggcattaaccggcgcattcttgcactatatcccataaattccatcaaacatcacctttacctttcttaaattataacccgggtatattttatttacgtaaacagattaacaaaaaacattaaatatccagggcaaagagttgtgactaaaatcgccgccagaccaactatgataaaggggactgcttcctttactgtgtctgtaaatgtagctcctgcgattttttgtcccacaaatatccccactgcaaaaggcggtgtcaaaaaacccacgcacatattcacaagcatgatcgcgccaaaatggagcgctgtaataccataagcgttcattgcaaccggaagaagaagcggcgtcatgatcaggatagtggcattaatatccataaatgttcccataaacaaaaataggatattaatcattaaaaggaaaccgcctttggttgaaatggactgtgtaatgaggtttgagaggaaaccagagactcccgtgagtgttatcacttttcctgcaataaccgaaaaagcatttaacaatccgatcacagctgttgatgcaccgctgatcgctgctatggtaaggaaatcgatcttgatcgctttcttatttacaaaccacaaaatcagataataaaaaatgccatataccgcacttaacgcaccggcttctgtaggcgtacagatgcctccatatatacatccgtatataataacaggcatgagtaatgctggaattgcacgaaatgtgttttttccaaactcttccagacgttcagttccacttatggaaactgcctccggctttggaagatgacgcccaatcctgcaataattaacagtgatatatccaaccataaaaataagcgtcggtccaatagtgaccatccagacatccgatattttaattcctgccgacagcgcgtacatgatccccggtacggacggaggaataaggatccccaaaaagcatgtagctgccagcaatgccgccacatagcctctgggatatttctctttttccatttgcggctgaacaatttttccaatggcagatattgttgccatagcagaaccggtaagtacgccaaaggccatggatgcaagaatggttatgattcccagacttcctcttaccctgcctataatacctccgatccagtttatcagcattttggaaatgccgctgtattccatcaatgtaccggcatatatgtaaaacggtattgccaggaaggaaaagctgtccagggaggaccatgcatactgtgcaaccgtcaccacatcatggcccccagccataaacacaaccatagaggcaattcccaatgcgtagctaacaggaatcacaaaaacgattgccacaaataaaaacgtacctataaaaaccaataatgctgttaatggtgtcatattttatccccctcccctcaatctacattaacagataccggccaaatattgcacaatatcctgtatactccatgccacaccgtaataagggatccaataagtacggggaaatatacaatccacatagggatatgcattgtctgggatgtctggcttcctccagctatgaacataatataattcccaaatacccagcaaaatccaaggagaaacactactgttatcaccagacctactgtttttaacagcagaatgatcctgtcttttgttgcagtgcttatccctttcaatgatttgataatggtaggcgctatatcaatctctatctgtcccccagtatggagcgcatatccccctcccagataagccatccacacaaacagataccgtgccaattcttctgcccacggggtagagatcagtaatatgtaacggcagacaacctgaataaaaatagctataacaagaacaatggtgcagaacgtaagcacaatcttttcaaaataaagaaagcagtgatttattttttcaaatacattcatataatgcgatcttgctgatatactttctcccatatacattccctctttcacacagctttaaaaccttattttttataatctccgctgatgatcatatccataatatccgctggatatttgccttttgattcttcccatatttcttcataaatcttttgcagcccagccttcatgtcctctgacggctgtgataccacccactgtccgctgtcaacaccactatttaccagttcatctgttgtattcctaaaatattccgtaaactctgctgatgctttcctcgcacactccgtaaacatgtccttatcatcatcgcttagagtgttccagaatttagggcttgatacaaaacagccgccggaatagcagtaattcagttcagtaatatactttataacatctgttaacccctgatttacatagttgaataccgcattatcaagcccgtctaccgtccctgtctggatagctgacaatacctcagaccctggaattgaaacaggaagggcaccgcatttctcatagaaggattctacagaagctacagaggggattctgatttttagtcctttcagatcagacatgtcagttatctcacgcttcatattccccacctgcctaaaaccattacaaaaagaactgattctgattatgttgttctcttccatgatctttgcagcctggtctgcaatccacccctcattataatattgatctgcctcatcatagtctgatacgagaccaggaagccatgcaaatcccagttttccatcaagaataccatcaattgacatatcatcgttcagattgaaatccaatgtacccatttgtatcatctgggctgtatccgcagcagagcccaatgaactggccgcaagaacctcacccacatacttcccctctgaggccatggcaacgtaatccacgaataactggcagtattctgcccgtttaggtgaatctgatgtgattgtaaatttaatagtttccccgctccgttcaactgcctccacattctgacctccacctgaagttgttggtacagcggcctcttttcctccgcatccgtacagtattgtgctggcaattgagattgcggcaatgagtgtcataatttttttcatttgaaagttcccccttctttgtaaaaatcattggataatgctacaataatcatctgtggtttcgtcattatagtatcacttaatggttatcttgtcaatatattttggtagtgttttggtataatttgattattttgtggttgtattatagttattttatgataatataaaaaatccataggctgggaaattccaccagtccatggattttttgaatcttattaatttcactaaacaataataatttcacagccgcattgccggatactctctatcatctcatcagacggaggctggtttgtaataatggtgtcaatctgttccagggatccataagattttatggtcacctttccaaatttagtatgatcaaccagcaaatatacctcctgggcacgattaactgcagttacctttaattcattatcagaaagaagggaattcataacaccatactgtacagttacgccggttgctgccatgaatgccttggtaaaattatagcttgaaagtatttccgcgctcctctcatcaatacttgtaaaggagtagtaatccctgttcaggatacctgaaaatgtgatgatctgaatattaggatattgcagggctcttataataaaatccagattatttgtcagcactgtgactttgagattctttatgtaatccaccagattacaaaccgtagaaccggaatccacaaaaatataatctccgtcatttataaattctgctgctctttctgcaattcttttcttttcctccagcatcaggtgtccccgcgtattaaacggaagcattccaacatcatagttctggatcgtactggaaacacccccgtaattctttacaatgctccccttcttctctaactctatcagatccctgcgtattgtatttttagacactccaaatttttcacacaactcttcaatcgtaacattctgtgctttctggatatatgcttcctcttgttcaatccttataatcttcatactgctcctcatttaaatcatattaacttcaccataatattaccaacatttatccaacctgtcaatgaaccgctataatataatgattttttgtcagttgtacataaattcatgaggcgtacacggtgtgtacgttgaataaattgatccacgtaacccttatcccctacctaaaagcttccggcgaactcaagacaaaacccacccaggccagcgtcaaagaccttcagggaatgggaatccagcctgacatccttgtctgccgttctgagcagcccctggacgaaggcaacaaaaacaaaattgcccttttctgtaatgttccccctcaccacgtactccagaaactggatgtggacgtgctttatgaagtaccccttgtcatggagcaggagcacctggcccagtcagcctgcgaatgcctgaatcttccctgtctcgaacctgacctgacggactggcagaatatgatcggtctcatcatatgcattttccatgcatgggattgcaagcaatatctttgccttttccagcaccacactggccatggtgggaatgttttcagcaatcacatccattccatcgttgtgcacaatgctggcgccttcctgcttgccaaggcccactgtcatcattttgcatggcccgctctcataagctccgctaaacgcattataagctccgctaaacgcattgtggggcttaagcctgcaggatatgataatgccgtccgcttcatatgcattcctgtcaataagcacccgtctgcctctctcagaaaccccaagctccaccacctccatggaggagcggatcgggcatcccatggtttccggggtaatatcatagcttgccagcacctccagctgtccctctgccgcagcgcccccatggcttcccatggccgacacgcaggtgaactttatctatgcatttatccccaccatcccctgccggttctggccatcaacaccatacatgccctgatctgcggcctgctgtttgccgggatcatctccgctaccatgtccagttccgactccgacctcctgggcgctggctctatatttgccaatgacatcaaaagaaaaccccagcgtagctgctctggggttttcgttttgtgcccacatggacatctgatttcttttgcctgattttattatatcaaacacttcttaataatcaagtatacttttcaaccgaacaaacggccgcttacttattgtttaatgccgcctgtgcagctgccagacgtgcaatcggaacgcggaatggagaacaggatacatagttcagtccaatcttgtggcagaactctacagatgaaggatctccgccgtgctcgccgcagataccgcacttcaggtctgcctttgtggaacgtcccttctcaacagccatcttaaccagctgtccaacaccttcctgatccagtcttgcaaatgggtcagactcgtaaatcttagccttgtagtaggaatccaggaacttgccggcatcgtcacgtgagaagccgaaggtcatctgtgtaaggtcattggttccgaatgagaagaagtccgcttcttctgcaaccttgtcagcagtcagggctgctctcggaatctcaatcatggtaccaatgtggtattggatatcggagttcatctccttcttaaccagttcagcagtctcaaccactacgtccttgacgtacttaagctctttcttctcgccaactaatggaatcataatctcaggaacaatgtcatatccgcactcttccttaacctcgattgcagcttccatgacagcccttgtctgcatcttagcgatttccggataagtaacagccagacggcatccacggtgacccatcattgggttgaactcatggagttcagcacacttggcgttaacagcctcaactgtcattcccatatcatcagccagagccttgatgtcctccggatcggtgggaacaaactcatgcagaggcggatccaggtaacgaatggtcataggtcttccctccagagccttgtacatggccttgaagtcgcccttctggaatggaatcagctcgtttaatgcttcttctctctgctcaactgtctcggacagaatcatcttacgaatcttcggaattctctctgcttcaaagaacatatgctctgtacggcagagaccgataccctcggcgcccagcttaaccgcgttcagggtatctgcaggggtatctgcgttggtgcgtacacgcagggttctgaactggtcagcccacttcatgatgcgctcaaagttaccgcttacagtagcttcctgtgtagcgatgtcgcccttgtagatctttcctgtagaaccatccagggaaatgtaatccccctcatggaatgtatgtccgccaagttcaaataccttagcctcttcgtcaatcttaatctcgccgcagccggatacacagcaggttcccatgccacgtgcaacaactgctgcatggctggtcataccgccgcggacagtcaggataccctgtgctgcgtgcatgccctcaatatcctctggggatgtctccagacgaaccaggataactctctcgcctctgccgcccttgccggcatccttagcctcgtcagctgtaaagtacaccttgccggctgcagcgccaggagatgcaggaagcgcgcttccgattacttcgccggccttcagtgcttccggaacaaaggtgggatgcagcagctggtctaaggacttagcctcgattctgcatacagcctcttccggggtaatcataccttcatctactaaatcgcaggcaatctggatggctgccggagcagtcctcttgccgttacgtgtctgtaagaagtacagcttgccttcctcaatggtaaactccatatcctgcatatcgcggaaatggttctccagctttatagccagatccataaattccttatagcactccggaaggtcctctgccagtttggagattggctgtggtgtacggacacctgcaaccacgtcctcgccctgtgcgttaatcaggtactcgccgtagattccctttgcaccggtggatgggttacgtgtaaacgcaacacctgtaccggaggtctcgcccttatttccgaataccatggtctgaacgttaacagcagtaccccagtcgccagggatatcgttcatacggcggtatacgatggcacgtgggttgtcccaggaacggaacacagccttaacagcgcccatcagctgttcggtaggattctgcgggaattcctcgccattcatggcatccttgtaaacagccttgaattttgctgccagctcttttaaatcatcagcagtcagatctgtatcaaaatgtacgccctttgcttctttcatctcatcgatgattttctcgaaataggactttggaacttccataacaacgtcagaatacatctggatgaatctgcggtaggaatcgtaagcaaatcttgggttgccggtcttctttgcaaatccctcgactgcaacatcgtttaatcccaggttcaggattgtatccatcataccaggcatggatgcacgtgcgccggaacgtacggaaaccagtaacggatcctctgtatcaccaaacttcttgccattgataccttccagccaggtaatggcctcaaaaatctggtcctgaatttcctgtgaaatctgcttgccacagttataatattcggtacaagcctctgttgtaacagtaaatccctgtggaatgggcattcccaggtttgtcatctctgctaagttgcagcccttgccgccaagaaggtttctcattgccgcactgccttcgtggaacttataaacccattttgccataagttaattcctcctcatgttcttgtagactggcattctacgctctgttttatgcctctcattctgaacggaacaaatatacatgtcttgtccgtccacctcgttcattatatcacaaagttttcgcgagtaaagagtttttccgtgaaaatttgttaaattttaaggtaaaatcgctgtaagtactttcattttctgtcattttcacatatccgttgcttaatcgtatatgcgaaccagcagtgttgtatgtacataacttttcggatagccctgcatcgtgcaaaaagccgaaccggattggcttccgtttcactcatgtaagctcttacaggtttttaagacacgggcctgtttcatgagaccttaaaacagccggactgaaatcataaatacagcatcggataggggagattttaacctccccttccacaccacgtagcgtaccgttcggtactacgcggttcaatagtttactcggactttcagatagtgggcagtcatatcgggataaccaagtctgtccactatgattcttttggtgagtgccgagttgagcattcccgccgctctccacactccctttcggcagttcgccatctcatgcaccttccactctggtaaatgtaacgcccgcaacattttatatcttgtgcgtaccttcttccattgtttccagtacaccgctcggattctgtggcgcagccactcatccgtctgttccatcaggcttttcatgtctgcatatcgataatagttaatccatccccttgcatagcttcggcgtttttcttccctctcctgattgctccatttgttccctctggttgtcagctcccgtatccggttcttcatttttgccaccgacttcgggtgtatcctcatgcggcatttccctttatgccggtaaaagccgtagcccaggtattttatcttgctgacgtggctcactgtcgttttctgaagattgactttcagaaacacttttcctgtgatgaatggcacaatgttttccatcgtcctctctgcgcttttcctgcttttgcacagaatcaggcagtcatccgcatacctcacatacttgtgtcccctgcgctccagttccttgtccaactcattcagcatgacatttccacataagggacttagcgggcctccctgcggcacgccctcggtcgttgcgtgaaatcctccgtcctccattactccggctttcaggtacttgtgtatcagcgagattaccctcccgtccttcaccgtcctcgacagcacctctatcagcttgctgtggttcaccgtgtcaaagtaggattgtaaatccatgctgaccacgtagacatatccttcgttgatatatttcctacatctttccagtgcgtcatgcgcccctctgccgggacggaatccgatgctgttgtcagagaactgttcttcatataagggcgtcagttcctgtgcgattgcctgttggattaccctgtctaccactgtgggtatccccagtttccttgtttttcctttctcctctttgggtatttctacccttcggactgggtttggcttgtatttgccttccctcacctgctcgaccaattcggactggtgttctctcaggtagggtagaagttcatccacctgcattccgtcaatcccaccaacgcctttgttcgttttgaccttcttataggcggcatttagattgtcgcttctaagaatcgtatctagcaggttgtccgtccgaaagtccgtgttggtgtcggggttcccggtaatcctttcatgggcgtactctcctgtttcccttccctgttccgcaggtatctctcgcaggtagtcctcaatatgaagttgtctgtacttaattccatgtccggtttccatttggtaacgacacctcctactgttcagtccttcccggtgcgtttgcgaccgcccggtactatgacctctgctgacttctcacggcaggctttactccgtgacagcgaatgttttatcgccactttcacgtccgtgagacctccccgggtactcacacgttctttcccacttatacctgccccgtttactgctggcgttccgtgcagttattggactttagtttgttaggcaacctcatccacgcttcacagcctatccggacaacttttacaggccagtggtttgcctccggcttccttcagaccccacctcacgatgacgcccttgccattggctgcacccttcccactgccgggcgggtcagggactttcacccgttagaacgtgcgcccgccgggcgcacccaaaaagaaatcccgtgtactggcatacacgggatttcgctttgtgtccaaatggacatacttaacttcctgctaaaatattctacaccaaatcaagcttaacgtcaatatcacaccttaaaccggtacccaaccccccatatcgtttcgatatactgcggtttggccgtgttaaactctatcttctcgcggatcttcttaatatgcaccgttacagtggcaatgtccccaatggactccatatcccatatcctgctgaacagctcctctttggtaaacacatggttagggttctgggccaggaaggtcagaaggtcaaattcctttgtggtaaaggttttctcctccccgttgacccacacgcgccgggccgtcttgtcaatcttcagaccgcggatttcaatcagctcattggccggctgtccgctgccaatgaggcgctcatacctggccatgtgcgccttcaccctggccaccatctcgcttgggctgaatggcttggtgatataatcatctgcccccagacccagaccgcggattttgtcaatgtcctcttttttggctgaaaccataatgatgggcgtgttctttacttcccgcactcttttacatatctcaaatccatccgtaccgggcagcatcagatccagaatcaaaagatcatagtcttccgtcagcgccttatccaggccggagcttccgtcattttcaatctctacctcaaagccggacagctccagataatccttctccaactccgctatgctctcctcatcttccacgattagaatcttgctcatcctgtaaaacctcctgatattttcttagaacaaaatgaatctccgttccgattccttccttgctggtggcccatatacgtcccccgtggtcctccacaatcttgcgcacgatggataaacctataccgcttcctccctgagctgaattgcgggaggagtccgtacggtagaaccggtcaaaaatattgggcaggtcctttgccgctatgcctttgccattatcctctatttcaacctggataaaatctcctacgtcctttatcctaatattgataataccctttttcttatccagatatttcacggaattactgataatattattcataacgcgcttcatctgctccgcatcggcaatgatgaccacgtcttcatccacataattgaaatatcccagctcaatccctctggcttccatatccaggccaacctcctccacacagtcccggaaatactgggccacgttgatcttgctgaaggtatagggaatcttattagtatcgattttggaataaaaggtcagctcgtcaatcagcctgtccatatcattagacttattgtatatggtacggatgtatttgtccagcttttccggcgaagacgccacaccgtccagtatgccttccacatatcccttgatagccgtaatcggtgttttcaaatcgtgggaaatattgctaatcagttccttattatccttgtcatactgtatcttgtcttccgcgttctccttcagccggatacgcatctcctcaaaatcctggcacagctggcctatctcatcatccgcgtccacatccagtgtgaaatccaggtttccgtcacgaatcttcttcgtagcctcctgaagcttgttcagcggactgagaatggaccggtatacccagaatgtcagcacaatgcccgcaaacaccagaatggtgattcccagtataagcatttcccttatcatggattttacttccggtatcaggtcatccacattggaaataatgaaagcgcttccctcctggccgtccggaaaggtgaaatccatctgcttaatcaggtgctggctctcgccgtccagatagatgccgccctgtaaatcgcccttcatcatatcaaaccggggcagctgggcgcatatggcttcccccgcgtctttattgctgtcaccgcagtataggatagtatcgccctttcgcacgatcagatatgcataatggcttttcagttcagcgttgaccttatccagatatgataaatcattgtagcgtcccggatcattgtccagtatattcctgatgtcctcctgggagcgcttggtaatacggttaaatatctgcatggaattgcctgagaacaggtccacctgctccgtaagtccgtattccttggtgaaagacctggtctgataattgctgagtgcaaggaccagcagataaaacagcagcatgggaacgatggttatggttaaaaacgccaccgcaagacgggtcctcagtttcataagccccatcctcctttgttatgatacggtctgacattatgagtactgcatcgtataagcttcatatacaatgcagtactcgcttccgtccggaaacaaagacagtctgtcatccgttattgctagtatatcacaataactaatattcgtttataaaaggtttctaaattttatgaacaaaagtcctgtttttccttgtttcctcctggatttctgatataataataatattgtccttataaagcaaggaccaaaaggacgaatgattggggttatattttatgataggattttacagctacacggttgtattgacatatttgggactggcttcctcggccataggcatgattctcaccttccagggatttgcaaaatacgctttgttctgtctggcgttctccggtctgtgcgacatgttcgacggcaaggtggcccgtatgaaaaaggaccgcactgaagatgaaaaacgcttcggaatccagattgattctctctgtgatgtggtctgttttggggcttttcccatgatactgtgctattccatcggcatgcggggaccggcaggcatctccatcctggtattctatctgattgcaggtgtcatccgtctggcattttttaatgtcatggaggaaaagcggcaggaagagactgatgaagcgcgcaagtactatcagggacttcccatcacctccatagccattattctgcccctgttctgcaccctgcgccccctgctgggccacaggttcctgtcagagcttcacatctgcatcctcacagtgggactgctgttcatcattaatttcccgctgcgcaaacccggatggaaaatgctgacccttctggtcgccattgtatcctgcgcactgattaagatatatttcttctgataataaagaaaggtgtgattccatgcaatatgcagacagaaccggccgttccctgggcggcagcaccctccaggaccgcttcctggaggatttatacgccagttttctgggacgaatgctcataaaaccgctggtccatccggctgtttccaaaatctgcggcgcttttctggactctccattgtcagcgcccttcattcccggcttcatgaagtctgcgggtatctccacagagggctgcgaaacacctgcaggcggaagataccgctcctttaacgccttctttacccgcaggatgctgccgcaagcaagaccctttgacgccagggaccatatattgtgcagcccctgcgacggatttgcaagcgtctatcccatccataagaacatgcgcatcactatcaaacacactgaatatacgctggaccagcttttaagagactcaggcctggctgtccgctacaccggcggcactgcccttctcttaaggctcactgtatcagattaccaccgctatgcctatgtggaccgcggacggcgctcctcttaccgccgtattcccggtgtgctccacacagtcaatccggcggcagcctgccgccgtcccgtctataaggaaaactcaagagagtattccctgctgcgctccggttccttcggcacagtgctgatgatggagattggagctcttatggtggggaaaattgtaaaccatcacaaggcttataccagcattgatgtgttccgcggtcaggaaaaaggctactttgcctttggcggttcctccatcctgctgctcttccagcctcataccgttaccattgacaggaatatcatgcgcaacacggccctggatgtggaaaccagggtacggatgggcgaagccatcggccaggtaatgaagtcaaattaatggagtcaaattatatggaatcaaatcagattaaacgaattcaaattacaaaacccccgcagttccttaccggaaccgcggaggttttttcttctgcatttcaatgcagcttccatttatcttttaaaacataaacttctcagcaaagtaatcctttaactcagcaatcggaacccttacctgctccatggtatccctgtcacggaccgttacggcatggtcttcttctgagtcgaagtcataggtaatacagaatggagtaccgatttcatcctgtctcctatatctcttaccaatgttacccctgtcgtcaaactcacagttgaaatacttggaaagctcggtgtaaatcttctcagcgccttcattcagtttcttggacagaggaagcacgcctacctttacaggggcaatggccggatggaaatgaaggacagttcttacatcgccttccccgatttcctcctcgtcataagccgcgcacaggaatgccagcgtcacgcggtcagctcccagtgaaggttcgataacataaggaatgtatctctcctttgtctcatcgtcaaagtaggacatatcctgtccggacaccttctggtgctggctcaagtcataatcagtcctgtcggcaatgccccaaagctcgccccagccaaaggggaacaggtactccaggtccgtggttgccttgctgtagaagctcagctcctcaggagagtgatccctggccctcagctcatcatccttgatgcctaatgaccttaaccagttaatgcagaattccttccagtaagcaaaccactccaggtctgtgtcaggcttgcagaagaactccagctccatctgctcaaactccctggtacggaatgtaaagttgccgggcgtaatctcgttgcggaaggacttgccgatctgtccgataccgaagggcactttctttctggaagttctctggacgttcttaaagtttacgaaaataccctgggcagtctcgggacgcagataaaccgtgctcttggcatcctctgttacaccctggaatgtcttgaacatcaggttaaactgacggatatccgtaaagtcatgggcgccgcagcttggacagcagatgttgttgtcatcaatgtactgtttcatctgttcctgtgaccagccgtcaacagagccttccatctggattccatgggcatcgttgtagtcctcaatcagtttgtccgcgcggaatctttccttacactgcttacagtccatcagtgggtcagagaatccgcccagatgtccgctggcaacccatgtctgggaattcatcagaatagcacagtcaacgcctacgttgtaggggctctccatgatgaacttctgccaccaggctctctttacattatttttcagttccacacccaggttgccgtaatcccaggtattggccaggccgccgtaaatctcagaacctggatacacaaagcccctgttcttggccaatgccacgattttctccattgtcttttccatatctgcatcctctcttcttaataattatagatttaatataaattaaattataagaattactttaatatgatgtaactggttccctcgccggacgtctgcacccggttggaatccttcaggacacagccatcgcttacatactggatttttttctccgtcacgatgacgccctgccctgtggccttgactaccaggttctgtccttccttaagggctgtctcctggcccactgccttccccttctcatccttaaaggacgcatccttaagttcaccggacatggcagccaccctgcctgtgtccagctgggtaaatgacacattataatccccaatctcctgagcaaattcaatgaggcggcccggagtgtcatattccgtaaccaatgtggctgttccgtttccaatcctggctgaaaccatggccaccggaagtttcccggagccttccgagttctcataggaagcagcctttcccagcccgctgttaaaatcactgattttctgtccggcccgtgtcttcagctcatcctccgtatagtcgccctgctggtaagtctccaccgaagcccacctgacgctgccgtcgtccgccacatagacgctgttctcagtaggttctgcatctccccccatacctatcctggagcatcccgtaaccatggcagccgccgctgccagcagcagaatccccttcacaatcttcttcataactgttccttcctcatacttctttgccgccgtaccgggcatatggacatattatatcctctgaataccataatttcaagccttatgacggattttatgctgtcagggtttccaaaatttccaaagaacggaactcatggcgcacaaaataccgtctgcttttttccacaacagactcgaattccttcagcacctcttccttcaggcaaaacttataaagggattcggacggtgagcagatgacatactcccaggcataatgacaggaatccgagacaggaaccggagggtcctgggtgtattccccgttgattaccatgctctttagctcgaaaatcctgcgcaccagccggttgggtagggcaggacgcaaaagagccctgagggactggtacaggagctttaacagctctgtgccgtccagattttcctgagcaaaataagccgcggtctccagaaaataggaaccgtagcaggctgcctccatgtctgtggacagcccgtcaaagtaattggtaatctgggctgactggagattgtaggcattcctgccctcataaaggctgaagtttccaaagcaaaaaggcctgctggccgccatcagaggattgccctgcttcctggcgccatgggagaatgccgtaatctttcccctctcccttgtaagcagcaccagacgcctgtcataatccccggagggagccgaaaggagaaccataccagtcagtgttactgtctctctcatttccagttttcccctcctctcagcatttccatccgaccttctgccaaatccctgtggtttttccaccgtcagcgttgtaaagccaacagttatccgcacttatgaatgagattttttctcatacttctttttgattatagccgtaattcttcagatacagctcgttgtcccgccattcctttcttaccttgacccacagctgcaggtttacctgcgtgtccatcatgctttcaatctctttcctggcctctatgccgatacgcttcagcatactgccgcccttgccaataatgatgcccttgtgagattctctctcacatacaatgctggcctcaatgtcaatcaggccgcccctgcgctccttcatcttctcaatggtcactgcgatgccatggggaatctcatcatccaaaaggcgcagcgccttctcgcgaatgagttcagaggcaatctgccgcatgggctgatccgtcaccgtgtcctcatcatagaactgcgggccgtacggcaggtatttaaagatcagctctgtcagcagatccgtattcttgtccttcagtgcagaaagaggcacgatttccgcaaaatcgcagacatctttgtaggccgcgataaaggtgagaatttcatcctggttctttaccgtatcaatcttgttgattaccagaatgaccggggtctttacattcttgagctgctccgctatatgacgctcgcctgcgccgatgaaggtggcaggctccaccagccagagtatcacgtccacttccttcagagtgtgctcagccacattcaccatatattcgcccagcttattcttggccttatgaatgccgggtgtgtctaaaaagataatctgtcccctgtcatctgtgtacacggtctgtaccctgttcctggtcgtctggggcttatcagaggtgattgcaattttctgtccaatcaagtggttcatcagagtggactttcccacattgggacgtccaatcagcgtgacaaagcccgatttcttctgtatattctcttccatttaactctctcttccttaaaattagtggtaaaggttcttcacctcaccgaacatgcccttctggacacgaatctgctcgtcattgccaatcacgcacagcgctttggtgtccagcacagcctgcacaatgtcagccagcgcctttatatcctcctgggtcacatccagaatctgctcccgttccttctgcaccatctcgtccgtcacgcaggaaagataggccgacaaattcctggaacccttcagggaaggcgtaagaggcgcatccacatcgctcatggtgccgataacatactttgtcatgtccctctcgtcaatggagaaattcctcagataatccggaattccttcatacacctggttggttgcctccaggttgggatccctgtaagataccaggcatccgtcgccggtgcggctgaagctgctcatgcagccgtaagccccgccctttacacgcaggttcatccacagatattcatagttcatgataacctttaagactctcagcgcccctgtgtattccagttttcttcctccggcttcctttcccgcaaagctgccgcatctggccacataatttacctgggacgctgtcttaaagccctcaccccggttatccggactgaactcaaattcataggtttttccgtctccctgtcccagcactgaccggaagatcttaagctccgcgggcagccggctgtagccttctgcgtcggccgtatatgccaccagcaggttatccgacgtgaacaggcgggagcacacatccttaagcctggcaatcaattgccctctgtaggagacatcctccgcgaacctgcggctgacatcctccagaaattgataatatccgattccgcctgtgatatcattaaaggcagctgacgcggagaaataggacgaagccctgccaaccgccgcaccgtggaaagcatcctccatcttcatcctggcccttgacctggtttcgtccagaatctctcccaggcgcttttcatcatccagcttggatcgggtaagaatctccgacagaatggagaaagcaaagtccagtttatggtacagcacctttgcgctggcaacaaacgctcccgtaaattgtccgggatgcgccgtatccggataagatgacaccgcaaagctcacgcctccgctgttgagataaatctcactggtcagatccccatagctgtaatgctccgtatccacatatcccagcactgccttcagaagtcccacataaggcagatcctccgccggcacccggctggtgtcaaacagcaccttcagatatccgattccggaggtaaacaggttgctgtggatgactgtcgctccgtcctccgccttgatctcataggaaaagcgtccgccttcccgttcaatatcctccctttgcagcataggaattttttccaggtcctcctgccgtgacggttcctcctgatactcctttaactgtctggtccgggcagccagggtctccagctcctccctgccaagggactccttatatgccttcagcttttcagccagattgcggtcctcctcagctgtctggttcaccctggggcgcactgtgatgaccgcctcatggggattatccagaaggtaccggtgtatcagctgttcaaaatacccttcctccactgcctttttcagatagtcaaaggttttctggtattccagatggagggtaggctttccgccgtacagccagctgtccagggaccacagaccgtacataaggcccttgggagcagagccgtagtccgcctcgcggtaacggaactcatagagattcagtccggccagcagactcttcctgtcaatcccctggtcggccagccttcgcagggtcccctttacaaccgcaaggaattctcccttctgctccgggttggcattctttgcaataatggaaaaatacggctgcagaatcccgcagtcatagcctcccaggatatcctgcccgatgcccgcatcaatcaatgcctgctttaaggttgcgcccggcgcgttaatcagcgtatattccaaaatctgaaaggccacataaagtaccggttccaaatccgtccccaccacagtgctgatggaaagataggtcctgtcctttgtcccttcctcctccgtgacagagtaggtgatttctctctggaccggctgttcaaagggctgctgcatggctatggcggagtccgcgtggcagtcctttctgtcataatgtcccagatattcctggtccagccatgtaagcttctgtgccatatccatgtctccgtagagatagatatagctgttggccggatggtagtaattcctgtggaaggcaatgaacttttcataagtgagttgcggaatcacagcagggtctccccccgattcattggagtaggtggtatccggaaaaagcacatttctggtaaaacggtccagaacgctttccggtgacgaaaaagcgcccttcatctcattatagacaacaccgttgatggtcagctcatcctccggtgactccagttcataatgccatccctcctgaaggaatatctttggctccctgtaaatagccgggtggagaacgccgtccagatacacgtccatcagattctgaaaatccttgtcattgcagctggcaacagggtagacggttttatccggataagtcatggcattcaggaacgtgttcagcgaaccttttaccagctccacaaagggatccttaaccggaaacttatccgacccttccagcacactgtgttccagtatatggggaagtcccgtactgtcatcgggcggtgtacggaaaccgatatagaacaccttgttctcatcctcattggacatcaggaatatcctggcgccgctttttatgtgttccagcaccatggccctggagtccatttcctccacgtacatctcctctgacacgcggtaagcggccagctcttttaccttttccagattccttccatctgccatagctttaatctctccattctatcgttcattcagtcatatcatactaactactattctgccatttttcccactgcccatacacagcgccctcacatattccccatgagcctgtccttcacaatggaagcacactctctcacgcacagatggataaacagaaccggatcagaatccgcagatatgccgtatacgttgtcaaatccccatttttccgctgtgagcctggcacggtaaatatgaaaattactggtgaggacccctatctccagcggcttatccggcgcaatggcatagggaaccgagcctgcctttccaggcatggggacgatttccttcttgtccttcaaccggtcctgctctatgacaatcttgctgtaagcaatgttttcaaccgtgctggtggaataggactccatcagcagctgcctgggacttacaccgttgtataccagataatcatacatgacctgggcctcgctgtctgtttcccccggtcccttgccgccagagagcaccaggatggtgtacggattttcctccgcatagacaatggccctgtccagacgctttttcagggaattgctgaccgtgtgttctttgaccctggcccccagcacaatcacataatccaggttggccttacccggcgtggctgcccccagaaacaccagaacacagaggattcccagcacagccacccctgcaatacaggtggtaaccaccgacaccggcacccagcggggaatccgttccatgttcctggcataataccaccttccatataccagaaatacaagcagggccgcgaaaaacagccatatgaaggcaaatgaggtgcttatgcccgcatacacaactatgattatgaaataaacgacacaaagcactgccagcccaatgagtactccatctaacataccaaggcacctcctgtctgccagagcctgcacggctcaggcgcagcttcttcctcccgaattccggacggtccaatcctcagtttcctctaatccccggatttatctaatcctctctctcttcttttctgcgcaggatatcataagcagacacatctgacgacagctttacccacagagtctgctttggatggggagcgctctcctgcgcattgccctcttcgtctgtcatagactccactgtcactgtaaggttctgtccgtcgggcttcatgacctcgatggtctccccaaccgaaaatttatttttctgttgggtcctgcaccggcccaggctgtccgtctcttccacggttcccaggtaagtgtagctcttcacataagtgctgctgtcatatatgtggtcatccgcagtgggctttccgaagtaaaagccggtggtgaacctgcggttggtgcattttcctatctcttccctgtaccactccagattctccctgtacacggccggatcctttaaatagtcgtcaatggccctgcggtaggctctggtgacagtggccacgtagagggctgtcttcatccttccctctatcttgaaactgtcgattccggcatccatcatctccggtatatactccaccatgcacaggtccttggagttaaagatgtaggtgccccgctcattttcatatacaggcatgtactctcccggcctggtctcctccacaagggaatatttccagcggcagggatgggtgcaggcaccctggttggcatcccttcccacgaaataattgctcagaaggcatctgccggaataggaaatgcacatggcgccgtggataaagctctctatctgcatatcctggggaatgcggtcccggatttcccggatttccgccagagacaactcccttgcggacaccacccgccttgcccccagtccatgccagaacagataggtcccgtaattggtgttgttggcctgggtgcttatatggatctccatgtggggaagaactcttctggcaatggcgaacacacccggatcggatatgatgagcgcatccggcgccacatccctcatctcttcaaaataagcctccacccccggcaggtctccgttatgagccaatatattggccgtcacatagactttgaccccgcgcgcatgggcaaaggcaattccttgtttcatctcttcattggaaaaattatgggccttggcccgcaggccaaaggcctctcctccgatatatacggcgtctgccccgtaaacaacggctgttttcagcacgtccaggcttccagccggtatcagcaattctgtcttcctcattccactctctccgtatatttggtgctgacagcaactccgtcccctatggggatgatggctgtctccagccccttcctgtgcttcagctcatacagataccgccgcatcctgctgtggatggtcctgttcctgcgctccactgcaaatctggattccacgatatccccatcctggagaacattgtctgatatgaggactcccccgtcaggcatcagctccagaatcatgggcagccagtgcagatactggcctttggcggcatccatgaacaccaggtcaaagatctggcccttaagtccggccagcagatcatctgcatcccctgccagaagggtaattcgcccttcctcgccggctttttcaaaatgttccagggcctcggggatccgcttttcatacttctcaatggtggtgatgcggcaatcttccggcatcacacggcacatgagaagggacgagtatcccacggccgttcctatctccagtatacgcgacggcctgagggccgccaccagggttcgcagaagggctgctgtttccctgcgtatgatgggtacccggtcccttaaggcttcctgttctatggaatccagcaggctgccctggctggattccagggaatttatataatccgtaatcctgtcatttacaatcattgggttccatcctctgccgcgtcctcaatccatccgccttccatctcctggtcctcgccttcataggtctgctcattggcctggacctcctgggcgtcaatggcgtcagtccctgcctgagacccgggcgccgcgtcagccggtacacccgcatccgtctcagcagccgcggctgcaccgtcttcggatgcagctgcggtctccggggatgtctcctggccggaagcggcgctgtccccattttccccctcagatgtcctgccctgggcagtcttggcctcggctgctttggcacctccggactgggccggtttcgcgctgtcttcggtttccggcttctcattgagcagctggagaatttccttggacgtcatggatgtattaagggtataggtgcccggatagattgtctcatagtcatagaacctgctctggaaaataaaggcaaactcgcttttaataagccccttatgcgcaagaaactgcgctgcgtcagacacggattcctttgaatcaatccggactaccatatcctgtccgggggcctcatccactgcctcggcaaagaatatctcatggccaaaggcatagcccctggcaaccgcctcatacagcagcaggataatcagggcatataccatgagcttcacggatatgctgattatggtggttgtgattttgttgatttcccttgtcctattgctcataatccattcctcttatcctgcccggcgtcttcatgaccgcggtatcccggaccggatccgctgcctgcgcggcagcacgccggtccggtatctgttatacctccatgataatcggcagaatcatgggattgcgcttcatgcgcttccacaaaaagtcacttaaactgtctttaatgatattctttatcttaccccagtcgctgacatggcggtccaggcagtcctgcaccgcgtcatacacaatggtgtgggcttcctccagcaaatcctcggattcccgcacatacacaaagcctctggacacgatatccggacccgcaagcagctggttgctgtgcttctctaaggtcaatactactacaataataccattttgtgcaaggttttgtctatcccgtaatacaatattgcccacatcgcccacgccaaggccgtccacgaagatgcctccgcaggcaacatggtctatcacctcgcagctgtccccgtccagggcgaccacgtcgccggagttaaccatgacagcattttccttctgtacgcccatgaactgggccagctccctctgggccatacggtggcggtactcgccatggatagggatggagaacttgggatgcaccagagaataaatcagcttcaggtcctcctggcaggcatgtcctgaaacgtgggtatcctggcagattacctcggcgcccttcatggacagctcgttcaccacattggccactgccttttcattgccgggaataggtgtggagctcagcaccaccacgtctcccggcacaatggataccttcttgtgaatgctggcggccatcctggaaagggcggccatggactcgccctggcttcccgtggtaataagcaccgttgactccggcgggtagtttttcagatgttcaatgtcgatgagggttccctccggcacgttgatatatcccagcttgctggcaatatccatgatcgtcaccatgctgcggccttccaccacaaccttgcggccgtatttatacgcagtgttcaccacctgctgaaccctgtccacattggaggcaaaggtggcaacgatgatgcgcctgttctggtgctccgcgaatatggcgtcaaatgtctttcccacggtacgctcggacatggtgaatccgggacggatggcattggtgctgtctgccatcagggccagcacgcccttcttgcccagctccgcaaagcgctgcaggtcaatgggatccccaaacaccggcgtatagtcaatcttaaagtctcctgtgtgcagcacggttcccaccggcgtaaatatggccagggcggatgcgtcctggatgctgtggtttgtcttcacgaattccactctgaaacatcccaggttcacggactgtccgtgcttcatcaccttgcgtttggtgttctttaagaggcggtgctcctccagcttatgctcaatcagggcaatggtcagctttgtgccgtatacaggcacattgacctgctgcaggatataaggcagggcgccgatatggtcctcatggccatgggtaatgacgaagcccttcaccttgtcaatgttctgctttaagtaggtcacatccggtattaccaggtcaatgcccagcatgtcgtcccccgggaaggccagtccgcagtccaccacaatgatgctgtcctcatactcaaaggcagtgatgttcattccaatctgctcaagaccgcctaacggaatgattttcagcttgccccttccatcctttcttccgtcccgtcccttctgcctggccggcgcgggaagcgcctttgattcgcaggaatttctggccgccttggactcccctgaatttctggatgcctttgggctgccggttcccttggaggtccttgcgccggtgctgtccttggacttactggcagcggttccggtctgggcctctcccttttgtccggccctgctctttgcctgtccctgtctggagcccggatttttctgggcttccccatttcctccctgttccttggaagcggtctttttccgggccggtctcctgttctggggctttttggcaggctgctcctgtggggccgctgttcctgccgtctcccggacgccggcctcctggacattgttttcctgtacggcctgaatcgttacctgtgcagctgcctctggcgccgcctctgccgtattctctttttcttctaaattcaaattgattcctccaatctttctttctatctatttctcaaggtccacatctgcatcgcttaacagttcttcaaacactttcatcagtgcgtccagttcgctgtcgtcttccacaaactcatacacggcctcagcgtcctgctgtcctgacatatccttaaggatatagcactctccgtcctcaccttccggtgcgtctgtcacaagcagataactccttgcatttatccttgtttcttccagcacataaaaatccacggattcccctgaatccgtcaccatggtaatcatattttctctcgtcttttcttccatttcttctctcccggcgcctgtctgtcccgcctgaggggaccggctgttttctccatgtcccaattacatcctaaatatgctgcaggctgtccagatatccctgcagaatcatggctgccgcaatctggtccacgcttttctttctgttttccctgcgcactccgctttcaatcagaacccgctctgccgccactgtggtgagacgctcgtcccagagaatgacctcaagaccggtacgccgttccagggccgctttaaactcccgggtcttctccccgcgctcgcccactgtattgttcatattcttaggataaccaagaacaatgcattcaatctcgaattcaccaattaattgctcaatccgcgcaagggtctgacgcatcttattctcgctggccctggtgattgtttccactgtctgggcagtgatacctaaaggatcgcagactgccaccccaactgttttcgagccaaaatccagacccattatcctcatattcaattcctccggtaaacgcaaaaaatcggaatgcaccataaaagcagctggcctatggccaactgaatgcatcccactcatatccatccgtacattactgtgaaggccctttcccgggccttctgttattcacgccgcatatcctgcctgcccgtggcgggccggatgcccctggagcgcccctgcagattgccccggaaccagtctgaaacagttcttatttcagacgggcatcaatatacacagccatcagttcctccagaatctcatcccgttcaaccttcatgataagacttctggcgcctttatggctggtaatataagtcgggtccccagacatgatataacccacgatctggttcacgggattataccccttttcagtcaaggcaatatatacctgctccagtacgtcgcttacttctatctttttgtcctgaacagcttgaaaatattgagtatcttttatattgcccatgtcatcacgtcctttaagtattcttctctattctacattatattttgctattcggcaatagattattttcttaattttttctaattattgtcatgtttctgtaaaatgtcgcacaatctttccgtcttttcggaaatatgttcctttttttaagaaaattctacctttaaaatctcatcattcaaaaggccggaagcagaaagctccatgatgcccccggccagctgctccctgtccattccatcctccagcggcagggctgccctgacatactgaggggtgcggcctatcatataccattttcccccaatctcagtctcttcctcaaacaggaccgatatccggctccccacaaaacgctccctgtactcacgggacatggttctttccagttccagcagcacgtcactgcgccgcgcctttacctgctccgaaacctggtccttcatgacagccgccttggtaccctggcgtttggagtatttaaaaacatgcatctcataaaagcgcacggtctccagaaaccttctggtgctctcaaactcctcctctgtctctcccggaaaaccggcaatcacatccgtggtaatggccggatggtcaaaggtctccctgagtatgccgcagcgtctgagataatcctccgtggtataatggcggttcatccgttttaacgtggcgtcgcagccgctttggagggagaggtggaaatgaggacagaattccggcaggccggccagcttcccggcaaattcctcggtgatgattctgggttccagggagcccagacggatgcgctttaatccctccacccggtgaatccgctctatcaaatcccaaagcgggccgctgtcccagtcgccgccctttaccgggcttccttccatatgctccgttccgtaggagcttaaatgaatgcctgtcagcaccacttccctgtatccccgggccaccagtccttccacctcagccaccacgtcctccggcttccggcttctgaccctgcctctggcatatgggatgatgcagtagctgcagaattgattacagccgtcctggaccttgataaaggccctggtgtgttctcccaggcggcttacatgaagctcctcatactcctgatcccgggcaatatccagcacatagccttcctcatttccctgcctgtccctcatatattcttccagtatatccgccagacgcgccttattgttattgccgataatgatatccacgctgctgtcttccttcagggcatcggacgccacctggacataacagcccgccgccaccaccacagcctccggattcagcttctttgcacggtggagcatctggcgggatttgcggtccgcgatattggtcacggagcatgtattgataatatagacgtcagccttctggtcaaagggcacgatttcataaccgcgctccgccagctgctgtttcatggcctccgtctcataagcgtttactttgcatcccaggttatgcagggctgcttttggcattgtaaaacctcctgttcacggtctgtcacgaccctttatgcggggcatccgccctatggatctctaaccaaattaccatattgtttctgcgtttttcatgcaatctcactattgacttttagtccccctgtctgtagtattaaagcaaagcaggattcactgcaaacataatccatacacatataccacaaggagggtttttctcatgaaaacagttcgtatttcgttaaattccattgacaaggttaagtcatttgtaaatgatttatctaagtttgatgttgattttgatttggtttccggcagatatgtgattgatgccaagtctattatgggtatcttcagcctggatttatccaagccaatcgacctgaacattcatgccgagagcggcgttgatgacattctggctgtcttagcaccatacatcatcgcgtaatctgctgattcatctttcgctgcccgggcagcgggacaaagcacatagaccatcagaaaccatcagagtctgccgaggcagactcttttttgtgtttgtttccaggttgtacctgcatattttacgttttttgcatttacccctgacagagaatctgttccgtggtctcaagggcagtctccaccagctggtcgattttttcctccaggcggcgctccgagctgtgaatcacattaatgttgggctttgtcaccggatgcttggccacgaaaatggtgcagcagtcctcgtagggctggatggatgtctcgtaggtgccgattttctcagacacatccacaatttcctgcttgtcaaaaccaatgaccggccggaacaccggcatggtgcacacctcattggttgctgcaagggactgtaatgtctgggaggccacctgcccgatgctctcgcctgtaatcaggccgatggagccggtgcgttccgctatggtctgggcaatccgcatcatatagcggcgcatgatgatggtcagttcctcgtgggggcacttatcgtaaatgtagagctggatatccgtgaaattcaccacatggagattgatggggcccgcgtatctggccaccaggtttgccaggtccgccaccttctgctttgctctctcgctggtatagggcggggcatggaaatacaccgcgtctatcttcacgcctctcttggcaatcatgtagcctgccaccgggctgtcgatgccgccggacagcagcagcatggctctgccgttggttcccacaggcatgcctcctggtccgggaatcatcagggaaaacaggttgactctctggcgcacctccacatgaagaatcacatccgggtgatggacgtccacgcgcatctggggaaacgcttccaaaatcacctctcccatgtcgcggttaatctgctccgaggtcacgggatactgcttatcccccctgcgggcatttaccttgaaggtgatgttcttatccggataaacctggtccatgtactccaccacatgttttttcaggttctcgtaatccttatcctcaatctgcaccatggggcagatatccgcaatgccgaatacccgcctaagggcctccaccgcatcgtcgtaatcatagtccgtctctgccttcacgtagatgcgccctgattccttggtgacgtcaaactgtccctccacgctctttagcgcatagcggatctgctttatgagggcgtcctcaaacatataccggtttttgcccttggtgccaatctctgcgtatttaattaaaaatgactggtactgcatcttttacctctttctatcgcttaatcgtccgcctggttatcctgcgtggacgtttcatttacatgtatcagcctctgtggtactttctcagtaccggcagaagctcttccaggacttccatacagtaatctatctcttcctttgtgttgaacacgccaaaactgaacctcagcgtagaatccaacagttcctgcctgactccaatggcctttaaggttccgctgattgccggatggttggaagaacaggcggatccggaagaaacatagattcccttgtcctccagggcatgaagaaggacctcgcttctcaccccttgaaagcttgcgctgacaatctggggcgcgctctccattcccttgcggctgttgacggtgacacccggcagcgacgccatgcggtctgtcatgtaatccttcaggccggtgatgtactccaccttctgctgatggtccgtgtaaatttccctggccgcctggcccatgcccgcaatgcccggaacattttccgtgcctgaacgcatatccttctgctggccgcctccgtagagaaggggacgaatcttcaccctctcgtcgatgtagagaaaccccactcccttggggccgtgaatcttatgggcgctgacagacaacaggtcgattccctgcttcttcggacgtatggcaagcttgccgtatgcctgtatggcgtccacatggaaaaggatggaaggattcttcccgtggacaagggatgcaatctgttccaccggctcaatggcgcccacctcgttgtttacatacatgatggataccagtatggtgtcctgacggatggcggattccagctcctccagtgatatatggccctggctgtccacagacagatatgtgacctcaaacccctgctgctccagatacgccagggggttgtaaaccgaggcgtgttcgattctggtactgatgatatgctttccggctctctggtttgccatggcagtgccgataagagccatattgttggattccgtgccgccggaggtgaacaggatttccttatccctgacctttaatgtcctggcaatgtccgcagctgcctgacgcacataccgctccgcctccattccctttctgtgcttggcggacggattgccgtaatcctccgtcatggttttcaccacaatatcctttacgctgtcaaatacacgcgtggtggctgaattgtcaaaatatgcttccattatacaaactcctttacagcgccccttccagccgcatcataagtaccgacagcacggccaggcccgctgtctccgtcctcagtatcctgcgccccaggctgatgggccgcaccccctttgaaagggccagatctatctcacgttcatcaaatccgccctccggaccaatgaacacagcaatgtcctgccccggcccaagggtgtctaattccgcctttgtgccggccatcccctcctcatgttcatagggaatgagacgcatggaaaagccccggctctccacatagtcaaaggcttccttcagcgtcatgacgccgcatacctgcggaaccagactgcgcttggactgcttggcagcgctctctgcgatggcctgccaccgcttgcgcttggcctcttcctttttcggctccagcttgaccaccgtgtttctggtggacaccggcacaatgccggccgcccccagctccactgccttctggatgatgaattccatcttatcagatttgggcagtccctggaagagccagattctggaaggaagctccctcccctcctcctttgtctcaagaatccgcaccgcgacctcctgtccggcgatttcttctgcctggcacaggtaatccctgccggtgccgtcgctgaccagcattttctccccctgccttacgcgcagaacattctttatgtggttcacgtcagggccggttatccgtatcaggccgtcctccacctgttcagggttcacaaaaaaatgatgcatggctttccctcaggtccttcctcattcatcctatttccttctggcggtcacgctcacccattctccctggtatgtgatttccaccatttccagctcccggcagcgtgcaaacgcctccttcaccgcttcctccttcatatcaataatgccggaggtgatgaaaataccgccctttttcaggtgggcaggtatctcgtccaccagcagaatgatgacatctgccagtatgttggccaccgccacatcgtacttgccgtatcctgcccattcctttacggaaagctgatctatgatattcccttggagtacatgaaacctgtcctcaggaatgctgttggcttccaggttctctcttacggcgttaatggcattttcatccagatccgtgccccacacctctttagcccccagtttcagggccgtgattcccagaatgccgctgcctgttcccacatccagcacaagggtgtcccggttcacatacttcttaagctggcggatgcacagctgggtggtctcatgcataccggttccaaaggcagtacccggatcaatctgcaccagaagcttgtccttgtgctcctccggtatggtttcccaggtaggcttaatcagaatatcgtccactgtaaagggcttaaagtactgtttccagttgttaatccagtccttgtcctctgtctccgacgcggtgatagttctggcgcccagctccgcaaatggcgacagctcgtccaggccctcttccacccgtttgagataatccgccacatccgcgtcatcatccaggtaaaagcttatcctggcaaccccttcgtccggaggaagctcaggaaggatgtcaatgaacattccctttgtctccttctccgtcaggggcacattatcctcgatttcgattccttctataccaatgtcgtcaaacatgctgctaatcaggtctaccgcctcagtggtggttgttaatgtaaattttttccatttcatatgattcactcctatttcctatgcgccgcttactattttaataaacaataccccaagcaccatcaggaccacgggacggaccaccttctgtccgtcgtgggccaccatgcctgccccgatatagtgtcccgcgatggaacagacgcctgccgtaagccccagcgggtagcagacatttccagtggcaataaaggtcacaagggccgcaatattggaggaaaggttgattacctttgtctgggcggaagcgctgcgggcgtccagcccggcagcccctgtgagaataagaatcaggaaggttcctgttccgggtccgtaaaagccgtcatatccccccacaaaaaaggctgccgccatgcagacggcaaacaccttgtttctggaaatatcatccgtcctgtccctcgctcccatatccttgttcctgagcacgtaaaacgctgcaacgggcagcaccacaatcatcatgtgcttaatgacggattccggcaccatgagggccagatgggctcccagggccgagcctgtcagggctgccgccgaggaacagaccgccatgaacacctttcccttcagaaaaccgtgctttgccaggcgggccgtggaaacagtggtgcccagggctgagctgagcttattggtacccagtgccacatgggcgggcacccctgcaataagatatgcaggcaaggcaataagcccgcctcctcctgcaatggaatccaccagtccggccaggaataccaacgggcacacaatgagatattgtaacatgattgtatcctcttttctgtaaaacaacctttatattatcacataatatgtacactggcaataagcggcaatctttttttgcaataaaaaatccccgccccgcattaacattatgaacggatgaaagaaagatgccggggcaggagcgggcagccgctaaagccccaggggacagggattccggaacatacaatcataaatcaaaagggcggcaaagagccgcgcgaaattccaacattgcattacactccatcacacacataccggatggaacggctcccaggcattgaaccaagatacaaaagagagggattaccatacagttaccatataaataaggatacgaaagaaaaaattgcttctggtcttaaatttaccatacgacaaaaatcaggaaaccccggctcctgcttgccacaggcgccggggttttctccgctactgaatcaaaaccccgtccgctcccaccacatagccgtccggggttgtggtgtttacaagcaggcgtcccatggtcccgtctgactgggtattgaaataataaagctttccgtctatcatctgccagcctgtgcgcatcatccccagggtaccgtcatccaggggattcagataatagcggttattgtcgctgtccgtaaaccacccggtcagcatatatccattttggtcaaagcggtaccatctgttatgtatgagctgccacccccctgacagccagctgccgccatagagctggaaccaccagcctccgggactgtatctccagccctggccgtactgtactccggggcctccgttgtaataccaccagtcatcctcgtcgtcccattcatcccagtcgtcccaataatcgtcattgggatcccaccagtatccgggggcaaactgggcagtggacgtgtccggcacattagagttaaagccgggataagccctgaccgtattatccgcggtgacctgggcattgccctgaggcgccgaagggccgccgtaatcgtaggttcctgacggcgccgtcccgtaatcatactccactccgggaccgcctctgcggtaatagccataataccaactgtctcccggcccataggccagacagtcctgaaccggcaggacagacagcgccgtcagggccgccagcaaaaacggcacgcaaattatccttctcatattgttctcctcttttgacttagagcgtttctgttttcattcccatgcatatctaagagtatatcacaacacgattgacattttcaatacatgagcatacaatagttgtatgtgcaactattgtgattgcaaatgaaacaatcaatgaaggaggattccggaatgaaggaatttttatcttatctgaagccctacaaaagggatgccgtcatggccgtcttctgtattgaagccgaaaccgtgtttgagctcatcatccccctggtcatggcttccattgtggatgtgggcgtggtcaatggagacaggcgctatatcctgatgaaagggctgcagatggttctctttgcccttatctcccttgtgctgggccagggctccgccatgttctcggcccggtgcggccagggactgggagccgaaatccgcaaggcggagtttgcaaagctgcagcagttttcctttgccaacacagaccatttcagcagctcctccctggtgacccgtcttaccagcgacgtaaccaccatacagaactccgtggccgcaggcatgcggcccgctttccgatccccggtcatgatgctcaccgccatggctgcctccttttacatcaatccgcagctggccatggtgtttctggtggctgctcctgtcctgggtgtgctgctgtttttcatcatcagccatgtgcgccccctgtacagcgtaatgcagggcgccattgacatggtaaaccgcatcattcaggaaaacctggccgccatccgtgtggtgaaatcctatgtcaggggcgatcatgaaatccggaaattcgaggaggtcaattacaatctgcggttcacggcggaaaaagccttccgtctggcagtcttaaacatgcctgccatgcagttagtcatgtactccaccatcctgtgcatcctgtggttcggcggcaggctggtcaccataggcggcgtgaaggtgggtgagctcaccggtttcctgagctatgtcctgcaggttttaaattcactgatgatgttctccaatgtgttcctcatgaccaccagagccctggcttcctggaaacgtatctcggaagtcatggatgaggaaatcgacatcaaggaggacggatccagtcccctggaagtggagcatggcgatatccggtttgagcatgtgtactttaaatacaaccaggatgctgccgaatatgtgctctccgacatttcctttcatataaaggcgggacagaccgtgggcatcatcggacagacaggcgctgccaagagcacgctggtgcagctgattcccagactctatgatgtcacgaatggcacggtatatatagatggccgcccggtccgggaatacccccttaagggactgagggattctatcgccatggtgctccagaaaaacactctgttttccggcacggtaaaggataacctgcgctggggcagggaaacggccacggaccaggaaatcgaggaggcctgccgcattgcctgcgtggatgaattcatcgaccgcctggaacgcggatatgaaacagagctgggccagggaggcatcaatgtgtcaggcgggcagaagcagagactctgcattgccagggctatcctcaagtctcccaaggtgctgattctggatgattccaccagcgcggtggatactgccacagaggccaaaatccgggacggactggcaaagagcatgccggatacaaccaaaatcatcattgcccagcgcatatcctcagtggcccacgcagaccaaatcattatactggaggacggacgggtgaacgcggtaggcagccacgaaaccctgctggcttccaaccagatttatcaggacatctatcattctcaacaggaaggggcgaatctgtaatggcaagaatagcaaattataaccgtcccaaggataccagacgcaccttaaagcagatgctcagctatctggggcggcacaagtggtatatgctggttatcgccctcctggtgacaatcagcgccctggccagcatattgggaacatacatgttaaaaccggtcatcaaccgtttcattctcccgggagacataccggggcttgtgaaaatgcttctggtcatgggagcgctgtacctgtgcggcgcgctctcctgttatgcctacaatcagatgatggtccacatttcccagaaggtggtgaacgaaatccggtccgatttgttccggcacacccagcgccttccccttacctactttgacgcccatacccacggggagctgatgagccgtttcaccaacgatgtggacaccatcagcgaagcccttaacaacagctttgccatgatgatacagagcttcataaccataacaggaaccattaccatgctgctggtgctggactggcgtctttcccttattgtcatggcatttctgattctcatggttctgtttatccgctataatggaaaaaggagcaggaagtattttacccagcagcagaaatacctgggcagcatcaacggctttgtggaggagatggtggctggccagaaggtggaaaaagtattcaatcacgaggcacaggactacgaggaattctgccgccgcaacgaggcattccgaacagcggccaccaaagccctgacctattccggcatgacggttcccaccatagtggccctgtcctatgtaaactatgccctgtcagcctgtgtgggcggcctgtttgccctgtcaggccttacggatttggggacactggcatcctatctggtgtatgtgcgccagagtgccatgcccatgaaccagtttacccagcagataaactttcttttggccgccctgtcgggagccgagcgcatttttgatatgatgaacgagacccaggaactggatgaaggcacagtgacactgtgtaatgtgcgaaagaatgacaatggcggctgggaagaatgcagggaatttacccactgtttcgcctggaaggtgccggatgaggattcggttgatacggcgcagacccataccggctcccaatccggcttccgtctcattccccttgagggggatgtgcgtttcaaccaggttgtgttcggatacacgccggagaaaaccatcctgaacggcataagcctctacgccaaacccgggcagaaaatcgcgttcgtaggttccaccggcgcaggaaagaccaccatcatcaatctggtgaaccgtttctacgaaatacagcagggaagcataacctatgacggcattgacataaggaccattaaaaaggacgatttgcgccgcagcctttccatggtcatccaggatacccacctgtttacagggaccatagcggacaacatacgttacggacggctggacgccacggacgaggacgtggtaaatgcagccagggtagccaatgcgcactccttcatccgccgtctgccccagggttatgatacgccccttcacagcgacggcgccaacctgtcccaggggcagcgccagcttctggctattgcgcgggcagccatctcccgccctcctgtgctgattctggatgaggccaccagctccattgacacccggacggaaaaactcattgaaaagggaatggacgcgctgatggaagggcgcaccgtctttgtaatcgctcacagactgtccacggtccgcaactccaaggccattatggtactggaaaagggcgaaatcatagaacgcggaagccacgatgaactcattgaccagagagggcgttattataaactgtacacaggccagtttgaactggaataaagaaaggaagcaagaaccatgatgaaacaagaacaagtacgccgcctcctggtgagagcggaaagggcaagaaaacatctgatgcagccccatttcacccggattggcctaaccttcggccagggccacgcccgcatcctggatgtgctgctggcccgggaccatataacacagaaagaattgtcagatttctgccatatggatgtgaccaccatgtcccgttccctggaccgtctggaggaatccggctacctggtaagagaaaaagatcctggatgccgcaggtcctatctgatttgcctcaccggtgaaggggtggcagaggcccataaggtacgcagggtactggaaatggtggatgatgttatatggaaaggattggggcaggatgaaatggaagcattctgcggcaccatggaaaagatatgtgaaaatctggaacagtgtgatttcaaatgggatgacgaaacataaagcaataactactgctccaggtatgcgcgaatattgtccagcacctttttgctgagcaaatcaaaggcctgttttgtcctgcctgctgagatgcgtgcacagaatacgcccggatgaccaagcagttctccggtgctgtctcccagggctccctctgtatcgcagatgaagtaattatttccctgatccagccatgttttcagggcaggaaggtcgaatgccggtccaatggaggtattgaacaggagctttccctgccccagctgcctgaattccttctcatgaagcagaatcacatttttattcaggcaggcaaagaccacctcgctgcggtccagcagttcctttaagggcctgtaagtcatcccctggtcttctctgtcctgcttcctggaacggctgtaataggacacatccgcccccatgaacttcagggcatcggctatcattcctcctgatacgcccattccgatgatacccacctttaaatccgtgatttcaacgggcatatcacgaaacatgggacggtcaaagccgtgaaggaaacgcaccagctcactgagcacgtattccaccacccccctgtcgccgtaatccctgattccaagcactgtgatgccccgttccctggcacaggcaatgtctacattggcgctttcctcagaatagaggctgcagcacatgccaatgtaccggatggatgggcagctctcgatcacatgacggctgattctggatgtgtagcttaccagcaccgcgtccgcgtcaccgatacgccggatgatttccccatcgccggacggcacatcctcatgcaatgttatctctcccgcataccggtgcagttcctcctctgcgctgggtatcaggctcaccggctcaatagccactaatttcttaaacatgtccatttcctcctaaaatacgattggtgatacaatattctgtaaaaccgccaccacgctccagccggcaatggcgctggtgctggaataaatatccacaacagccttcactccttctatctcggatgtgatcttatggtcatccccaaccatgcctggaacgctgtatatatccgcacgggtatcctccggccccgcggtcacaagggatgaggccacagccacatttaccttggtaggcaggagggaaatggcttcctttgcgctgccgtgaaatacatggctctccggtccgtcctccatcaggcgctctacaaaaagcggggttccctttaaggacgccggtcctttccttgtcctgatgcctgcctctgcctgccccataagggatatggtccgcagcacatcaaatcctcccaccgcaccggacgcaatgtacaccctggttttgtggccggcagccgcggcctttacctgtccaaaaaattcatgatccgcaaatgctccgatggacagcacaatcatgccggccccggattccagaatcttcactccgcagtcctttacagactggaccgaggctgcctccgcaacatagtcaggggacagcgccagaagctcgtctatggtgccgcatgcctgacacccgcctttttttgccagaagctctgtcttttccctggtcctgcccaaaactcccaccagctcatattcatccagcattcctttcagaccggcttccacaataatatcggccagatagccgttgcccagaatacccagttttaattttcccatcataacctcctaaaacaagggctgaacgctccctaaaagccttcagccctccatgccttatcatcattatggcttagtttgtatagttatcaaaatatccctgaaccaaaatgaccggtgtacccttatcgccggaaccactggtaaggtcacaaagtgatcctatcagatcggtgagtcttctcggcgtggttccctgggatgccatgtcgcccaccagatcggatttcttctccttgattctctgggaaacggcattctttaaggcttctccggacaaatccttaaaatcattgtcagccagatactttaatttcacttcgtttggcgtgccttccagtccttctgtattggcaacagataccaccgggtcggccagttcccaaatttttcctaccggatccttgaacgcgccgtcgccgtataccatgacttccacatgctttcctgtgcggtccaggactttgttccgaatatcgtttaccaaatccatacaatcccgcgggaacagcttaatggtgtcctcggttgacttgttggagcccaaaaggccgtatttttcattgcagccgcttccgtccaccggggcattcaggatgtcatccatgccgcataccacctctgcgcctgcctcctttaagatgcgcttggtgcgcatacgcgaatggatgtcacaggtcagcacccgcttggtataatttaagatttcccttggattatttgcgaataccacctgggccttcgcgccctgttcttcaatcagctggcagtaataggccacatagtccacaccggtaaacgggtgcttgttctccccaaacagttccctgtagcgcttcaaatccagcacatcgctgtaaggattaataccggcctcgtctacctgatccaaggataccagggagtttcccacctcgtcgctgggatagctgagcatcagcacaaccttctttgcgcctttggcaattcccttcagacagatggaaaaacggtttctggacagaatcgggaaaatgacgccgatggtctccccgccaagttttgccttcacgtcccccgcaatggcatcaatggaagcgtaattgccctgagccctggcaaccacggactctgtcacggaaatgacatccctgtccctgatttcaaagccttcgctttccgctgcatccaaaacactgtctaccacgatttcagcaagattgtctccttcacggataatcgggcagcggattcctctcgaaattgttcctacttttctttccatatgtatcttctcctaatatattataattttcgtcatgctatcttattataatataaaatacgggattgggaaagtagttattttcgttttggcagggatgggtccggtagctgactgcaggtatccaggaccagggcagtcagaaactctctgtcatccagctcctccaccagatactacataaaactggttattctctactgttccaaagaactttcccccgcaccacaggccatactcgccaaataattttttataggaaataacgcccgcgccgcttaactgcgccgttacatactgaacatattccaggctggaagccatattgagtcctccttttattagtccatatctatctgtaaatatcataaatacggcgtcccagctctgcaagctccgcccggaattcaccgggttccaaaagctcaatctggtctcccaggctcagaatccagcaaaacaggttttctttgtccgagtatccggctgtaaacataaaattaccatccggcagttcctccagagtctcaggaccaaattcatctacaatcctccatttaatggacggtttgcaccgtgcctttaccagaaaacggatagggaagggacggtccgcctcattttcataaggcggcaggtctctatggcctcctgaatcagatggattttaggcgcaagggactgccggtaccaggacgacagattgatgaggatactgccgctgctgcttatcatatcctgctttccgggggccagcttgtccatcagcaggcggtacctggcggaacccgatacgctgtcaagacttctgagccctgccaggattgcctccatttccccggatgtaatcagggtgcggtccatgcggtatccctccataatggaaattccgcctccgggtcccctgctggtgacaagaggaattccggccttgcagatatcctctatatcccggttgatggtcctgcgggatacctcaaacttttccgccagatagggggcggttaccttttcccgctggagaaggatggacaggattccgatgagacggtctattttcatggatggcggccctcactttcatgttttcaaaaacacagaggcagcgttacctgcccctgtgcttttctttccttttttgctgcttcagttcaaactggcgtatggcttttgcttccttattctctttgcttaccgccttcctgccagtctttatctgctcctgctgcaatttcagggcctgctgggatttcgttcccatgcctgactcccgaagttccttcctgacctggcgtctcacacgcttggggtttttacggttctcctttacagcagctgccacagccggactaaaccgcagaccgtagtattcctttgccaggaatccgtgtacctcgtaatccttcggctccgggccaaaggtaatcttgcacacggtcatcctcccgccttccacccgttccagtactccaatccagaatgggtcctcaaaaaacactctcagtaccaccgatactttgtccatgacaattcctcctttgaaatgtgatgaacaaagaacggacgacccaaggagggagggttacttacattcctgttaccccgccgtttcaggcaggactatgggaatgcggccggactacctaccggctctgcaggctttgatcccgcgttgtgtttttatctctgctttttaattttatcatatttctgcacacttttctatcctttattggcatcacaccagaagctcagtcataaccgaatgctccatatcgtcaatattgtaaacatgctccattgcttcaaaggtttcccgcagattccctttcgcgcttttccagccaataccatccgtaaaccacacaaaagaaaatccttcgattgtgtctgcctcctgggaaagcatcttatagcttctggccgtttcattcagcttcgagccgccgccgctgtaaaaattcgtttcaaccgcataaatcatggactctgtttttaccacgaagtcaaaccgctttgccgccttgccttcgttggacagggcggataaatcaatatcccatttatcctcaatatccttaaggtacatctctttaaagtagctctcatccttagtaaatcccgcggcaatgatatatttctccaccagctcttccatctggtgcccgccgcggttcttgcggccattggaatcaagtcctgtctcaatccccagcgcataatcaaccagattatttaccagatgcttctgcaataagtcaaacaatcctgtttttctcataaatatcttatattgatccatatcataattcattgttttaaaatgatactcaaatgcgccgtcctcatcctgggcatatatttcattgctccgcactgccagaagcaggggaatgcaggacagggtttccggatattttgttattattttttcaaaatcatcttctatattcacagaacctatcagtgaatttagtatgtttaactcgatttttatatcctccacattgcggactaccttttcaaaatctatgtaataccggtaccctgaaatgcttgcccggaatttactaagccatgcgtcaaaatctctttttaccactccaatgcctcctgtatatgatccaaacgtttcttcgctatatccagatattcttcgttattgtcaattccgataaactgccttccgtactttccggacaccaccccggttgtcccggaaccgcaaaacggatccaataccacgtcgcccttttccgtggacgccaaaatgattcgttccagtaaatactccggtttttgtgtgggatgcctgccggcccacttttcggacggcctggtgaggcttccctcccacacatccttcatctgtttcccgccgttcattttcttcatctgctcatagttaaatagatgtctggctttcttttcatccttcctggcccacagaatcgtctctgtggaatgggtgaagcatcggcaggccagatttggcggcgggtttgttttcttccaggtaatattattgattagcttataccgctcctgctgaagcgccattcctattgaatatatattatgcagtgtaccggatatccatatggttccgttgggcctaagcacccttctgcacatgcggatccacctgcggttaaaagcatggttttccttaaaatccccgccttcatcccaggatgccttattgactgataccattcttccccctttgcaggttatgccgttattgctcagaaaatagggcggatccgcgaatatcatatcaacgctttccggctttattttccgcagcagctcaagacagtcacccagataaagcctttttgtatcagttccataatatgcctggatttttccccgcatcagttcttccatagatatacctctaataattcgtaatgatgatctcctgacccacgcggttctttccgtcagaatttatcatgcgctttacatccactaccactttgttgaaatctgcatataactgattgataaaatctgtattgtgatttgtcagcatacagtaacatccccgttctgtaagttctctgaacacggcagccagacgtctgtggctctcgatatcaaatccctcctttgtgtaagactcaaaggatgttggattcaaaggagcgtagggactgtctataaaaacaaaatcatccttcttagccaaatcacaggcactctgaaaatcgcctttcataatattcaccttctgaaggctccgcgatacagccaaaatgctttctttactgcacgattctctcacactgttattatacggtacattaaacagacctcttgcgtttactctgtaaagaccgttaaagcagtgcttgttgaggaacacgaacagaacagctaattccatatcgtattccgcccgcatcattttatcattatagaattcccggactttataataatactcttttccgccatccgcgattcgtttatcatactctgaaatggcatcggcaaattcttctggtgaaatttttatctgcaggtaagcattaatcaatgattcgtttatatcattaataatggatttttccggctgtaaatcaaaatatactgcaccgccgcccacaaacggctccatatatccattaaaatgttttggcaggctcgcttttatctgtccaagtaattgtcttttgccgcccgcccatttcacaaatggctgtgcactgatttccgtcatcgtgtttcctttcaccaataaaatcataacatttatgattcattataagtgaaagtcaaataaaacacaacctgcaactgccttctttcggaaaacaaaaatgcgccggcaggcatgcaccggagaatattttcctgaatttagcaaatactaatttatgtcagattaaatccacccgatttaaggataaaaggagaaagagattatgaacaaaaatatgcgcacatgggtcatcggcatctgcgtggccctggtcattatcgtggccgtggcagccgcctttgccaacaaccgcagcggcactgataacggacaggcctctgaaagccagacagaaagcaccgccgggtccgcggcgccacaggcggacacagaaacgggctcccgggaacaggcatcctcagattccggcaatgccgccggccacagcggacataacgggcatatgaatacatccggagacgacctgagccgttacctgaccgaacaggattccatcatgatgaatatgatggaggatatggtcatccgggagaaatcaggaaatgcctccctggactttctgcggggcatgattccccaccacgaggcagccatcaagatgtctgagagctatctgagctaccaggggaaaagcgatgaactgaaaaccattgcccaggatatcataaccgcccagaaggacgaactcaaacagatgaacgagctggttaaatcgtatgaaaaggacggaaaaaaggaccagacaaaggaggacgcttatctggagcagtacagcaaaatgtttgccgatgactccatgtcccgccacatggatgcctccggagcggacagcctggaccaggcctttgccgagggtatgatcatgcatcatcagatggctgtggatatggccagggatattctggaatatacagactatgaagagatacgcaccatggcccagaatattattgatgtgcaggagaaggaaattgcccggatggaaaagattgtgaagggacagcaggaatcccagccggaataaattatcggaaatcatcggaaataatattctgcaattggcacccatcctctcccatgctataatctccccatacaaattccaacccatccgcagtccggacacaggctggttctttgccgtcgggtaaaaataccagcgtcaggctttctatcgtcaggcccaggagcaatacgaacggggaattccgttcctcattcgctccagaagatagaaggtactggcgtttttttgtgttccgcaagatgtcagaaggcgtcggagcattccaggaggtcaccatgcagaacaccttatcacggaagtatcctacggcattgcccagggaatccagccgttaatcagcagcgcttacggctgcggtgattccggcagaataaggggaatgctgcggtatggactaaggctgtattttaccggaataccggccgcgggtcaatatcatcctgtccatcctttttacctccacggaacaggctgtcccggcccacatcatttccctgttaaggggcctggtactcatcattcccatagcgttcttcctggccggccttcatgtcagcttatatagagtatggagacatctcccagtacacgctgtatctccgcccgcagatagatttctgcctctgccctgggttcggcccggtagcagtaccgtccccgtcccctgcccgtcatctgctccttatcatacaggtccggggcatttggaaatgcttcgctgttaatggcccggtgaacataggagtaggtcatcaaaataatctccagaaacatctggcttttcattttatttgacagtccgtccctcagttcttccagaaggccggtatacatttccctccagccctccattaatatgacgggcgctatcaggagtccgcagggatatcctgcctcacacatatgatttacagcttcaattctctgttttaagccggatgtgcccagctctatcttttggataataggctgagggttgacgctcatgcggaaaatcaccttgcctctgtgatccaggtccaacaggggttccaccatatgaaacttggttggaaatgtaagtttcccctccccctcctccgcaaaacgcggaattgtatacagaaggtttcccgtaatggtgttctccagcaccaggtcactgttgcttccaatctcaaaggtaagcggcttcccgctgtttttaccctttttgatcattcggtccagcatctgctcccggttcacaaacagtctgagataggcgcatttattataattgcacaccaaatagcagtacaggcacatggccgtacagccggatgaggtatatgggaccagatagtcggaaaccttgtggttttccacgtatttgtgtgtctttcgtatgcccgcaatcagattgcgtttcatgtgtccgaactggtcattgggcttttcctgcatttcccggatggaattatggctctcaatgggaatccacggcaggtccctgtattcctccctgagctgccggcccagagggtagtcaaagatagccggttcaaagtaaactgcgtcaaatttcatggatgcgccttcctcctgatgaattcatggtcaatatgggaattggtttcaacgtcttatttttactatttaacattccccaaatccatgaagttatcaatggcaaagccggtgttttccgctccttttccaaagatgttctctttggtaaacatagtttaatctgaacgtttcaatgtatccatctccttttattgttcagactggtctgttctgagtatcggatccgggcggccagctccccggctctcattttcctggctcccgcattcccaggcggtcagagctgtctccagcgaccagtcgtcgaactcatcactatcgctggtaaaatacaaatcatccccctcaaaaaacatctcgtcttctatatggctctttttttcatgatttgcataattgccttttacggagtgattatctcttgcggcataattgtcctttatggcatgcctgctgttcatttccgcctgcacacaagccaaaaaacgctccccgtacttctcatacttaaactctcccacgcctgaaacatccagcatctccgctttggtagccggcttcacgatacacatatgggtcaacgtcttatccgaaaatacaatataaggcggcaccttttcttcctttgcaatctctgtcctgacagcgcgcagcttctcaaacagcgtttcgtctgcttccgtaaactctgcgcctcccgctgcggccagccccttcctgccttttcttccctttccggcactcgcaccggccactttggcgggatgctccgcttccctggccatcttcatggccacctgctctccttcttccaggatcccctttgactttcctgtcaatttcacaatcgcatactcatcgtttgtcactgccagatatccgttcagcatcagatggttcataacctggcgcagcttgtaggccggtacctttgccagctccccataatgcgggttctcatccatcctgtaattgcgtatcttggctgtgttggccccgcggaccgtatcaataatcacattggttccgtacctctgccggcagctctccacacatccaatgagtatccgggaaatatccgtcacatccactgtctcaaactggctcagacagtttgagcaattgccgcagtaattgcttccatactccccaaaatatctcagtatgtaatctctcaggcattcattggtaaagcagtaaaaggtcatcttccgcaggcgttccctgtcccgctccatgacaatctcccgggttacggggtccaatgcctcgttgtcctggttatggtcaataaagaactgattggttaccacatcctggccgccgtacagaaggatgcactctgagggctcaccatcccttcctgccctgccggcctcctggtaatacgattccatgttcttcggcatgttataatgcaccacaaacctgacattcgacttgtcaatccccatgccaaaggcattggtggcaaccataatctgtgcccggtcatatataaaatcctcctggttatgcctgcgctcactgtcgcttaagcccgcatgataccgggtaacggaaaatccttcccgaatcagctggctgcaaacctcctccaccactttcctggtcaggcaatagataataccgctttcccccttatggcgttccaggtaatttaccatggtggcatatttatccttgggggactgtacgccgaagtagagattaggccggttaaagcccgtggtcataacctggggatttctgagcatgagtatatcgatgatgtcgtcccgcacctgggctgtggcggtggctgtaaatgcgcttacaacgggccggaccggaagctggtttatgaaatccactattttcagataactgggcctgaaatcctgaccccactgtgatacgcaatgggcctcgtccacagctaccatggatatcttcacctggccgctcagtgcaaaccgcaggaaatcctcagacatcaggcgctccggagccacatagataatcggatatctgccggccctggccaggtctagtaccttataatactgcgccgcagtcagcgaactgttaatgtaagcagccaggattcccacctggtttaagttgcttacctggtccttcatcagggaaataagcggggaaatgaccagcgtgattccatccatcataagggcaggtatttgataacaaagggattttccggccccagtgggcatgactcccagcacgtcccttccttccagaatgttctggatcagcacatcctgcccatccctgaatgtgtcataaccaaaataatgttttaatatctcatattgtgtcataatcaaactcctctgtattgctccggcataaaagaacccggtagtccctgttcccggctttagcaccggacttatcttaagctgtgcttcagaaccatggaaaaatggcgaatatgccccgcagcggacctgctgtctaaagcagattaaaccgattaaacattatagatgtaattcattataacaaatccgaaataataaaacaatggtgatttatatgccggattatggtacctgattatccgtggatcgtccccgtttttatcaacccccggaatccgccgcagtctccggcaatacctcccccacggtaagcaaaaccccttcttttgcgggttccgggaataatacggcctctgtttctatatatttaaagtaattacttctgaaacaggacctatcctttatgaaaaacagactcagaagacttcccatgaagaagctgttacagaccacccttctgttcgccctggccttttgtgccggacggctggccgcccaggtagtagaatacaaccgtcctcccgaagcagtgaccacctcagccgacggcaactggggacttagtttcccgggcgagggccagatgcccgttggaaatgccactgcggactatctgaaacagttcaatgcctactatgcccagaatacccaggataaggtcatctacctgacctttgacgccggttatgaaaacggaaacacagccgccatcctggacgccctgaaaaagcacaatgtacacgccacttttttcctggttggaaattatttacagaccagtccggacctggtaaaacgaatggttgccgagggccacaatgtgggaaaccataccttccaccatccggatatgtcaaaaatctccacgaaggaggcctttgaaaaggaactgaatgacctggaaaccctgtaccagcagaccacgggacagccaatgaaaaaatattaccgtcccccccagggcaaatacagtgaaagcaacctgaaaatggccaatgacatgggctataagacctttttctggagcctggcctatgtggactggtacgaagataagcagcccaccaaagatgaggccttcaaaaagctactgacccgcattcatcccggcgccattgtcctgcttcacagcacatccaaaacaaacgggcagattctggatgaactcctgaccaagtgggaggaaatggggtatcattttggaaccctggatgatttggcggcggcagaccaggcataaaatggctgttgcttactgcgtgttccttacatatcatggaaagataaatatcacggaactataaatatcatgaaatcgagtaggaggaaggcgattatttcgccttccgacctctcacaccaccgtacgtaccgttcggtatacggcggttcaatcaacttaacatgtaacagccttttcggcgtagtagtcttccatggatacaagaccaaacttagctagtctctctttactgatacaaatgtggagattccagcttctgcacactctggcatatcctttggcatatgaaatgccatgtgccgcatttggcggcagaccaagtttgataagattcttttccctgttctttggcgttttccagtgtttccatatgcacatgcgcagtcgataccgaatctgtccgtccatttttgcgcacagccttttcatgcttccgattttgaaataatttatccaccctcggataagccggttgagtttcccaattttataaccattgcccactccccagctcctgcttgtatatttcttcatctgcgccttgaactttgctgccgctttcgggtgtggtctggctttgtaccctttggcaaatgagtcatagtaaaatccaaaccccagatacttaatgccctttggtttatcaaccctgctcttttccgcgttcactttcagtccaagcttttcctctataaaccgagccacgctcttcattacccgctctgccgcctgtctgctcccgaccattataataaggtcatctgcataccggacgaaatccagcctccttgcttccagttctttgtccagctcatttaacatgatatttgctaacagcggcgagatatttccaccctgcggtgtgccgactaccgtatcttcatactcatcatcaatcattacgccgctgaccagaatctttcttaccaccgatatgacatctccgtcctttattgtccgtccgaaaatcgtcatcagcttgtcatggtctactgtgtcaaagaatttcgctaggtcgatatccactatccagttgtgtccgtcattcatcatttccaatgctttaaggactgcctgctgtgcacaccgcttgggtctgaatccatagctgtggtcgtgaaactgctcctcaaatatcggggtaagcacctgtgccaccgcctgctgtacaaagcggtctactgctgttggcactccaagatttcttgtaccaccatcgggtttgggtatctccaccctgcggactggcttcggcttatacttcctcgtccgcaactgttccttaatgttttcgccgttttccgaaagatatgcgccaagttcttcaacggtcatcccgtccacgcctgccgctcctttattccttacgacttgcagatacgccgcatttagattatccctgcttaatatctgctccatgagactgcttgtgtccatgcgttgtttcctttctgccccttttgcctttgccgcctttgaagtcatcgacaggcgtatgctccggctacgaagtggaacgtacttcaactgattgattgttcagcccttcgctccgtccccattacaggaacttcctcactactatggcttctgctgacttctcacaattcgttgttactacggctaatgagaccgcctgtgagacctccccagttaaggtgcgtgttcttttcctccatgtacctgccgcatttactcgtacttccggcaaccttttggacttcagtgccttttgccaccttatccgtatttccgagccttatatgcggttcctgtccgtcaggtcagaggtttgcttacagcttctttcagattccgtctcacggcggacacccttgctgttcggctatgtgcttcgttgttgcctacgcgcacttgggactttcacccattagaaaacgcccatgctgggcaaacaaaatgccgaaagaacgcacttttagtaaggtgcgtcttccggcatttcatgtttggttgattatgtgactgcgttaaaatctacagcagcttttccttccactccgcctccttaaatccggtgagcacaaagccgtcccccaccaccagcggtcttttcaccagcatcccgtccgtggccagaagcgccagctgctcgtcctcactcatggacggcagtttatccttcagagacatttccttgtagatatttccgctggtattaaagaaacgcttcagagaaagcccgctgttcccataccattcccttaattcctccagggtgggattctcctccctgatgggtctctccacataggaaatcccattggcatccagccactttaaagccttctggcaggtagagcattttttgtagcataatacggtaagactcatcttcattcctccatctgttctattttcttatttggcggcaaaccggatcgttttggctgaaccgtcaaaacagaatgtatcttcattataagtaaccatatcctctgacgaatatgtaagaagagaagaatacgcgccttccatccatcccccgatttcttcctcatggcctgccgcgttttccaaccgggcagcgtcaagctccacgattcggacattgccaggccctgccgccgctttttcatccacctttatggatggcttcatctccccgctgccgcctgccagtaccgccgcgccgctgccctctgctgttatctctccctctgattcttccactctgagcctgcatgaataaagtccgattccggattggcctgaggccaaaaccacaccggttcctccggcaatatccacctccggacatgatattcccgcatacgttccctttatatccagctgtccgccctccaggcgcagggcagcctgactgtttcccgttctattccccaagatgcctgctgtcccggcttcaatgtccaggcttccctttccccggatgaccagggtgcctgaatgtatgcgtatgcctgcgccttccgaccggatccagctgccgctgccttcctttaactcaatggttaagtcccctgatatatcaatcccgggccgggaggactccgtattttccatgactgtgttttcttcagatgtatctttttcaactgcgtttttttcagctgcgttttctataaccgcactatccaatgtcagcgtatagctgtccctggaatttctcagtctccatccgtttccctccaccatttttccacgtcccggaagctccactttcccttcatttcccaggtaaagagctgtcagcggcacctgctccctggactgggtcagcccaaatctggatgccagatatatgcctgcgctggatatggcagtgcagaatacaatgataagaataatgaacacaacagcccgtaccgtcctgcccacaaatcccctggaaatcttatccatatatatatttcctcctgttacagtttcgtttattttatcataaagtaatccatttttccattacttgtgatatcataggagaaaagtgtggttactgattggaacagttcaaccatgcaataaggaggttctgtctatgataaatatactctgcttcggtgactccaacacattcgggaccaatcccaaaggaggacgccattcctggaatacccgctggcccggacgtcttcaggttcttctgggacctgaatattatgtgatcgaggaaggtatgggcggacgcaccacggtctgggatgacccgctggagcctggccggtgcggcatccaggcacttcccatggcgctccagagccataaaccgctggacctggtcattctgtttctgggcacaaatgactgcaaggcccattttcatgcctcgcccagggttataacaaagggaatggaaaatttgtgccacacggtacagggatttgattacggggaaggctataagaagccaaagattctggtgatatcccctatccatataggaaacgacatggagcactgtccatatgtcagttttgacgaaaccgctcccggcaagtcaatggcccttgcgccactctatcaggaactggcaaagactgagggatgtcttttcctggatgccgcatccctggcaggccccagcggcctggaccagcttcatatggacgcaaagaaccatggggcattggctgagggaatcgctgaggtggtgaaggggtattttgaaccgtaggagtgaatcgagtaggaggaaggcgattatttcgccttccgacctctcacaccaccgtacgtaccgttcggtatacggcggttccatcaacttaacatgtaacagccttttcggcgtagtagtcttccatggatacaagaccaaacttagctagtctctctttactgatacaaatgtggagattccagcttctgcacactctggcatatcctttggcatatgaaatgccatgtgccgcatttggcggcagaccaagtttgataagattcttttccctgttctttggcgttttccagtgtttccatatgcacatgcgcagtcgataccgaatctgtccgtccatttttgcgcacagccttttcatgcttccgattttgaaataatttatccaccctcggataagccggttgagtttcccaattttataaccattgcccactccccagctcctgcttgtatatttcttcatctgcgccttgaactttgctgccgctttcgggtgtggtctggctttgtaccctttggcaaatgagtcatagtaaaatccaaaccccagatacttaatgccctttggtttatcaaccctgctcttttccgcgttcactttcagtccaagcttttcctctataaaccgagccacgctcttcattacccgctctgccgcctgtctgctcccgaccattataataaggtcatctgcataccggacgaaatccagcctccttgcttccagttctttgtccagctcatttaacatgatatttgctaacagcggcgagatatttccaccctgcggtgtgccgactaccgtatcttcatactcatcatcaatcattacgccgctgaccagaatctttcttaccaccgatatgacatctccgtcctttattgtccgtccgaaaatcgtcatcagcttgtcatggtctactgtgtcaaagaatttcgctaggtcgatatccactatccagttgtgtccgtcattcatcatttccaatgctttaaggactgcctgctgtgcacaccgcttgggtctgaatccatagctgtggtcgtgaaactgctcctcaaatatcggggtaagcacctgtgccaccgcctgctgtacaaagcggtctactgctgttggcactccaagatttcttgtaccaccatcgggtttgggtatctccaccctgcggactggcttcggcttatacttcctcgtccgcaactgttccttaatgttttcgccgttttccgaaagatatgcgccaagttcttcaacggtcatcccgtccacgcctgccgctcctttattccttacgacttgcagatacgccgcatttagattatccctgcttaatatctgctccatgagactgcttgtgtccatgcgttgtttcctttctgccccttttgcctttgccgcctttgaagtcatcgacaggcgtatgctccggctacgaagtggaacgtacttcaactgattgattgttcagcccttcgctccgtccccattacaggaacttcctcactactatggcttctgctgacttctcacaattcgttgttactacggctaatgagaccgcctgtgagacctccccagttaaggtgcgtgttcttttcctccatgtacctgccgcatttactcgtacttccggcaaccttttggacttcagtgccttttgccaccttatccgtatttccgagccttatatgcggttcctgtccgtcaggtcagaggtttgcttacagcttctttcagattccgtctcacggcggacacccttgctgttcggctatgtgcttcgttgttgcctacgcgcacttgggactttcacccattagaaaacgcccatgctgggcaaacaaaaaggccggaaaacgaatctcgctttccggctttgttgtctccctgaacacatctcctctgatgaatcagcgcaaatcacaatctgtatactctcctaatcctgtccaggccttacctccgcactgattaatagaacctggctatctcctgaacggtgctgcgctttggcatctgagggtcagccgctccgtatcccagggcaatgaccgccgccacatcctggtcctccccgatggagagcagttccctcagcttgccggcatcccttattcccattaccagggtgtccagacccaaatcctttgccttcagcagcaggttctggttatgcatccccaaatcgtagcagccccagccgtttcccaactcattggaaggggttccgtcattgtcatatcctgagcggttcttaacaaatgtggccacaatcaacacaggcgcatccttacagtttgtctggttaaaggagggaaggcaggtttcctttacatttttcagcatatcgtctgacataaccacatagtatctggctgtctgcgaattcttccaggacggcgcaagagtggccgccttaaggatctcctccacctgttcacggctcactttcctgtccggctggtactttctcatgctccttctttctctcaataccgcatctaattccatataatgttcctcctgttcattttttaatatccggaaaccgcttttaaaaggtggttttgattccaaaacgtcccgcaaacgcagatgcctctgtcatccgcctgtaaaactgaggatagaacccttccccgctgttataaggagttatataaaactgattcagcacatacatatccaccgtttttctgatatccgggtttccatttttctccaggcccgtacccaggtccttgagaaaataatgccagtcatttacaaacttctcatattccttcacatccggggtgtcaatccacttgcggaccttcaccttgcttctgttctccctgggacactcatgaacctgcaggaaatagcggaaggacctgttctcatacagtcttcccagtggaaagaggcggcagaaaccgggcctgtagggatggataccgcacctgccctcactgttcaggaaggaacatgcctcatcccggcccgtcatccggatgttgggcaggataatgccatccaccacatttaactccagaggacctgccagaagctgctcctgcgtcatccccagatttaccgtaaggcggaacatatcaagcggatccagtatgatggatgaccccataccgcggcagcaggcaaagcaaccttcacagccgccgctgtcagccctcaccatatcattggtaccatataactttccgtcggatatctcctccaggctgacctctcgttccatatcccccagtactccttttccagcagtttccataaatatttctaacaaacagtataccaccctttcccggtttcacgcaaccatgcttttatgggcagggccaaccttattcaccctattctctgtttttgagcacaatggcggctatggccagacccgctatcacatccatcctcctatggcccatggaggcagctgtatgcccagcgccttatttaagggaataagtaccagagaggtgaggccaatctggttcaggaaacagactctttcatacagcttccccctgtccctctccttacaggcttattgcaggggttaaataaggctgaatgtcaagccggtcccgtgtttttatagattttttcatttaaatataaaaaggacagaggaaccatgcgcccgaccgcgcgtgtctcctctgccatatgtattcctgataccttctatttcatccgcttcttcatttgctgcctatgttccgtatctaatccggccaatcccttgcccggtcctctaggcagggacggtccggcagactgtaccggtagcatctgctgaatacgccaatctcttccagggtagataccatgcggtacacagttgccataccgatagccgcatcacgttttgccgcctcgtagtatatttctttgcagcagttccactttccgctcagtatgacatccagaaggaccatacgctgtttggtcatgcgtttcccctggctcctcagttcctggataacccgctccttctgccatgtgcgggactcctcactttgtttccatggcatatcacttcagctcctttattaaccaatatgatgggttcctgtcattgtcgaaggtattttatcccctccatcaagtaagtcaaagctaactcagctgtctaaaatatgcagtcagatactcctattccctgttgcccacagaaagcagaacattctgactgcatatatagattagcattagctaactttcttgtcaagaatttttttatatggttttactatcatttttccggcatttttccatcagcccttatccttcagattgatccccgccagcgccttggcaaatgcattgttaaccggctccccggcttcctttttctgctggttcagataccgggccacatccttttttgacacaccggcgccctcctttttcctgcgctcctgaaaggccttcagcttctccttatgaccgcacctgcatacaaatatctgggcgtcccccttgcccttaagctccatcttcttatggcagacagggcatctggcattggaggtgcgtgaaatgacctcccggtggccgcactcccggtcctggcacaccagcatctccgtgttctttccctttacggccagcatccgttttccgcacacagggcactttgtgttggtcaggttgtcgtggcggaaagaaccttctcctgtcttaatctggcggatcagttcctgggaatatcccctgatgtccttcataaacgcgccccttttcaggcttccctttgcaatgcccgacagcttcatctcccagtccgctgtcagctccggctttttcaggtcctcaggcaccagctccagaagctgcctggccttggatgtgagatagatatccttgccccgcttttcaagaagaaagccggaaaacagtttttctattatatctgccctggtggcaacggttcccagaccgcctgtctctcccagagtctttgccatggccttatcctttgtctccatgtacgccacgggattttccatggcggagagcagagttgcctcattaaacggggcaggcggttttgtcttgtcctctgtcatcttaatggacaggccttttaacacatcccccttcttaaggtccggcagctgctggtcctttacctccggctcgtccccttcttccccttcttccccgtcatccacatccgtgtcgtaagcagccttccagccctggctctttacaatccttcctttagcactaaagcgctgtcccccgatatccgcttccaggctggtctcgtcatattcaaaaggcggatacagcacagccaggaatctgcgcaccaccaaatcataaatcctgcgttcatcaatggtcatatggtccatctgtacaaactgttccgtcggtatgatggcatgatggtctgataccttgctgttatccacaaaaaacggttttgacggcaggggctggttcaccagacggccggccagcgtcttatagggaccgatggagcacgccttcaggcgctccttaagggtcgggacaatatctgcgctcagatatctggaatcggttctgggataagtcaggactttatgattctcatagaggcgctgcataatgttcagcgtgtccttggctgagtagttaaaccgcctgttggcatccctctgcagctccgtcaggtcatagagaagaggaggcagcgtctttttaggcgtccgctttacctcagccacaacggccggttcccccttaaggtccttggccagttcctccatccggccgcgttcaaaggaacggcggctgcctgtcccggcatcctgccaggtaaggaccagtccgtcctttctggcctggagcccaaaatacggctggggcacaaatgcgcgtatctgcgcctcccgctttgctatcatggcaagggtcggggtctgaacacggccgcaggagagctgggcattgtatttgcaggtcagggccctggtggcattgatgcccaccagccagtccgcctctgccctgcacatggctgcgtcgtacaggttattgtattcccttccgtccttcaggtttgcaaatccctccctgatagccttatcagtcacggatgatatccacagacgccggatgggtttattgcaccctgtctttttcagaatcagccgggccaccagctctccttcccttccggcatccgtggcaatgataatatcccccacatccccgcggtaaatctggttctttacagcctggtactgttttgaggtctgcttgataacctcaagcttaaatacctcaggcatcatgggaaggtcctccatcttccactctttatactttttgtcgtaatcctccgggtctgccagggtcaccagatggcccagcccccaggtaaccacgtaacgttccccctcaatggcgccgtttatatttttcccacatttaagaacccgggcaatatcccgggcaacggaaggcttttctgctattacaagtgatttcattgaatcttcctttctacgtaccgctgcttttattctagcacattccccccggcctgtcaccgctgttttcatttcttcatatctttgccgtgtgcttcatgtgctctcccgcatttgcggcttcccgcctgtaccagggcatggacgtcagcagctggcagggcgatattgattaccaggcagtccgggccgccggcatccaggtggtctatatacggaccggtgtgggattggaatacgtggatcggccatggactttgaatcaatcccaggtcggatcacccaggaaatcaacgccattggcctggccttcatggaaaccccgggcagccgtttgggatacggtcctgccttatatacggactcctataacgccgcatacctgtggaacagcggcttttcctcctgccccctgtgggcggcagactacgatgtaaaccagccggaaagcacaggcccatgggattcccgggacgatttccagtactcggacaggggacgggcagcgggagtaaacggcgatgtggacatggacttcttcaaggactccatgttcattcactcccagacacctcggcccgaaccatctcccggcggcataggagcccttctcacctgcagggttcagggcggcgacaccctctggggtatctccagaagattcggtaccacggtaggccggctggctgcgctgaaccatatctccaatccaaatgtaatctacaaagggcagatactggagattccggatatcctgaaagcctgaccggctccgggatatccccgcctttcttaaatcttctgctgtcggccggaacgcagctggctggtcagcagattaccaaccgtatccgcaagctgacccatctccctgattctgacaaagctgcttccgtatatcttccgggcgccttccaggtcgctgtccagaccgtaaaatacagccatcaccttgataccctgctttttaagctgccgcacctccatggccgtatcctcaatgcctgcatcccccgaatattcctttccccgcaccgccccggaaacaggcgccatccgctgttcgtcattggggctggcgtctgtcagcacaatgagcaggcgtttctcacagggggattgtcccgccagatggcccgctgccctgagggccaggccatcccggttccatccggctgccacatagtcaagaattcctttgttcttctccttttcctcataaccgcggaatatacgaaacactgtgtagttctggatggcggaaaaggaatacacctggaccggtatcccgcagcgggtcaggctctcggcaatgacatatccctgtgctgctataacggcttcatgtcccatacgcgacgcggacgcgtccagcatcaaatccacggaaacattctgccgttcttcctctgaaaccttcagaaacacacggtcatcctccagatacactgcccgccagaccgattcccccatcaattttccctgccggcttttctccggcacaggctgcaaatctaccagaagggtattgcgaatctgttccatcaggcgccgtatgctgttctcatattctgacctgttcttttcaaactgttccctgttcttttttctctgctgcgccgcctcccacagctgtctggccgattccccgcggtccgggtcctgccggaatttttctcctctggtaaaatggagtccgcacgtactgtggcatcccgtgcatagcatatgacggatagcctgattttgccgctctccgtacatggaaacaccatagcaggcgtcaatataggaacggaccgcctcctcacgccgtttcgaggatgcctccggccagaagcaaaagcctttggcggcatcagaaagctttttatgggcctttccggatgtttcactttggtcatcaccggattcaggagactcctgaccatgctcattcagtgtattcctgacaatgacgctgcgggcaggccgtacaaagcggaagggcttaatcatcccttttatccgttttctgttttcttttctcttttgttctgaacggcagtcaaaccggaaatattcccacaatataccggaaacacgttccatgatttcatcggtgtcagcagctccgtcaaaggacaggccggacaaaattccccgctcccacggcgtcactccgggcttctctcccagcaccagcctgccccagcccgtctgaagggactggaccagcttttcctgagctgaccatttggattcctccaatacctgggcccagtattccccgcgcagctcctccagggcaggacggccttcccgttccttctcataagcgccgcattccaggccgagccagaatatggtatcatagatatcctgaagcgccgtgccctgaaaagccccgaacatctctgacaatttcccgccgtcataccatctgtggacataaccgattatactgttgagataaaggtctgcctttccgtaccggtcaaaggccatgaattccgggtggaaggaatggtcctctgccgcagtccatatcatgttgagggcccggcgctcctctccgtcatattcccgcatctccatatcagtctgcaaacagcttctccctttccagttttttaggaatccttgccctgattaaatcccgcaccagggtctgttcatatgggtcaaaggatttgttggtaagtcccatatccagggcagctcctgcatccagccctttctccataagccggacagcatccagcagtcccctaaggtccagggggcgggtggaaagctgggcgctttggcattttctatctatatccagaaacagctggacaaactgcctggcataagttctcttaagaccaggatactcccggctcataagcttttccagattttccccggatatggccggcatctgcaggcaggcaaatctggaagtcagggcctcgttcagctctctggtgcccgcatacccatagttcatggtggcaatgaaccgggtccccccatccatatgcaccacatcgtagcccggcacatctatggtccgcctgaaatccaaaattccatggagcacggccagggcctcgtttctggccatgttgatttcatccaggaccccaaagcccccgctgattccgcagcggtacaccggccccggccggaacacaacggctccgttttgaaatgtatctgttcctatcaggccggacgcatccatgttgacgtgaagggagatgtcccaaaccggccttccaaaagctgccgccaaattctgggccagtatgttctttcccgttgcctttggtcctgcgagaagcaggttctgaccgcacaaaagggctgcaatggcctgctcccatacctcccttccataatacaggtaccggggcacaggtatcctgccccgttcctcctccctgaccgggtgggaagctctgaaatccacgattccctggattaagctgctgtttatcttttcctcttttaagaattcaatcaccgtcatgccctcttcctcttttttacagtctgattgtagcacagaattctttaatggtgcgggttttttgtggttttgagaaaataattttaaaaggttttgtgaacatgttttaggggtgcgtctcccagtcccagatgctatattagaaataccagacaatagcagactcgtcaaccaggcagcatcacacgttaccccctgacccacaaatacaggataccccccaagcacaggatacccccaagcagctggaggataaagtcctgaagacagctgccacatttttagggcaggaccctcttccatacctgggtgtcaagggacggattaccggcatcaatgtatatcgaggtaatccgtatcaaggaccggaacgcggataaaattttcaggaaagaggaaaggtagctgtatcaaaggaagatctgcgccgcatggaagccatgctttatgccctggccaccaaatttctcgacaaaacagaattaaggaaggtaacggagaagattaatatggccctgctcggacagctgcttatggaggatggaattggaaagggagaaatgatcaagctcatatctctggtcatgaagaaaatgaaaaaaggacttttcccggaagagacagcagagctgccggaaaaagcccggattgcgtcagccggatttatgccgcagtgcaggccaatcccgggctttttatttcactttttatttcaccttttatttcatttcaccgtcatcacaaaccgttcccggtcatccttcacattataccggtaccggtccttttccggctgagcataccgcacctcacagcacctgattcccaaccgcctggccgtctcattggtatatatgtccatggttatttccgccggatatcccatgtcatagctgaaccgcacatcacggaattcattgttgatacatgcttcaatcattttcctggcaaatgcctccttatccccaatgtacagcttattcgctacaatagtcatgtattctgtcctctttccatcccaggaggaagatatggtattcctcaccgacacgccccttccccactgcagatatatgcaaagggccatcagaaccagcgatgcccgcatcagtctttttctcatttttagcatacccctcacctgtattatcatacacattgtactctaatacagcttatatttcaatacatccaggaatatacttatatggaaaggcgggggatggcatgcatattgagattgatttggagcgtctgctgaaggaaaaagagaaaagtaaaaactttgtctgtgaaaaatgcggtttgcagcggactcagttcaataattactgcaagaacaaggtatcccgcgttgaccttaccattcttgccaagatatgcgattgtctggactgtacgcccaatgatatattgaaaatagtaaaagagacggcaaaagatgaatagaacgcatgacgccatgtgaagctattcatctttttttgcgcctgtattcccgataaacaaaattaagcggtaaaattcaatccgttctggtgtaatatcttgcaagattttcccttcccattgtgttaaaatagcagaaaagcagtttaaaaggagcatcaaaatgatacaggagcaggaacagcgccgggcctattatgataaggaccttaagatagaagcctacaatctgagcggggtcgtgcagaaattccccaatcatttccacgaatattacgtcataggctttgtggagggcggcaaaaggcacctctggtgccggaacaaagagtatgatgtcagcgccggggatttgattctcttcaatcccagagacaaccattactgcgcccccatagacgtggagccgctggactaccgtgccgtcaacatcgagccctctgtcatggaacaggcggtaagagaaatcaccggccggggaagaggatatatccaagcccgatgaccgtatccaaaacctgtgcacctatatggaggagcatttttcagaaaatataagcctggatgaactgctgtccatgaccacctttggaaaatcctatctgctgcgctcgtttacaaagcaggtgggtgtttccccttaccgctacctccagaccatccgcctggacaaggccaaaaaattccttgaacagggcataccgcctgtggaagcaacggccatggccggattttcagaccagagccatttcaccaacttttttaaggagtttatcgggctcacccccagacagtatcagaaaatattcttatcagaacctgataaggaacaaaaggagcgacatcatgaagcttaaccgtaccgccgcaggccatttggccgcatttgtaaccatccttatatggggaaccaccttcatatccaccaaagtgctgcttcggacattcagtcctgtggaaatcctgtttatccggtttgtcatgggatatctggcgctgcggctggtctgcccccgctccctgcgcctttcctccgcccggcaggaagcactctacgcggcggcgggtttctgcggcgttgccatgtactatctcctggaaaatatcgctctcacttataccctggcatccaacgtgggagttatcatctccattgcgcctttctttaccgctatcctgggttggatgttcctgggaggagagaggccgcgtttcaggttctttgccggatttctgcttgccatggcaggcatcagcctgattagcttcggcaatgaggccgccttatcccttaaccccacaggagatttactggccgtggctgccgcagtcatatgggccgtgtattccaccctcaccaaaaaaatcagcgcattgggccacggcactttccagagcaccagaaggacctttttctacgggctcctatttatggtaccggctctgaccttcatggattttcacgtgacgccggttcagtttactgatatgaaaaatatcctgaatcttttattccttgggctgggcgcatccgcactgtgtttcgtaacctggaatacaggcgtaaagatactgggcgccgttaaaaccagcgtatacatctacatggtgccggtcatcaccaccctgacctcggcccttatattaaaagaaccggtaactgtaccggctgcattgggaatcatcatgacactggccggattgtttttatccgtaaaagccggtaaataaactgaccgggaacctgcctcttctgaggtaggccccggtctttcctattctccctggataaccctctggatatggatggcgagaaagcctgcctcctgagaggccccagacatccccagccgcttttccatatccccgcacacatccactgccgcctggtaaggccccggaaaggcatcccttgcatatgcctccatgtccagactcaccggctctccctttcggatgcgggcaatcatataccgcagatggctcaccagacggttataccccagagagtccgctgccagcttaatgcccatcttctcttctatgctgcggatactgtcctgtaccagcctggccatatccatggaatgggccacattctcctcggatgacccggcgtggatgtgaagggtaatgtatcccacctcatcttcggatatgacaatgcctgtcatttcacgaatgatttccctgccttccatggcagcctggtattcccggtcaaacagagcctttatatcctggttaaaaggatttggaagctccctcccttccctggccctgcctgcggccagggcaatatggtccgccatgggtatcagtatgtctgaactgatatcccccagcgttttcctggccgactcgattatatttcccgccgcctcgataaagaccgggtctatgctgttcacctgctgcagcgccgtggattttccggtcacaaactcataccgctttgcctctttcacctgctccaaccgctccccggtccggtgaccgaagcctattccgtttcccagcagaatcagttccctgccggtatctccatccaaaaccagtattccattgttgtttaatactttgatgatgcggtacataaacccctccccgtccacagcgctgccggactctgccgcgcgccgcgccgctgccctttcctatacggtcattatacctaatatcccaaaaaacatctacatttgaatgagatttttccgccccggcataccatttctatattcacccctttagtaccatccgatttcatccagcgcccgtacctctccggtcttaaccatgtgaatctcacggccttccgtgagaccggtaaatacagccatacaagcctcggacgcggcgttggccctgatatattccaggtcgaattccatcagtttctggcctttctttaccttctgcccatccttcacaaaggtctcaaacccctttccgtccagcttcaccgtatccacaccgatatgcagcaaatactccataccgtcccctgttttcaggccaatggcatgcttagaaggaaacacaaacagcacctctccatcctccggcgccagcacctgcccgtctgccggtatgaccatgtagccgtcgcccatggccttgctggaaaatgcctcgtccggcgcctccgtgatggaggccgctttgccgttaaagggcgagcagatgatgtgcttttcctggcaggattcagcatcttcctccaaagcctcatccggtgcctgcgcaagatactgctccagatttgactttatcacagttacgttaggtccataaattacctgaattccctgtccctttttaatgacgcccactgctccggtggcctttaacagcctctcatccaccaaagccgggctatccacggaacatctgagacgtgtggcgcagcagtccacggaggtaatgtttctctttcctcccagtcccctggcaatatccatgctgagggcgtctttatccccgtttcctccattttccccgcctgccggacctgccgcgcctgccggacctgccactcctgccgcgcctgccgatttcctggcgttcacatccgcctttgtgtaaagctttgtctcctcgtcctcatcctccctgcccggagtctttaagtcaaacctcttaatcaggaagctgaaaataaagtagtacagcaggaaatatatgattcctaccggaataattctcatccagctggttttttcatttccctgaaggatgccaaatataagcaaatccaggaagccgcctgagaaggtaagtcccaccgcgatattcagtatatgggcaatcatgtaggcgctgcctgccagaatcacctgtacggcaaagagcataggcgccacaaacaggaaagaaaactcaatgggctctgtaataccggtcagcatactggccagagctgccgacagtagaagtcctcccgcggcctttctcttttccggttttgccgagcggtacatggccagggcagcgcctggaaggccgaatatcatgaagataaactcaccggagaaatacctggtggcatccgcgctgaaatggatcacatccggcgaagccagctgtgcgaagaaaatgttctggccgccctgaatcagatttccgtccaccatcatggtgccgcccacagcggtctgccagaatggcatgtagaatacgtggtgaagtccaaagggaatcaacgccctctttataataccgaaaatcaatgtgcctgcatatcctgtccccgtcaccaggccgcccagggcaaatatggcgttctgtacaaccggccatatgaagtacatcaccatacccacccctacataggccaccgtggatatgatgggcacaaaacgggaaccgccgaaaaatgagatggcattgggcagcgcaatcttgtggtaacggttgtggagcgccgccactcccaggcccacgatgatgcccccgaacacgcccatctgcaaggtctggatgccgcacacagaagcaatggtgccgtccaggacgccaggggcaacggtgccgtccggaagaatctttcccgtgatggtcagcaccgcgttgatggatacatgcatgacaaaaaacgcaatcatggctgaaagggccgccacctctttctcagccttggccatgccaatggcaactcccacagcaaatataatggggagattgtcaaatacgacatttcccgccttggccatgatgaccaacagggcgtttaacatggttttgtcgcccagaatccgttccagaccgtacgtctgaatggtggtggcattggtaaaggaactgccgatacctaacagcagtcccgccaccggcagcactgcaatgggaagcatgaagctgcgtcccactctctgaagaacaccaaatatcctgtctttcattttccttctctcctgtctttttcttccaaccgcgcaccctggctgtacggacacaaaaaagacattaaccgttaagaacactgtctccaatgtcctctttcagttaatgcctgcatcaccagtaacacgctctttattctgttgcgcattaagtataaacaaaagacaggatttatgtcaatccgaattgtgcactaattttcttttgtctttttgtgcaaatttgacaaactctcgttttctattccaacgtcagcccaaagtccagctcatagtaattcccctcgctgtccacatcccgcacctgtttgttctcacagatatcaagctccaaatatcccttagtggaatggaagtattcgcctgagcttggccggatgaacagaatggcgaaatccgcttccctgtaatcttctgtcagctccgcctgaaacctttccgcaaaggaccttttgactgcctccgtctccttggcggcagcctctgcttcacagccaaagcattccacatacaccttcctgcctgccgtcttttccgcatccaggggaatcaggccctctctgttctttaagagcaccacggactgctgatgcacccggtaagcgtcctcccagtgcttctttgtggccaccacctgttccgcttcctcagggtcgcggtatgggttgtcgaacatacccagttcaaacttttcctttaaggtccttgtcaccgcccttgtaagcgcctcatcggtcagcaccagatcactggcccggtacccccggggcaccggatggccctgggtcgtgtaatatccattccttccgcgctcatatgcctccctggcggaaaacacatccaacgacccgctgatgatatccactccggtattgacagccagcgcgattctggaaggcacatccagctcctccacgccccaggccatcttattggagatgccggagtcgctgttcacatatccctcaaatcccatcttctcccgcagaagcccctgtatgaagaccctgttaaacgcaaagcctaccggctccatctccatggcatctccgtccggcccatactgggacttgctcttggcagccgatggtttggcataatacggcatgatggaggatgcctttttgtctatggctgtccggaaggcaggcaggtggtatgtgcgcaggctgtcctctgtctggtacacattccactgtccctggacatagtgggggtcgaatccgttttccctggctctgcctcccgggaaatgcttgatggcgacggccaccccccccccctcccttgtgactccctggctgcttccctgtatgccgggaatcagacgctccatgatggcgcacacaagctccggatcctcgccaaagattccataggaccgctgccacctgggatctgtcatgacatcggccatgtacatatatccctttttcatccccactgcatcccattccatccggatacaccgggcaaagctgtctatgagttccggtccgtttccccggacagccgccgcgattcccatggtcccgggccaggtggcaaacacgcctgcctcatcgttcatgccgaatacaatctccccgtgctcattcctggaattggaaaggaccatcacaggcagggcatggccggttccctccgccaccatattaagctggttaatccagtccgccagttcgcccggcctggggttctgacgcaggatgaaatggcgtatgcccatttcctttaccgtgcaggtggttccatacgtattttccacattgaagatggactcgtcctgctccacaatctcctcgttgagaaggccgctttcatccacctttgtcctgtcctcctggtaaattcccatcttccaggagttgacgaacagcatgccgattttctcgtcagcagacaattccgccgccagggaagccgcccttttggcgggagtgttgcgccaatccttatagggagccagccttccatcccctgtcaggtccctgaaatacagcccgtccttttcgatcaccggctttacggtaactctgatgacaggaccgttttcatttttataaaaatgaatgttagttgatgccttattcatatcgtttcaatcccttctgcgtttacgctctgttttcattctataccgcttctccggcagcggcttttgtagctccgttcagatgcggtccctttccggtccgtacttccttcctgttttccagctcttcctggacagccggcacattcgggtcaggtccaaccacaaacattatggccatcatagtcatggatccccatgttcccaggaggaaggtactcttaagcccgaaccttctggacacaaacacgccgccgatggaaatggctactaacggtgcgatgaggatacttgaaaatacgccctgaagcctggaattcagcagcatgttggcaaacaggtatgtcatggtgccgctcatgagcagctgtcccaggaacaggaaaaagcgctcatatccaaacagttcatagaagtcatgctgaaagtccccgtcatcctgtgccccgcgcggatggaagccatagaaaccggtatcaaagaatattttccggatttcatcaggaacggctttccctttttcattacccgttccatggtggaatccttacagcctgggaccctgtatcacataacagattttataaaccttcacaataatctgttcctgtatgacggtaaaaatcaggttctcatcgccggcccctatctcgcccatccggcagacactgccttttgcgagcagagccttcaggataacggaaaaaatctgtccctgctggtccccttcagccagttctgcctcacccttcccgtagtaggcaattctcacaggagagcccggccatagtccgtaccgaggatccgctccgtacggcaaaaaacctggggggttccctcaataccatgctccgcaaaagcgctgaaaccgccggcattcatcctgtgtatctggacatcatctcctccaacttcgcaatgctcattgaaaatgccaacaccatgagggaagcgcaggaatgcaaatcccagatgataagcgcatactgccgctttgtccggaagaaccgcctggaccagtattctcccctggtccgcaaggccatcacctacatccgcatctatctggctgaccagctcacccttgcggggattgcaaagggtatccgtgtcagcccctcctatctctcccgcctgtttaacagggagacaggagactccatctccaactatatcacaaaggccagggttgaaaaggcagccggacttctctcattttccggtatgtccatacagaacatcgcgttttatgtggggtttggggatttgaattacttcagcagatgctttaaaaaatataaaaggatgacgcccaccgagtacagggcgtcatcctccattggggtgtagggcgggctattcttccacccgcgcctccatgtttcccacatatttcctttccatctgatgtctggctttacggttttccacgctgtcaaacacaatggaaaaatcgtaatcctcagggtacagctctttggcccttacctttaatttcaagcgtttctggtttatcaggcgtttttcacgctttacctggacaagcacatttcccgtctggtccgccggcctcacaacaatgccgatctccccctttggcagaacctccacgctgtcgcctctcgtaaaccctttttccgggcttgcagcagccggctttcgctttatgggcacaatgccgggaaccggaatccgctccagccctcccggccattgtctacccggtggcttttcctgagacttctcccgggattggtacagatccgccccttctccgtaagcctctgaggccgctgtttgaatcatgtcctccggcatacccagccgctttgcgatatagagggcgcagctgtccccggtctttcccatctccagtctgtaaaggggacgcaggttttcccggtcaaaggccattctggcgctgatgagttcctcatggcggcccgcataggtcttaacctccgggtaatgggttgtaaccaggtaaagacatccccgcagccgcagctgctccagtatggcaatggcaatgcccattccctcggccggatccgtacctgagcccagttcatccagtatcaccaggctctccccggtagcccgctttaatatctccagcacattggtgatatgggctgaaaaggtagacaggttatccagaatatcctgcccatccccaatatcgcataatacaaggttgcgcatggctatgtccgcctcccggcagggcagatgcaggccggagcaggccatgagcacgaacagtcccacggtcttgatggcaacagtctttccccctgtattaggccctgttattaccattccccgtttctctccgcccagctcaaaatccagcggaacattggcatcccccggcagaaggggatgcctggctcccttcaggcgtatgataccctgggtattgatggccggctccccggcctccatctgtgcgctgagctttcctttggcaaacacaaaatccagttttgccagcagcgccagattctccttaaacccgtcctcctccatggcaatcttatccataagcgtatacaggatacgcctctcctcgcagtcctcctcaatcctgagtccctctatctcgtcctgcagcctggcaatggtttccggctctataaataccgtagaaccgctggcggatcggtctatgacgctgcccggtattttggacttatactccttcttaaccggcaggcacagccgtccgttcctggttaccaggaaggattccgccataaactttttctgcgattttaaaagcgcttccgccttatccttgattttttcttccagaagcagcaggtcccggcgaatatcccgcagcgcgttggacgcgcggtcgtccacccttccgtgacggatggctccctctatctcctcttttagttccggcatcagcctgagattttccccatagaaggacagcggaattccataggatactcccttgtccagatacgacctgacccgtctcaccgcggccaggaacataccgatttcctccatttcctccggcgtaagcagctcgccccggacagaacgggctacaaactcagccgtatgttccatggccggcatgggaggcatgcccgccagctcaagcatctgcctggcctgggtggtgtccctcatgcttcttcgcagctctccctcttccatgcagggcacaagccctctggccatctccctggcctctgctgaattggcaagatccgccagctgttctcttatgatatcaaatgcaactgtcttatatgcttcaaatgttccgttcattgttctgtctgtttcctctctgtttccttgttcatctctgttccctgctggggatatatgataatgttgaatcggttacgaacatgaaagtggaagacaaaaaaacctacggacatccactacaggcaatgtcgcataggtttcaaaagataccatatgattcatctgtcatggattccggagtacacaaaaacaaggcccgccaaacggacaatcatttcatgtacgcaatcggtttatttatcttccacaaacagatacaattaacaaaaagacacctctctttaactattactgcatttgataatagcagatttaaaagctccagtcaacatttttatttcaaattgtgctatactaaattatgccatacgaaaaggacaatgaaaattcggaggaatgactgacatgccttttgtttcacttatcatacctgtctacaatgcggaaaaatacctgcggcgctgtctgaacagcgccatggagcagaccttccaggacatggaaataatcgtagtaaacgacggaagccaggatacaagccttaaaatctgccgggaatatgaaaaaatggactgccgattccgtgttatcaacaaggaaaataccggggtttccgacagccgtaaccaggccattgagactgccaggggcgaatacctgcagttcatggacagcgatgactggctgacccctgacgccacggaaagctttgttcatgccgccagaaaattcgactgcgatctggtcgtctcagacttttaccgggtggacggggctgtgttcacggaaaagcagcacatacgggaacgggggcttctgaccagggcccagtacgcggaatatatgatgcgggagcctgctgacttttattacggcgtactgtggaataagctgtaccgccgcagcattgtccgggagcatcagcttaagatggacgaggatctgcgctggtgcgaggactttttatttaacctgaacttcatccggtacgcgaagcggttcacggccatccagactccggtttactactatatgaaacgcaagggcagcctggtgagcacggactggaaaaaggccaatgccgtgaagctaaagctccgtctccttaaggattataaagaattgtaccagagcatggatctgtatgaagaaaacaagctgaaaatcaacgcctttgccgtgtccatcgcaaaggacggcggaatcggagcccccatgagccggctcaggaaaaagctgagcgaggaggattacattgaggatgaacttccggcaggctacacccgtgtatgccacacactgggtcccatatacgatgagacatcccgcatactgatactcggaagctttccctcggtaaaatccagggagcaaaacttttactacggccatccccagaaccgcttctggaaattgatggcccgcctgtttgaagaacccgtgcctgaaaccacagaggataagaaacgtctgctgacgcgccatcatatcgcgctctgggacgtggtggctgcctgtgacattaagggctccagcgaccggagcatccgcaatgtgatacccacggacttaaaccggattctccgcacggccggcatcgaaacaatcattgccaacggcgacacggcctttcagctgtaccgcaaatactgtcaggaaaaaacaggaagggaagccgtcaaatgtccatccaccagccctgccaatgcatttttcacgctggaccgtctggccgaggcatggagccgggagctcttctgacaaatcggaagcaggtcccggatccaaattcctccaaacgctccaaatccccagatttttcttgccaaaggcatataaaacaggtatgatggagatacacctgaacataattattaaattataattatatatttaaggaggctgtacatgttagataaaaaggtagcagaacttattaacacacaggtaaacaaagaattttactccgcttatctgtatctggattttgccaactactacaaggacgcggagctgagcggcttttccaactggtaccaggtccaggcccaggaggaacgcgaccatgccatgctgttcatccagtatctgcagaacaacggagagaaaataacgctggaggccatcgccaagccggacagggtatttgaggacttcaggggacctctcactgccgggctggagcacgaaaactatgtgaccgggcttatccatgatatttatgacgccgcgtattccgttaaggatttccgtaccatgcagtttttggactggttcgtaaaggagcagggcgaagaggagaagaacgccagtgaactggtaaagcgtttcgacctgttcggccatgatcccaagggactctacatgctggattccgaactggcggcaagggtctacaccgcgccctcactggtgctgtgatggggaaggataagtacatatgtccctgctttaaggtgacaaaggacgatattaaaaaggcaattgaagaaggcgctgattcctttaagaaagtcaaaaaagccacgcacctggccgcgggatgcggccactgtaaatgcaaggctaaaaagtatacgaaaaagcggctgggtaaggttaaataaaagtcattttaaaagcgtgtctgcacacactggtatggtatatgtgcggacacgcttttttgtgattcctgccctcttgccatgtacaaaaagcactcagacacggaccgaaatcacatatcaatcttccggtccttataataatacattctgtcccgttcccctatctccctgaggatacggcacgggtttcccactgccaccacattggcgggaatatccctggtaaccacgcttcccgcgccaatcacagaattatccccaatggtaacccccggcactaccacggctcccgcccctatccacacattctcaccaatacgcaccggcatgttgaactggattcctttcctgcgaagctccggttccaccggatgtcctgcagtggcaatggtcacattgggcccaatcatgcaatgggagccaatataaatctccccgtcatccaccagtgtcaggttaaagttggcatagacaaagtcccccatatacacgtgtctgcctccccagttgctgtgaagaggcggttcaatatagcagtcccgtccaatggagccgaacatctgctccagcagaccggcacgcctggcgctttcctttggcctggttgcattgtaatcatagagcagttccatacaggccatctgccccttcagaatatcctcgtctcccggaaaatacaggcgtccatcctccatgcgttttgccgcactgtcctggtctctcattccctctatcctaccgttctggttcctgtgttcatttctttccgtctccatccaaacattcctccctttccaaatgcttctgtgctgttggaataattgtactatattaccctggcaatgaaaagccaaaaaaatccgcgcccaccggagcggcacagtctgctgcccgaattattttaagcagattttccgtaaggctctgaccgctgcccggcgggaaagaatatctatgggctgatgcgcccgtatgtggacaacgccacttccccatcctccaggcgttttaattttctgaataccattgccatgaacagcactgccgccccagaggagactatatccgccacagggccggagtacagggcccctgtcaccccaaagaatcccggcagcatcagggccaaaggcacgcttaacacgaagtccctgagaagggacagcagcctggaaaagccaggacatgcttcagtatctctgcgtccggcttaaagcttacaggcttcaggcagaaggatttgggcttaaacagataataaaccgtcaaaagggcggatacaatctggccggtgatggcagccagggcagctcctttcattccccatcccatcacaaagatagccacaggatccagaacgacgttgagcgcacagcctatgagggtggaaaacatggcaaatttttgggaacactgtaatgcattcgctttctatatttcacgtacaaaaaggaagagcagaaaacatctctatgctttctgctcttcccgaattactttacactatttacgttttaccgataattttcaagaccctattccatataatctaacgggtccaccgtcttatcctgatgtttcagttcaaagaatacattgacgccttccacggaataatacttggttggctctgacacgtagcccagggtctgtccctttttcaagtactcgccctctgccgcgcagacctcctttaactggccgcaggtagctgtgtactcattgcccaggtccatgacaacgtaatttccgatttcctcattggagcccacttccagtatcctggcattggccggggcgcccaccggagtgctcacatcagactgtatcaccagtccgggattgcatttgtactggtccagggtggggaaataaatggtctggtccatgctgtagtccaaaagcacatttccttttacgggccattccattttgctggtatctgtaaaattcagcaccagcgcatcggccgcatcttttcccgctccagcttccgccgccaggtcatttccctggttggcgttctgggccacggccgccttggtaggagccggctcgctcttttgtgtctcttttgccgcatcagaggcacctgccacctgcggcatttccggtgcggtctcctgggcaatcatttcgggctggggcacttcaaggtatggattggtctcattaccttttcctctttgtacggtaatcactcctgctgcggctactatagtcagcaggcctaacactagcatgacaagaaacagcttatccttgaacatctggtttactttctctttcacgtttatcacctcggtactattcttaccaaaccaaggctacttattcagaaatgaaagcaatatttttataaaaatatccaaggatatcttcggccttccatccctcctttgctttctcattggcagtggcctggctcagcccgtagccgtgcccaattcccttcaccaccgccctgattccgtcctcatagggctccagcacaaagcaggaggaagccaggcccagggcatactgcacctcctctcctgtgtagccggcactgccaatctgtacggtatccacatacccggcatcgtccctggacacaatctgtatggtgtccggcacctgagatgcctcaacggtcctggggccggattccccggctggaatgccgttgatatccgacacaaacgattccctggaaaaggaaagcatctgcatgtatccctctgcctccacatccccgggacagtccacggtctgaagatagggatgggtaaaatccccctgtctcgtcatgccggccgtggccctgcaatacatgggatcaatacattttccctcgtaggtcatgacaataccggaggtggcctttaccgcgtcctccagttttttgtaatattccgggaaccggctggaaccccacagcttttttaactggtccgcctccagataatccatatccagggcggattccgctatctcttcctcatccccggcgccctccatctgcctgcatatgtatgtcctggcaatgatggcctgggctttcagtgcttccggctcgtactccaccggcgcctgcctggcaatgactccgggcaggtattcctccatatccatatagtaggagccgccggtccggtccaaaagaatccgccgcctgccggatacctccttctgctgctcatagcgcagttcctctccccggatcgtgcctgtccatgcaagggttcctacataaggcaccatgagcccggtgagggccgcccatatgacgcgtttattcacaaaatccaatcccctccttcctgtatcagggtactcccctatcattaatatatgaatattaggacatacctatgtgccatgccttttacagcacaaaaaatatcgccgcaccgttctcatgccggcaggcgatatttaggttattatataatattttcccagacttacccgatatatgcctgaatcagcctgaacgtattctctgcgccgtccctgtggcttctctcatatccatgggatgcgtagacgcccggcccaatcagggcatggcgcacgtcatggcctgctttcagggtagtctcaacatcagaaccgtaatgcggatacacatccacggcatagccgattccatgctcctttgccagctctaccagacggcacacgatatcgcagttataggggccgccgctgtcctttgcacagatggatacctcacgctccgtacactgaaggccctctcccacacagcccatgtccacggaccaggcttcggtcacgccctccggaacagaagcagcgccgccgtgtcccacttcctcatagatggtaaaatgggcatatacccggcgctcagggttcacggactcatccttaatatatttggcatatcccatcaaaatggctgcggacagcttatcatccagaaaacggctcttgatataaccggatgaggtaatccttgtcctgggttcaaagcacacataatcgccaggcataatgccaagtttcaccgcgtcttccctgcacttaacatcctcgtccaccagcacctccaccgtatcccatgtgcgctcggtcttctcatagctgccgtttacatgtacggaggcatccaccagctggcaggttccctcatagattccgtccgccttggtgataatccgcacattctcagcctcggcattagccggcttcatgcctcctatattggtcagcttcagcctgccgttttccttaatctgggcaaccatgccgcccagggtatcacagtgggcctccagcaggattccgtcttccttattcctgcctccgaaatcggcgatgactcctccctttaccgtgcgcctggccggcatccccaatgcttccaattcctttaacaggtactccgtgacttccctgccataaccggaaggactgtcaatggccagcagattcttggcctgctccattatataatccacatacttcctacagtcagacatatccgttctcctttgttgttggtatttcttactcagagtcattctaccagaaaaaaggcggtattacaagcggggtgtttagaccactatggtaaccactattatgacaaatatatcaccggatattctatttacttaataacagcgataatactttaggcctcgctcccctttcatatttaaactttaatgcatgtctaattatctctggaaggtaatatttatcattatcaattttcaaatatccctcctgtttcattagcttttcatccgttgctgttaattcaaaagtatcactatgaaatggaagtattcttttttcttccggaagactttccaatttagtgaaaattggtttaagagcagcgatttcctgtataacctcatttaattttttattagagcaatttgggactgccttttttatttctgctggcataatatagcgatcctcatatattggccgtcctgcatcttcggtcgcatattgtaaaaacctaatgatatcacgagcctgtaattgtccattaaaatctgataatgctgccaaaatccatcttgatgaatatgcttcatttgatgttattttccccagcttcactccccatagcttagtaagattcctttcaatcaattcttgagacgctacctcaacagcaacctcttcttggtaaaatcccgggaccgcttgatttacaagccagactaccaatctcaatgcttccgtcctggaccatcttagttctactgaattataaagcgtattaaattgttcaaaattaacctctattgaatctctagccaaatcttttctcaaaaatattattgcaccaatatttttatatttcactttccattcatttaacatatcctggcagagacctaaaatagcgtttttttctgtcttggatgataatgtttgaataaaaatttcctctaaaccatcaaataaaaaaaccaccctttgagcacattctcctaaaacgttttctaatgattctaaagaatcaaatccccctcccaatgtctctagcattatttgtttccaaaaatctaaccactctaaagaatcatgctcatttctattaaaagttttaattttattgctattatccagccaaacagagttactgatatttccgttagctccacatgcattatactttttaatagctgcttgtagtatatccttaaaaccactggcattagaagatgctaagacaggaacgaaaaatgtccttggttcttttatctctttgttgttttccattttcactataaaagtttcccaatatttatttctcaacatttctctatataaaaatgtcttacctgatcctttggctcccataataattgtatgaggaatatttatcctaaatttttttattaaattattaataggagctgtcattagtatgttaaattcaacattcccttctgcatttatttgagtatctgctaatcgattaatctttcttattacttcatctcttctattaaccgatgttgatattttcttttctttctggacaacataattatccttgactagcgaataaatatttttataaaatgcacatccatctaaatttttgatgatctgtcttaaggaacctagatgcaacaactcactagcaaatggaagttcagttacaagattatcaattagggattcttccttctcgtcgacctcgtcatataaggagaccaatccactaacaatatccaaagtttgtaatccatctggaatcattgtcataaaaatctcaggaattagtgtactctcctttataggcagacctttatttaactcttgtatcaataattctgttcccttaaccgactgatacgatgtagatgttaccaaatattttttcaccctgggatcgaataatagcggagctgaaaattcgcttacgccagctcttaaatcaaccagtacagctgatacattcaacctttttcctaacattgacaaaatctctgccaaaataaacttcttattataactgttaactatactctccggactggcatacatatccaataactgttcgatatatcgataagtaggtaaaacaaaatgttcaacaactttaacatctgtctcaacctgaaaagtcatctcgcttactttatctgccactaatccaactatctcttcgatgctatccattccctgtgttatttccaataaatccaaatagctaaaagaacactgcccatccttggccgtaagccaagtaattcccggggcttctatatctgaatccacaattaaaagtctgctggcctctttaacatctgaaagtgctgaccatgcttttacaaaagcaagaagtgataaagtcctacctactcctcctttatatgaatgaaatgctataactggacaccccggaagactttcttgaatcatatcctcataataggcagatttcttatataatacatttctaaataatggcactatctgcttgtcatgttctgtttcttccccaatctcatatgttactgttaaatatgcttcttttcccaattcaagataaagtttctgatctttatgaatatatttatactcaaaaatatctgccagattttctccaactctatttatattatctaaagattttacataaatataaatatcagaagaataaatttctgcatccaaaatatctttatcccatctatcccggtttaaaaacaaatgtcgctctacatctttccatgtatagaataacactcttctcacatcccttcctcaatccagtctgcaattttttttagctcaatttcatatttatcttcttttactctatccttatcctttactcttatgcaatatctacataattgatggtaattttcggatgttatactatcttgatgtgctgtaatcaattgaggaaatttgaaggtccctaattgtcctaactcttttaatatcttttccagattatgacttttcaaaacatctcttctcttgtctttttcatttcctattatcttttctggattttcctcatgccatttatctaacagcaaatatttcaatccacactcaacgcaataagagagtagtaatcgtttactgtttatgcttgcatttgtttccatgagtttatagtaggccgagtaatgtttcttatatccttgcctgtaatctcttttatctgccagtatcacttactctcctcctccagataattcttaacattgtcttaagtatacaataaatggtttaaaaatgaaaggcaaaatctctaatgataacaaagagacgtgttattgcataactaaaacataaagttatacaataacacgtctttacacttctggcagtccacctgctacagtccgtacacagcggagtatttctccttcagatacctgacataatattccggattaaagtcctccccggtcacatccttcagtatctgacggctgtcttttaactttccataccggtgaatgtgttccctgagataatcccgtatcacatccaccttgccttccctaagcaggccgtcaaaatccataatttccttcatatgataatataactgggctccaaaggcgctgcccagggcataggacggaaaatatccaaaggatccctgggaccagtggatatcctggagcactccttccgccggattctccgggcgcactcccagatactcctcatatttgtcagcccagagctgcggcagcttctccacgtccaaatcttcctctatcagcatcttctcaatctcatagcggatcagcacatggagactgtagctcagttcatcggcctcggtgcggattaatcccggggtaactttgttgaccgcctccacgaaatggtccaggtccaccttgcccaactgttccgggaacatctcctgtatcctggcatatatgggaacccagaaggaacggctgcggccaatgatgttctcaaaaaaccgtgactgggattcatgcatacccatgctggccccctggcccacaggcgtcagagtcaggtcatcccctatgcccagttcatagatagcatgtccggcctcatggatgacagaaaacagggaactgtcaacgcagtccgtgtaatgggtggtaatgcgcacatccttgttgtgaaggtttgtggtaaaaggatgggcgctgaccgccataacgccccggtcaaagtcaaatcccacatattccgccaggaaccgccccagctcctcctgctttttctccgggtaatcgccctttaagaaggagtcctcaaccttctttccctcttccatcaccttcttgagaaacggtaccagttcctttttcagcacgccgaagaaccggtccaggttctccatggaaaagcccttctcatagtcatctaacatcacatcgtacagcttctttccatcctttgccctgtatcccgcaaactttttctggaatccgatgaccctctcaagggttggggcaaacgcctcaaaatcccggtcctttttagccctggcccaaacgccggtagccccggctgtgagacgggcgaattcctgatattcattccggggaatagggcaaatctgctccctctcttccagcagctcccttacattggcggcctctgccgtggtcaggcttttgtcatcccggcatttctccagcagtttcttcatctcttcgcaggtcactgcctggaaatactcccctgacaggaccccgattaccttggaggtaagctctcccgcttccctgggggccagtgtctcgttgtcccactcaaacagcgccatggctgtcttgatggccatggccttatccatgtatgtccttaactcatcgtacgctttgctcattgtttcgctcctctcacattttatgttctccggatgattcatctgattcattcgcccgatacaggtgtaaaacactctaaacaagtttctcctgtatttttattattactcatggaagaggaaaattacctcggaagcagccatcgcagccatgaaccacatgtttgagaaaaaaggggatgacgcggtggagacgctggttcaggattcctgcgcaagataaataattttttggcatccggtatcaatgaataacaccggaatgcctttccattcacgccatatcagatatccattatacaagataccccttcatcaattcatccaccgcttcctggtttcctccggcagcatctatttccaaggaccagtccagtcccctgtacttctcgcaggacgaatcatgttcaataaaatttatcattttgtctaccatttcctcaggccagaccgtgctgtctatttcagccgcagtatatattccctgttccagcatggcaaaaccaaatatgtccttggcatgtgatttttcagcgctgttgaccagctcctccacaagataggccgggatgaacaggataccgctggtggtgcccatgacaatatcgccgggcatgcagactgcctttccaatctttgcaggtccgttataagatgtcatcaggcattccctgatgggggcggggtctgttcccctgtaataaacctgggtgtcaatcttttgcatctgttcaatatcgcgcacgcctccccatataacagcgccccctgtcttggtcctgacattgatggctgtggtcagattcccgcctacaaatgtgccgttccaaaccttgtcaaacatatcggcaaccacaacatcaccctcctgcagatggtctaccacccattggttacaagtacccttatatcctctggcatccccttccgtcctgacagcttccatcaaatcaggccttgtaggcataaaaaccgccgttacagccctccctgccagtttcagttcatcgtgcagcttcttcatttccccctcaaactggaacttgtaatccttaagaaataaaggcagccatatctcctcaattgtcatggtccgcaatttttccagaagatagtcaggtacacggggccttccgtcttcaaaacgctctcccttccagcggctggtcaattctataatctgatcccttgtataataaatcatattttccctctcccattacgaccaggtgcggtcatgtgaataatcattgtcccaatctgctgtatctgcccacatatccgtatagtcgggatgaagatgttcacgcatcacatcatcctccaggttttcaatcccaagacctggcgcatcaggcactgttatatatccattgtctacgattggttttggcaatccggttaccaggtcagaccaccatggaacatccaccgaatggaactccaaagccaggaagttctcagtggccgcgatactgtggaccgccgccatgcaggcgatagggctttccgccatatgtactgccatggcgactccgtattcctgtgccatgtctccgattttcttgttctccagtattcctccgctggtcagtatatccggatggatgactgatacgcctccccattccagaagcggacggaaattctcctttaggtatatgtcttcacctgtacaaatcggcactgtggtggaattcttaagtctcacatactggtctgttaactgccagggtatcaggtcctccatccatgcgatattgtacttctcaatccttctggccagcctgatacaggattctacgcctatatgcccgaagtggtcaatggccagagggatttcatacccaatcacacttcttacatcctttacatactgctccagaatatcataaccatattccgttacctggacccccgtaaacggatggggaatattctgcatgtcatacatccggttccttaagcttctcttttttggtgtcagattgcggctgatagcctcatatgtcctggacgactggtttaaatcccctatcatccccaatggcgcgcacaaagcgcccggaatatcgtacagaagatcgattcccaaatccattttcaggaaggtaaatcccttatccattctcttcttaagggcttctcccatttccttgccggtatgctttccctcaatatccgtgtcacagtacattctgatacggtctctgaacttacctcccagcatttgatataccggtactccatatgcttttcctgccaggtcccagagggcaagctctatgccgcatacgcctccgccctgtctggcagggcctccgaactgtttaatcctgcggaatagtttatcaatattgcagggattctcgcctatgagacggcttttaagagccagtacataatttctggaaccgccgtccctgacttctccatagcccaccagcccctggtttgtataaacctttaccagaatacaatgcatgggagcccctacgatatcagttacccttatgtctgtaatctttaagtcacttggtctggaattggtattcacatgattcataagcatatcgtctctatcttccattcctgtttcctctcttttattctcacgttttacttaacacttccttcatatttgccggatatgagcatactctgcgcaacgatatagagtaacgttaccggcagtgaacagaccaccgaagcgctcatgattcttccccatatagcggaatcagcatacttgaagcctgatatggctaccgtggccgttttctgcacattgctggttgtcataatcatggcgtacaaatattcattccacgccatggtaaatgcaaaggtggccaccaccgcaattccgggaagggcaattggcataatgatataccacagcgtctgcagacgattgcagccgtctataagcgccgcctcctccagcgcgtacggaatcgccttaaaataacttataagcatataacagcaatagggtactacaaatgtaggatatatgattaaaagcgcatatttgttatcgtaaaaccctaggctgcttacaaacacatacattggtacgaacagcactgccgtaggcataaggtatgaaataataatactgttcctgaaaaatgatcttcccggatacttaagccgtgtcattgcatacgagccgagtataccgattgccaggcatatgattgcagtaatggctgctatcacaaagctgttccatacattgtgcataaaagaggtgttataaatcaaatcaatataatgatcaaaggttattacattggaaaataacggcggtcttgccacatacatttcctcgtttagagtaagggatgattttatcatccagtaaatgggaaagattgtccataaaagtgcaatgattaaaatcccatacgtggctgtggtccgcatgacccggctgcgtttcttcattaccatccggtccatctccttccctattcaattccgtccccactaatcaccttctgggataccagaatcagtatgaccataagcggtatcaccgacactgccaccgagagagccctgccaaaggaattctgtataaatgccaggtcataagtgtaagtggagattacactggaggagtaaatcggtccacctccagtgattaaaaatacattctcaaaatcattaaaggtccatatggtggacaaaagtgtggaaatgcccaaaacgcttgagattcccggaagcgttatataccagaaacgcttaaacatacctgctccgtctacataggcggcttcaaaaatctgtccgtccagagtctgcagcgctcccaggagactgaacatgaagaatgggacgcctctccacacattcacaatcatggtgcttaacagcgtgatatcagggtcactcagccacgggatcggaaggcttataagcccggctttcagcagcaggctgttgataatgccataagtgctgtcatacatccatctccaggtagtggcggccaccattccgggcaatgcccagggaatgagaagcgcagtcctgaaaaatgcctttcccctgaacttctggttcaggataactgccagcagaagtcccagcgccagtttcgccgtaatacatcccactgtatagataatcgtattgtaaagggacttccagtaaatcttatccccaaaaagagccaggtagttatcaaacccaataaaccgttccggtacccctaccactttgtttgtaaagcttaagtacaatgcccttataaacgggattccggtaatgccaaatatcacggcagcaattggcaccatcaacagaagcccgagacgcttatctagcagctgccgggaatgcgaatacttccttttttctgatttttttcctgccatcttatccccctgtcatgccaatttcattactagttataaatcttattgaattctgcctccagatggtccagcgcctcctgcggatcagccctgttaacaactatttcctgtacggccttaacgcaaagctggtttgtaaaggataccgtagccctttcatctgacggtgccggataataggtcttatatgtattcttagagttggcaagccatcctgcattgaccgggtccttccagaaatctgtgtcatccactccgttcaccaccggctgccacatagctcccatagcctcaatcatggcattataattatccaggtcctcaaaatagtatttaacaaaatcttttgcgacatctgtatttttacctgtctcaaatattccgaatacattggctccgcccagggtgaacgcctcccctgcaggccctgcgggatatgcaatgatctgtgtgttggcgagaagctccggcttctcctctttcatgctggataccacggaacctgaatttgtgatgacacccacagtaccggccaggtaagcgttgttgttccagctgtcgtcgcccgtaatcgcatcaggaggaatcaggccctcttcatataagcttgcaataaatttaagtgcctccagtgtttcaggagaattgaccgtgacctttccgttttcgtctaccgggattcctccccagtccagtataatggtcctgcaaaatccctcggcgtctcctccgccggacgcacccatggcaaatccgaggccatagaagccgttagccggatcattcatcagtttggcgccttccttcagttcttcccaggttgtgggaatatccatccctgtcttctcccactggtccatccttaagtacatgccgggcgctgtaaatgccagaggcacaagataaggcttaccgttgaacgttcccagtatttttgaattctccgtaaaatccacggcctcaaatatatctgagcactccgctatctgctgcatggaaacaaactgcccaaccagcgtatcatcgcccacaatcagatcaggggcattgcctgcctcaatggcagccatcagcttttgcttcatatcagcagccggtatgaccacataatccacatccacatgattcccgctggcaaattcatctgccttggccttcatcatggtgttatagccctcaacatactctgacttatcccagaacaccatcttcttctgttccacggcgctgtctcctgattcggctgatgcggatgtctcagcctcagcagtggtgggcgctgctgttgtaaccacattttctgatgatttcacagaacatcccgtaaccatggatgctgctaatccaaatccaagtacaagagatactatttttgtatatcttttcttcataacttcctgcctccttgttttttaggctttgaagttgagtttttcacacacaccttcaaaccaaccagttccgactcaaaaggctttccgctgtcaatcagctttacaagcttcctcatggcgattctcgtcaccttctcagccttggattccacacaggtaaaatcctgatactcgtcatctacattggaattcttataatactcaagaatcattacagacaggtcttccggtatcctgattccatatccctttaccacatccatgaattggctcataaaacagctggtgattcccactgccgttggacggtttgcaggattgagccgttcattgaacagcagtttgatatcggatgatgattcattctgattgattctgatataagaatagtccaatctctcgtctttcatttcggacataaattcattaaaagccatacttctcacagtctgcaccacgctgttggattttccctccgtgataatggccacttttttgtgctccaggttataaaaatactccagggcatccttcatcgctttgccatggtcagacgccacataattgtaattctcaacgctgcgtatcttacccacacagacatacgggatgcctgccctctcaaactccctgaaggccagactgtcttcttccaggtcatacagcagtatgccgtctaccagagacgacgacaggctctttaaatactctgtgtctttattgatatcatctgaatccatggaataaatcagagtattataatcaaatttctttgcttcttcgccaagagccgagaatatgaccgggtaatacatggtatcatttaaacgtgaaatgtttctgggaatggctaaacaaactgtcttgctgtggtttttagacgacagcctgcgggcgctcaagcttggtgtataccccaattcatcaattgcattttttatcttcttttttgtctcgtcagacattctctcgaaatttccattcagataatttgaaacagtggacttggaaaccccggaaagctttgctacatcagatattgttgcgttcttcataccctcacctcatgaattatgatattaaaccaatattaccacacttcctgctcaaaaaacatggtcttttcgcaaaacgcgcgtaggtggaacggtttagtagaacggtttatcaaatgtttaaaaaaataaaaattgcttaagtggagcggtttatctcttcccttgttaaataatatagcattgaacattgtgcctgtcaatccattatttatttttatttttttatgcataatttgcattatattgtgcattttaatttattcaattaatttatgcatatattttaatatattttatttctttttttatatttattgacaattccatgacggggcctttaagaaaatatgcagccaggatgatccgcgtgagaaatcaccctgagagatattgggaacgcacggcgctgttccatagggtctgtatggcgttattccacgccctataaaaaacaccagccggccggatcacctccggcctggctggctatcttcttctatcttactttataaacagctgtgtccaataatcggttccgctggcatccttataatgtcctaccccaatggaagtaaaatcacggttcagaatatttgccctgtggcctgagctgttcatccagctctgcatcacggcctcaggcgagctctgtccataggcaatgttctccccaacacttctgtagctgattccggcctgtgtcaggactgtactgaagctgctgccgtcaggtctggtatgtgaaaatgtattcttgatttcatgcgctcttgtattggctgcctctgccacgccttcgtggacagacagtggactaagacctgcctttgccctctccgcatttaccagttcaaccactgcatccgcatatgcgtcctggctgccgccgttatccggttcaccgggaaacgtatcctccggagcttcgggagccgtgcccgggttatccggcagcaccgggcctgcgccccacccgttattctggttcccgttattattctggccccagccgccgttctggccccaattcccattctggcctatattaccgggaaagcagttctgtcctcccactccaatcacatatgcgcttccattggcaaaaggaatatgatatgtagatacggctgccagtgatgtcaccggtattgctgtggaaacaagcatggctgcggctgcggacaatgtgtacatggatatctttctcatggttacctccttatgtgttacataattattacatttctgttacaaaactataataacacataatatttggaaagccattagggaaagattggaaaaaatgtatgaagcaggctcctctccaatgccagctcttttctattgccagctcttttctatccctttatgccagtggatgcaataccttccacgtaatatttctgaagaaatacgaacatcagcagcatggggattgccgatatggtcagggacgccataattgctccatagtgtattggctttgagccaaagaacgtctggatggccagctggattgtcctcatgtcctcccctgtgaccaccagcatgggccacatgaaatcattccagtgggccacgaagtccagaatgaatatggtggcgtacaccgtgcctgagataggcattacaatggtaaaaaatgttttgattgggccgcagccgtctatggccgccgcttccagcaggtcatcgggaatgtctaagaagaactgacggaacatgtagatagagaagcatttccccacaaagggaacaatcagtccggcccaggtattcacccagccaaggctggcaacctccttgtaaaggggcagcatgatagcctccatgggaagcaccataaggctgatgaccactgtcagcagcagctcctttccggggaaatcgaattttgccagggcatacccgcagacagaattgaccgccaggtccaggataacaatgacaaacacatagaacaagctgttgaggatgaatttcatcatattcaccctggtaaacacctcaacataattcccaagggtagccgctgtgggccagaacgtcctgatggtgctcatgtcggagaatatctgagcctccggtttcagggacgcggcaatcatccacaggagcggcgatacaaaaatcagggcgacaattgcatttccgccataaaacaaaacgcgcttcaggatatctttttcctttaatcccatgattctccctccttaatctgccttgatgacccgctttaacatcagcgacatggttaccactatgacaaagaatacggttgccacgctgcaggcatacccgaaattcctgctctggaagccctgttcatagatgtaatacacaagggtcctggtagagttctggggaccgccctgggtcatgacatagggctgcgtaaacagcttcatggcctgaatcatagtgatcatgacaacgtacttaatgacatttttaagccccggaagggtcacatacaggaacttctggaaagcgcccgcaccgtcaatggacgccgcttcatactggtctcccggtatggcctgaagtcctgccaggaaaatcatcatctgataccctgccgcctgccaggccgacatgaagataatggaattcatggacgtcttggggtctgtcaggaaaccgcagggggcaaagcccagctttgtgagaaatgcgttcagaagtcctgtgctgggattgggattgtacagcacgctccagaggatggcaaccaccaccatggaagtgatgttggggctgaaataggctgcccggaatacggatactccctttctcctggatgaaatcagcagggctaaaagcagagccagaatacactggaagggaactaccaccaccgtaaagtagatggtgtttaccagggatttcttaaagtccctgtcctcaaaaagctccacgaaattgtccagtccgcagaatttaatcttatccggcctgaggatattgtaatcagtaaatgcatagcggaccgtagaaacagcgggcagtatgagaaacgctgccagcagcaccaccgccggaaggatgaacaggaacgccgcccgcctttcatggaccttattcttagtaccatacttcatgatatacctcctttccctttttaagggaagggggagcatcgtcccccttaccattactccgcgtagttcttctggtagttggaatcaaaatcagctgccagctggtctaaggactcttttacatccgcgcccgtgaacatgttcatcatggcctctgagaatccgggtgacagcacggtatagccaggtgttctgggtctgggatggcccgtattcaatgactgctccttaaagagggaacggggatattcgttgtactctgtcagcgtgtcatagctggatgccctggtgggaagttttgctatggcctgggcataggaggtcacattttccttattcatcagataggagataacaacgcccgcggcttcctcgtccgcattcctggtgatgcaggcagcccagtccccggtaggcgatgtgtttatgccgccattgtcagccacaggaaagtatgtaacgccccagttcaggtccgggaaggactgctccagggtggccacttcccaggaaccgcccagcatggttgcgcattttccattgtggaactcctgcttcatggggtctatattggcatatccatcctgaatcaggctgttgaggaaattggctgcctgaattcctttttcactgtttacgtagccgtctgccttggaaccgtcctcgcttacaaagtcagtgccgttggaaatccagaactgctccagcacataaggcagcccctctcccttatccatgataatgttggttcctgccacgccgctggtggtcagcttaccggcaatatcagcgaattcagaccaggtcagggcatcctccatcttatccggcatggtgatgccggccgcgtctgtcatatcttgattgtagtacaatgccacggaactctcagtggctcccagggcgtacagctttccgtcataggttccctgcaccttgatggattccacgaaatcactcaaatcctcctctgtaaaataggcgtcaatgggtacgatgattccgtccgccgcgtaattggatatgtttggaccgtccacaaacagaatgtcaggcaggtcgttgcttgtcacggccgcgttgattttatcctcgtaggcataggaatccgccctcacgatggcctccctcttaagctcgatttctcccttgtgttcttcattgaacgcattaattttttcaacccaccatgcttcaatggccggttcatccgtgggactccagatggtcaccatcttagccccgtcgctgttggtcctgcctccccctgatttggaactgccgccgcagccgctcagtgcggatgccgccaaaaccactgccagtgtcatacatgccaatttcttattcttcataaccaatctccctctcttcatgatttatggctccagatggactccatggtccatacctccaaacgattcagacttccggccgaaaaatccgcctccagatgcccctctgtgctgtcctggtaaaacagcttggtgcccgcggcctcgccgtggtttaagtaaacctccgccaccctccggtccataaaaatctccacatagcggactccgccgacatcagacggaaagcaaatctctttcacttccttcctggtggataccaggcttgtcactccttttttccgctccagatacagggcgtcatttccctcccttgcaagggtcacaaggaaatcctggtcatcgccaagtttgatttttacaaaaaacgagttgcccggaacatgcacaggcgggatatgctctccttgaatctccggggctgccgcctgattatccgcccgatttccagccgaatttcctgttgaatttccggcccgatttccaggcgaatttcctgttgaatttccggtcaaattcccttcctgcccgcagccatcattttcactctgtcctgacaccgcgaatatacggtccttcagcagtccgtaacattcctttaccggttccgtgaacagcctgccatgctccatgtgcagttcccttggaagggaaaaactgccgcaggctcctcccggcttaacgcggtgttcaccgtaaaaatcagaaatccaccctatggcaatccttctgccactgtgttcaaagctctgcacagcatagaagttgctcccaaaatcataccactgctggtattctgtcttaaacctgcccccgtcaaaggtgccggtatagcatcgcgtcatctgataccggccggcctcatcgcggtggcacatccatgcgcctgcggccacatatttcccatccaattcaaaaaagtccggacactcaaaggtcctgattcccggctcgtgctcctgtaagagagggcctttaaagagccactttccgccctcccggacatacagcaggatggacggcacaccgtccagactggagcccaataccatatagtccctgccttccgcccgttgtaccttggggtccctgaaatcaaaggatgctccttccggtctttcagtgatgcatgggcgctccttttccacatggatgccgtccctgcacacggcctctgtctgccattccctggtttcctcaccgtcctcctgcggaccgtggtgccgggtcagatacagatgcatctgttccccttccacctgggcgcttcccgaaaaagcccctcccttgtgttccttatccctccacaggccgggctgaggttccaggacatagggcatatgtgtccaatgcagcaaatcccggctcaccgcatggccccagtacatgtcattccattcctgcccaaagggattggactggtagaacagatgataatatcccttgaaccagcagagcccattgggatcatttacccagttcataaaaggattaaaatgatactgctcccttacaggagtatcataccattttcccagttccatttcatcaccgctgtccgggtccaggaaccttatcccccgctccatcaaatccggtcctccgctcagatacatctggatgagaccaacccctttatgcctgatgcggtatgtaccgttctggggaagggccagctgtaccaggcggtaccagtcgtcattcatgtgaacctgctgttcctttcctccgggtccttccaggcagatccagccatccctgtcatctgatttttcagcaaatatgcagatggattcgtattccccgctgtcaaattccaacatccacatcacctccccttatcctgtctgtgtctatttttcctatatggaacccgttccacgttcacactatagtactattagattagtatgtcaatatctttttgtaaaaacgcgcaaaaatagtgcacaatacacagttttttgctctatatattgtgcactatttttattctttttccaattactgtatttgtcgttctcaggcatcctctgtgttctttatggaacgttttataccgttccacctttttgtatggaaacaggcagaatttgttccatctctacttttttaccatccaacagatccatcatggtatccacacaggccgctgccagtcccggtatatcctgcgctatgctggtaagcttgggggtaaacagccgggtcatgtcaactgcgtcataaccaacgatatggagtttctccggaaccttcacgcctctctggtttgctatgttaaggcagtagagggctcctatatccgtagtgaacaccccgtcaatatcccggtaaatatccatgtactgttccatgatacggcaatagtaatcatattccatcatattccaggccatctcaatggttttcacagatgccccattttcctccatgacctgcttaaattcctgatgcctgtcattggaaggcgtatgaacgcggaaggaaccgccaaagttcagcacgttcctgcagcccgcatccaaaagaagccgggccgccatcctgcctcccgccttgtggtccgagtgtatcatgggaatacccggtcccagattccggtccatggcaaccaccggcttgttcaggttcaagtacgcgtaatcctggagggaatgggcgccggtgatgattccgtccattacattctggcgcagcatgtcaataaagtcctgctcacggttgcttatctcaatggtattgcagatcatggccttatacccgttcttatagagctggatttccatgtgtttcagcagcttgctgaaaaatggattttccatatcagggaccacgattccaatgattcccgtcctgttccggaacaggttcctggccagctcatttggctgatagtccagtttctcagcgattgcaaggatttttgccctggtatcctccgcaacatagcctgtcccgttaagggcccgggaaacagtccccacccctacacccgctttttttgccacatccctgatacttgccatatgcccagacgacctccatcgcataaaacttcattacgtagtactaatatcttagcaggaggaaggtaaaaacgcaagcgggacccgataaggatttggcagaaaaccatgtggagacttattttacatgctgctttttccgggtatccattttaattttccgtcaatattcacaattttccctggcaacctttcacaaagtgttgaagctttcatgaaagcgtttttaaatatcaaagaaaatcaggagggaaaacaacaatgtcacaaaagaacacatcaaccagcacttcaaaattccagcttgacggcaggcccggtatgaaggaggcagtgcctttaggcctgcagcatgtactggccatgtttgtagggaacatcgttcctatgattttagtagcgtccgcagccagcctgtctgttcaggacgccaacatgctgctccagtgctgcatgctgggagctgccatctcaaccgcaatccagctctatcccatacgaatcggcagcatacagattggctccggccttccctgcatgatgggacttacatatgtattcctgccggcctgtctttccattgctggcagcaaaggaattccctatatcttcggcgcccagattgcggcgggcgtcattgcggtcagctacggaacactccttaaaaaaatgtcatccttcttccctcctgtggtgacgggaaccattgtcatgaccgtaggtgtttccatctttaatcttgccatcggcaatattgcgggcggtacatcatcgccggatttcggagcccccatcaactgggccgtcggcgttttcgtggtgctggtcgtactgggattcaatgtgttgggcaagggccttcccaaggttgcggctattcttatcggtatgacggcaggctacattttatctgtcattctgggactggtaagtttctcaggcatcggagaagcggcctggtttgccgttccaaagccatttgcgtttggcgtaaaatttgatttgggatataccctgatgtttgttctgctttatttcatcgttgccgtacagatgataggagatttcaacgtatcctgcatgggcggactggaccgtgaactcaccccggatgaaatcggaggcggagccactgcaaacggaatcacctccattatttcagctgtgcttaacagcttccccacagccacttacagccagaactccggcatcgtggcattgacaaaagtgtgctcccgttttgtaattctggttggctgcggaatcctgttcctggccggtctctgtcccaaggtaggcgctgtgctgtccaccattcccaactgcgtgattggcggcggtaccgtggttgtatttgcaatgattgccacctccggcatgaagctccttgccaaggccggctactccaaccggaactgcctgattatcggcgtatccctggcgtttggcctgggcacccagttctgcaaaggcgccagcgcccagttccccgcgggaatcgccgcaatgctggaggagaacagcgttatactgacatccctgctcgcaatcatccttaatctggtgtttccaaaggatccggttcaggcggaagatccggcgggtaaggcacaataagtgatttacatagaaaatagcactggaactaatatgatacctcttaagcagacaaggcaaataaccaaaatctgcttatagaggtatttttatagtcaatttccctgctgcggcacaatttagtgcaatggcttcccaagcgtatcctgccggatttgtctcattgcggattgaaccattaatttcccataaaccgccaaaatatcctatagctgaaaataaatgaattaaggtacaaagtaacaaggtctgcaataaaacaggagcatcacccccggcacaaaatccaaataatttcatgccattgtgtgacactccctttcgctgcctatttcgatacctccctaattctccatcacatcctgataagcagcatggttctccagcgcttccgtcatgaccgccatccgggacaaatcacctaccagaattacaccgctcatccggttattcaggaaatagtatttccggtactgttccttacccatatccctgaattccactgttttataatagagattcggatttcttccgttgtcgcccgcggcaaacagggcggtgttcataccgtggaaggtcagggccgcaggtaccggagtgtattccagactgtcaccggccgcgttggcgccggcagtcttgccctgctccacagcctccggccagatgccgtaattcgtgtcatggtactgtgcacagtcaccacaggcatagatgccggaaacggaggtctccatcagctcattgacaactacccccttcttcgtctccaatcccatcttcttcgccagctctatgttggcgcggatgcctgcggacacaatcaccatcccggcttccaccacttccccggttttcaggcggacaccgctcacatggccgtccccctcgatggcttccacattgacaccggtgcggataaccacaccggctttggatgcaattatcttcaactgctccccggaactctcatccagctgacgtcccatcagggatggcgccatttcaagcactgtcacctcaaggccggccttcttaagctcccacgctgcttccagtcccaaaacgccgcctccgataaccacggccttccccgtgctcttcatcagagtctccacctttctgacatcagaaagccgtctgattgccgccacctccggcaacttgcttccttcgataggcggaataaagcactcgcttcccagcgcgtaaatcagcttcgtgaaatgcagcttcgttccgtcgtcaagaagcgcctctctggcatccatatccacgctctccacccgttttccaagcatctggcgcacctgattttcctcataccatgcagcatccaccatagctatctgctccggctccagacctgcgaccagggatttggtcagcatgggacgcttgtaggacggatagggctcctcggataccataataatccgccctgtggcatccctctcccggatggcttttgcggcattaaatccggccgcgccgttaccgagaatcagatagtcgctggccgtgttgttggtgaaatcatttaccacatcgtccaccggcacaaagttctcccggcccacgccgcagacaggacaaatctcgatggaggaatcaaaaatctccccgcaaaccagacatttaaccagcttcctgctgccctttgccgccgctgcccccggcttcttggactgcaccagacatccgaactggtatccgaactcataggcactcaccaaatccgcctccgacggtttgaaccgcaccctgaacccgtctaccaccttcattttcaactgtttcaagcgctcggtgatatggggtactccctcgccgctccagccgtagctgccgaacgctcccgcatattttccgccgtgggtcacactgaacatgcccagcgtcaaatcccagataggacgcagcgcctcggcaataatggtgggcgtaccaaacagaattccgtctgcaaactgtaactcctcctgcaccttcgccgtgtcggccgtcaccatatcgtagctgcgcacgtcgatatcgccgctgtcggcaattccctccgcaatcttctccgccagcagtcctgtatatccgtatgcgctgacgtaagggatgataacggtctttttcctgttgggattcaccaccgtggaccattcccggtaaagggccatcacccgcttaattctgtcacccgccagcaccgagccgtgacccgtgcacaccatgctgatgtccagggatttcacccggtccagggccttcagcataaacggtttatacggcccgatgatgcagtcaaaatagtagcgcagggcctttaagtaatcgtcctcattctgaatcttatccgacaccacctcttccaggcagtagtgggagccaaaggaatcgcaggtcaccagaatctgctcctcctcgataaatgtgtacatggtatccggccagtgcaggtttggaaccagcatgaaatgcagcgtccgcttgccaatggtcatccgctggccgtccttcaccgcaatgctgacaaagtcccggttcacaatttcttttaagaaactaatggcacagggagtcgccagtatcttcatctggggactgtaatccagcagccgctccacactccccgcatggtccggctccgtgtggctggtcaccagatagtcaatctttgtgatatcaatcactgcttttaatttttccagatattcgtcaaaaaatctggccttcgccgtctcaaacaacaccaccttattcccggtcttcatcacataggaattgtaggttgtgccaaactccgtatacatcacaatatcaaacacccgcagcttgtcgtcaataatacccgtccagtagaacccgtctctcaatttaatcgtttccatgatcagcacctctcctttacacacatgaattacagataataagttattctatgattccactttaacgcaaatcccgccctgtgtctattgcatttgccacatattggcaaactgttatcaatcttagccctatttgtacaattttgactaaccgcaataaggggccgccaaaaagagcgatacgaaaaacatgtggaatatcattggaaaaggaaacctccggaaaaaccataaacatgatttttcggaggccggttttcagagagaaaaaaacagggaatcgctgagcaaagggggagtaattatgaaatattagattataccggctttttattatattacaaactgctctatgtaacgttttgaaagctttaagctgtccagaatcctttcacggtccgcctcaaacgcccggtcctccacttccacgcatgtaaacccatcataaccaatatcagtcagcgcagacacataacgtccccagtccacatctcccagtcccggaagcttgggttccatatattccagcggatatgccatgattcccacatccttaagcttctggggataaaccttgatgtccttatagtgtacatggaatatcctctctctgaattcataaataggctggatataatccatcatctgccacacaaaatggctgggatcgtaattgatgccaaagtttttgctgggtatcatatcaaacatttttcgccaaagagcgggtgacgtaaacaggttattcccccctggccactgttctcttccaaacagcatcggacagttttcaattgcgattctgacaccgtgctcctcagcatatcggataataggaggccatatccggccaaatgcctcaagattttcttccacgctcttagtctgatccctgcccacaaaggtggtgaccattccaacgcccagcttttctgaaaatgcaattacctttttaaggtgccgtatggcagcctcccgtttctgaaaatcaccgtccatggtattgggataatatgccagggcgctgatctcaactcctgtctttttacatgtctcatgaatatggttcacgtactcacggctgtcattatccacgtcaatatggctgacacccgcatagcggcgttccgctttcccctggggccagcaagcggcttccacgcactcataccccagtccggcggccgtatccatcatttcctcaaaagtccatccatccaggatggcacttacaaaccctaacttcatctcattctccttagcctattttaattgtttttcctgttttggcagattctatacttgcaaaaactgcttccatggcgctgagtacgctttttccactgagctgtgcttcctttccgtgaacaatacagtccataaaggcgtctattacgcctgattttgtctgcttgtcattggtctgaatctgatctacattgtacagtatgacctcattgtccggctttataatcttgatgcagtattccgggtcctcatagatacgcataattcccttggacccgtacaatatggtggagttgtcttcctgaccatagtaggtccagctggctgtcatagttcccactgcgcctgattccatcttatagatacagatggcattgtcgtccaccccgatcaggtttccgctcccatcttttttatccagggtggtaatcacagctgtagtctctgccacatgttctcccatcaggtactggatcagatctgtcttatggattcccagatccgccatagctcccatggcagccttttttttgtcaaaaaaccaggtattgctgccgggatcaatgctccaggtttccgggcctccatgtccaaaggtagtcttaaaggttataacctttccaatatccccgcgctcaatcagcttcctggcaagcgcatggcctttggctagtctctgattctgcccaatcataaggcatttccctgtttcctcagcagcttctgccatctggcggcactcctcaagggttactgccattggtttttcgcaaagtacatccttgcccgccttcagtgcggcaatggatatctttgcgtgaaactcattgggaacacatatggagacagcgtcgattttttcatcctccagcagttcttcatatgtctcataaacgcggcctccgtatgtaccggcgagctctctggccctctccgggttcaggtcataaaacgcataaagccttgcgtcccggtggtctgcgtattccggaatatgccttacctgggcaatccttccgcatccaatgattcctatacttttcatcatgaacctccctaattctttgtgagcatatggaccctgatggcgctgattcccagagatatgataatcagggcgccggaagcaatctcctgaagataagagttgactcccagtatattcagcacgttggagataagtcccataagcagtacgccgaaaaatgttcctacaatatttccctttccaccgttaataggcgctccgccaattaccaccgcgcccatggcctgaagctcatatcccgctcctgtggagggcagggccgagcccaccctggacagcaggaggacagcagccaggcctacaaaaaagccattcatggcaaagaatataagcttattcctggtcaccttgatacctgacaggaatgccgctttctcattagaaccaatggcaaagatacgccgtcctatctgcgtataccgcagtataatgccaaccaccacgcaccccatcaggctgataataaaaatcagaggaactgccccaaacaggcggaaccggttcattgtatcaaattttccgtacacggtctgaatgactccttttgtcagatagagggccgctcctgtatatacgctggtggttgccagcgaaattataaaggaaggcgccttaaaaagaatcgcaagtaccccgttaaaaaacgtacagaacatggctgtgaggatgcctgcggctgcggctgcgggaatggggatccccgcgttcatcatcattgccatgagacaggagctcagtccaatgaccgccccaaccgatatgtcaaaattccctgatataatcaggatagtagcgcccgcagccaccaggcccagaactgcaatctgctcaaaaatattcatcacattgttaagcataagaaacctgggattcttcagcgccgtaagcacggatatcagtaaaataatcaacagaagtatgagccactgctgacttaaaattttgtatttcagattatttctgtccttcatctgtccttcactccttcactccaatatactcttttatcagcccatcttctgtgacatctgccgaatccaggatacgcaccagccgcccttccctcatgaccccaatccggtcactcatggaaataagctcgggcatgttggaggataccataattacaatcttctgttcctttgccagtttttcaatcagcttatagatttcctctctggcccccacatccacgcccttggtgggctcgtcaaaaatatatacatctccgtcctccagaagccagcgggaaataaccaccttctgctggttgccgccgctcaggtttcctacctcctgctcctggctgaatacctttatcttaagctgctgtatgcttttatccacaattcctttttcctttctcagattcagaaaaaaggaattgtcgttttttgatatagtaagattttccctggccgaacgtatcagaaaaagaccttcgccctttctgtcctccgagacaaggaatacccctctttttacagcggatttgggatttgtgggagtgatatcctttccatccagggacagggttcctgaatcctttttatcggccccgtatatcatacgaaccagctccgtccttcccgcgcccaccagaccgcccaggccaaacacctcccccctggacactgaaaagctcacatcccggacaatacggttgccggaataatgctctgccacaagagccctgtcaccggatgaaaagctgcctttctgatagaagttggatgcatcccttcccaccatggccttaatcagctcatcctgatttgtctctttcagcataagctttttcaccattgcaccatccttcaggacataggccatatctcccagacggaacatctcctctaaataatgggagatatagatgatgcccagtccctttttcctcaactgttccaccaggttcataagagatgcggtctcctcctctcccagagaagccgttggctcatccataatcagaatccgcgcttcctgatgcagggcttttgcaatctgaagattctgtttctgacccggtgaaagctcctccaccagcatggagggcttcatatccatactgaggctctgaagcagccgccttgtcctctcctcctgctccctgctgttcacaaaggctctgcccctcagcctttcatttcccaaaaatatgttgtcggataccgtaagggagctcacaaggtcggcatcctggtaaatggtggcgattcccagatgcatagcctgaccgggagtcatccgttcatatgtggttccgaatatagtgatttttcctttgtccggtttttccgcgccggaaagtatcttgatcaaagtggatttgccggccccgttttcccctgccaggcaaataatctgccccgcctccagctccaggctcacatccttcagtacctgtatgccggaaaaggatttgcagattccgtctatggataaaatatttcccaattcctttccctccctttatctataaatggggattcatatgaacccccactgaaatgtttcctattgcattaattccggaaaatactcttttgtcaaatcccagtaacactcatccacttcccatggcactaccttggtcttgtcatcaatattactctggtccacaggcataataggaagttcaacctgctgctgaactgctgtgctggctccggttgcgtactgattcaatacctgataggaaacaagtccctcccagccaggagatgatgagatggtataatccagcttgccgttcttaataaggggaaggcccgcgggagaaccgttctgtgaaaccaccttataccggtctgccactccctgagaatccagcatctggataataccggctgccatgtcctcattcataacaaagataactgaaaagtctttgccggaagcaatcgcatcctgtgccaccgtaatagctttgctgggattatattccccttcctgaatatcgattatcttatttttgcccagttcatccacctttgcctgcatagcttcatttatcctctggcagggcactgactcaaagttgcctgtgatcacaaagatattttcacccggacagttatccgcaaaccactgtccgtaattgttgcccatctctgtccagtcaaagtcaatagctgcaacaatgtcgttcccattgttatccagagctgttcccacactgtccgttgacaccagcggtatacctgcctttgcgcatttttctgctgctattttagctccgctttcattgaaggaaaagatacacagcccgtcaacgccctggttaatcatggaatcaatattggagacttctttgctgacatcgtagtctgaatttaaaataactaccttgttgccatccttctccgctcccatctgaaatccttccacattgcgctgataccatgtatccggccccggcgtaatataaccgtaaacctttccccccgcactttccgctttggactcctctgcttctttggacccggcctgctctgtctgagatgtttcttcctttgccgcggtctgtgctgcggttgttgtctctgtctgggatgaaccagaacaagcagtcatcagagtcattcccgaaaccaccattaatgctaacagtccttttttcatttgacaccctccttagttaaatgtttttgatttataaatgtctatttataaattctccttcagaaacttcagcccctctaaggccagcgcatcctggctggcggccaggggtctccacagagaaaccgcttttgctatctctgttatgtctgtggtaaaagattcaatcaccaccgcgccgtcataaccaatatccctcagcgccttgctgatttcatcccagtcaagatggtcctgtcccggagttccccggtcattggaacatgcatgaaagtcaaacagcctgctgcccgctctgcggatcgcctgccccagactcttctcctcaatgttcatatgaaatgtgtccagcaaaaaacctacattatcacatccaatctcatccagaagttccaccccctggtcaactgtgttcaaaaaatccgtctcaaaacggttcaggggttcaagggccagcctgattccttttgtggcggcatagcccgcaagatccctgagattatccaccgcataggctctctgccgcgtccgttcttcctctgaagccatccttgccttaccggttgccgcatacataggtcccgccacatagggggagccaaaaaccgatgccatatcaatcagcgtcctgatatactccatccccttgtccctgtaacgggaagcgtctgagctgatatcccgctccgggccaaaggctccgcatatgttaacctgtatacctgccttatcagcttcatgcttcacataggcagggtcaaatgacgagggatcttccacgcctatctcatagatgtcaaatcccagctccttggcatgctttaattgttctatggtatgatttgaaaacggggatacccagacataggaacttacaccaaacttcatttttcctcctttttatgtgttttacatttttatgtaaaatactttcattttcttccgttttttatgtcattttcatttattactatatctttttttcattttattgtcaatactttgtaaaaatttacattttttacattttctctgtacatttcttctattttggtgtattctaaatatatcattagattgtgaggtatcagccatgtcaacaaaaccaaccatttcccagatagcagatatgtccggtgtctctatagccaccgtatcacgctttatcaacaatacagccgcagtcaagggcagcaccgcaaaaaagatcatggaagccatccattctctggattatccactgcctgaaagctttattgccaccaacacgaaaaaggacggcaaggtcattctgatcaatataccgtccgtctccaatccattttacaatgatgtaatcaagggagcacaggatgcggccctgcgccatgattactacaccctggtaaatgtccagcatcttaattcatctactgaatcaaccttttttaatctgctaaataacattaacctctgcggcgccattatattaaacgccatggatcaaggatattttaacagcctttatcataccattccctttgtacagtgctgtgagtatacggaaaaccagaacctggtctcctataccagcattgatgacgtggcagccgccaagacaatgatggagtacatcctgtccaccgggcacacaaagattgcttttctgtgcggaccggaccggtataaatacgcacgccaaaggaaggccggatatatacagacgctggaagccgcccatattcccctgaacaaggactggatcatccagctgcctgagctggactttgacatggccctctcatccacacaccagcttatgtctcagaaggagcatcccacagctgtctttgccgtctccgatgtgcttgccgcagctgccatacgcggatgccgcctggccgggctttccgtaccagcggacattatcgttacgggatttgataatgtgaacatatcccaggccacatcccctcccatcacaaccatcaaccagccaaaatatcagatgggctacatggcatgtgagcttctaattgaaaagctaaatactcccggagcaaaaccgcggcaggtactgctgaacacagagctcatcatacgggaatccacacagagacagcgtacctagcaccagaacatcacggaccgggaagcatactttggagtcaaatgagagccaaaagggcgctatgccgatgcagcattggtgtcaaattctagttcatttgttctgttgtaaattcagctataaatttttctatttttcaccggcggcggacgactgtgatgctgccggatccccctaacaggcaggaatcacatatagttctacaaaatcgggcaaatcccttggaatttacaaacttttatgcgataataaaactacaagcagacaaggaggccgatatgggatttaaactggatttgattattaacgaaaactattcaaaactgaacgacatcgacctgcatattctccattttgtgcagaccaatctgaagctgtgcacaacaatcagtatcgctgacctggccagaaaatgcaatgtttcgacagccaccgtcctgcgtaccacccagaagctggacttcagcggttacagtgaattcaaatttttcctgaaaaacgatacggagaaggttaatgtctccacgctggatatgatcgagattatcagccaggacatctcgcagaccatcaagctcttcaagcagaataaggaaatcaatgagatctgccggatcatcgacaaatctgacaacatctacgcttacggcaccggacacggacagcggctgatgctgcaggaatttgctcgctgtttcctgaatgtcaacaagaatatcatcctgatcccgtctctgactgagttaaagattatcaagaaatttatgaaaaaaacagatttgctgttcatcgcctcctggtcaggcaatattgacaagtaccgggacatcctgatcaacctggaagtgctgggcattccgatgatttccattacctgcttaaacaacaacgatttatctgccatgtccaagtacaacctctatttccagagcagcaccatggacaaggatatgaatatcaaccgttcctcctacctcacgctgcatctgattctgcatctgctctatgatggttatatcgactacgcgacctgcaaaatttagaacggcgctgatattgataagaattacacgaaacctgttttttacaatacaacaacactgccgccttaacggtcattccccgttaaagcggcagcctttttcattgcttattcaaaccttcaggcacagcagtgttattttgcagacattgcccacgccttattgagcagcagcggacgaagatatgcaaccgtggagcacatcggcaaaatatccggattcagacggatattcagctcattttccaggtagcttcttctttgcatcatacgcttccacagctccggcgcatgcttctgaatttcctgtctcagcgcctcgtccgccagcgccaccgtgctctccgcactggttccggcatatcctttcaccgacggaataatgtcgatctggaacaacattccgctttccagcacttcttcacttcccgcatacaccggtgaagacatccactcctcgtcagccgtcaaatgtcccggacataaagaccagtgatactctgctttcggaagcacctcgtcgatgcgctgatacagctcgccgccggtcatcccgcagtgtacctgctccagccattccaccacagcaccgtaatacggcttcaccacagcatccacataatcccgtgcaccttccggcagctgggatgcatcctgcaccgcataaccggcacgagaagacagaccgcccttgtagccgattgtcaggctgatggtatctcctgtttttactttattttctgtcggatagatattggccttcacaaaacgcttaccggcagccgcaatcgtaaccacgctgtttttctgacccaacgcgttcagcgactcgcccagcgccgtctcgcatacgccctcatccaacagattcatggtacgcagcatacagtctgaagcaagcgacgcgccgaattcataatgctcgatctcattgacgttgttggtacagcggacgcccttatttccgataaacagatacgtcgcattcaccacgtccccggtctcccctgcaatttcccggatcgcgtccacaacataagacggcgcgtcaaacagctttgcattatcttccagactgctggtaaaatacttccagccgacaagcccgattctctttcccggtgcgataccggcctgcttcagcagttctgtcaggctttcgctgtttcccatcggctgattcggtagggagaaatacggcgcatgaatggcctccgcctgaattctggccgacggaaccttattcagattctcatttcccatcatcatgtaatgggttccgccctgattgagcaccagaagtgcctcctcaaaacgcggcaggaaaccggtcaggtactcaaagttgttgccgtgttccagatctgcatacaccaccagggtgtcaaagtgatcttctttcatacgacgcagcacgctgtcgtaccgttcctgcatggtttcgtctgtcagcatcactggtacaccggtacagtccgataccggttccctgacttctttgtagacaatgtttgtatatttttccatgaaatcccctcttactgttgtttgactgtaacggtccaatctcatttatttttgctgagatccattaccagatgaagcagaacatctgcgcctttcttgatgctcgcatattccgtccactcctccgggcagtgagatacgccgccgcggttactcggcacataaatcatgttggtgtcgcagaaatccgtcataatcatggaatcatggccggtaccgttattgatgatcacgtggctgtatcccagttcttcacagattgcttccatcctggccacattttccgcacacataacgctcggtccggtcgggttcggataattgattctcgtaatttcctccagctccgtgcggatgccatattctgcgctgactgcattcagaattgcggtgatcagctccttaaaattcgttttctcgatacattccctgctgaatgtacggatctcgatcttgccctctacatactccggcacgaactggttggagttcggagttacatccagcttgccgaccataccggtaacatccggtcccagcgccttgatctgtctgtcaaactctgtgataaagctggctgccgctaccagcgcgtctttccggctgtccatcggtacagtggaatctgcggttgcaccgtggaaacggattgtgtatcgtccgattccggccaggtacctgatcaggccaatctcgatattttcacgctccagcaccggcccctgctcgatgtgcagctccaggaagttcttaatggagcccggtttgcggatggctgctttcagatccggcttcaggccgtattctgccatcgcctccagcttagtctgaccgaaacggtttttcactgtctccagctcacgctgagtcatggttccgagcattgctctggagttggatacgccggtactcggtccgaacgtagcaccctcctcggcattcatcagaatcagctccagcggataatcgttgacaaatccttcttctgtaagtacacgcataacttccagcgcggaaacagaaccggcaacgccgtcaaatgctccgccgttgactacggaatcgtaatgagagcccagcataacaaccggcgcatctttcatggttccctcgcggcgtccgaacagggttccgaatccgtcctcatagatctcaaggccaattttcttcatctccccagtcagataatctttggccatggtatcttccttagaataggaagaacgggtcactccctttcccggagtggacgtaaactgagctaatgtttcgatatctttctgtattctttctgttctggtctgcataataccgccccttctcttaccatcacatctgtattctgtttgaagatcttatggaatatcgctttccctgtgattcaagataatgaaaaagcccacggcggacttttccattatctgtttacgaaattatttgctattctttactgcacgttttaactctgccgcagctttctcaaccttagtaccgtaaactacctggatattattctcattaattttaataataccaagagaaccggtttttttcaataatgcatcatttacaatagaagtatcttttaaaacaagtctcagtctggagatgcagttgtcgatctcaaggatgttctcttttccgcccagagcatccatgatgccgtttccaagctcggtcacttcatcggtatcgactacttcgtccgtctcgtcctcgcgacccggagtcttgatgttgaatttcacaatcgcccacttaaatacaaagaagtaaatcactgcatagatcaggccgattacgacgttcaggagccatttggtctgcggcccgcgcagtacaccgaacagcatcaggtcaatcagaccgccgccggcattaccgatacatacgcccagtaaggagttgatcaggaaagacataccagccatgaaagcgtggaacagccataacagcggagagatgaagaagaatgaaaactcgatcggctccgtgattcctgtaaaaaggctggttaaacctgctgccagtaagataccttttaccttctgtttattcttcggcagtgcggttttgtacattgcatagcatgctgccggaagaccgaataccatgaacgggtgagtaccctgtgtcaggaaacgggtagcctggcgcataacgtccatatccggctctgcctgcatcagtaacgtattgaaaatgttcagcgcgccggaaacctgctgtccgtcgatcattgccgagccaccgattggggtgaaacggatcagctgattgaggatatgatgcagtccggtcggaatcaggagtctctccaggaatccgtaaatgaatgtgccgaatgcacccgcggaagccagcagtgcgccgaatccattgattaccatgttaaataacggccatacgaagaacattacaatggctaagaacggaatcgttacaaccatcataatcggaacaaatctcttgccgctgaagaagctgaatgcggtcggcagctgtgtctcgtggaaacggttgtgaatcatagcagtccacagaccaacgataataccgccgaagatgctcatacgataggtgaaaatacccgttactgtatcataggctgcgtttttctgggttgcttccagcgcgctcatgccctgtcccatcaggtactcaatgctggtcgtctcagcgttcacaccctttaagcccaggaagaaacgaattgtcgtgtggaataaaataaaaccgataatagaagcaaaggttgccacttctttatcttctctggacatcccctgtgccacagacatacagaacagaatcggcaataagccgaacagtccgcctgccagagcattaatcagacttacaaaatcgtttacaaaccccacattcgccaatgcattcccaaacacattcgggttcagtaatgttgatgccaaacctaacaacaaacctgctgccacgatgatggacaatggtcccatcaaggacttaccaagtttttgtataaatgttttcatacctttcttcctcctgttgtttaagttaagatgtgcgcaccgtgactttattcacactgccattataacacctgaggttttgaagtaaatagttgcggaggattatgaaatgggtcttcattttataaaaattttacgttttgtgtaatttttgacaaaatgagcggatgataacattcatttcctcaaaaatcagaaaactcttatccaaacattctgattaaaatagctatctatccaggctggctacatacccggtagtcatgaaaacaacagcaaatcataaaataaaggtgccagatagtcatctaaaaacgatgatttcatggcaccctctcctggagtatcatttatcaatcttcaactctggattaatgcgccgaagatattcatcaaataatggtactgtaaaatctatttccgcatgtcctgtggaatgaatgattcctttgctgattagctgtgcacgaagaggcgaaatcgtactgacttttttacgtaaaatctttgcaacattagaaatagcacagggcaactcaccacacttcaccattgcaaacaaaaaatcatgttctgtcttggtacaacgttcgtaccgaactttaaaaaagctttcatccaattgtgataaaaaggttgctacaaccctctccacatcgcttaactgtatgatttctgtctccgagtactcccaaaccgtactgcataactcctgtataaaatatggataccctttagtaagttgaataatcttataaattgccgcactatcataaacaacattaaattcttttgcggggttaataatagcagcttccgcatcatcagcggatagacggtctatctggtaatacttaaacagccgctctgaataggactttacctcccccattatttttaatattttaggaagtcccgctccaaacatcataattggcagacgtaattggtttacacgatgcagcgcatttatcagcgcctccatctctgattctttcatatattgaatctcatcaataaagaaacataaggccatacctgcttttgaggctgttcggcccatggaaacaaacatttcagtcaaatcatctgtaaggacaccagtgctgatatatggggatggttcacttagtccagcactaaatgtattatcctctggattccaactcacattaaaagcttttaaaattcctaatgccttttttgctacttccttcgccgattccgtaatactcatatggtgtatcatctttttcgatgagttagatatctgacgtacaaagcttcccttttcagctatttcaatatgttcatatagtataccaaattcctcggctgactcctcaatcttattcagtagtaccgttttcccaacaccgcgcaaaccataataaataactgactgctgaggatatcctttattcaaagctattaacgactttgatgcattatttataatatcatcacgcccagctaggtacgccggcatggcacctgctcctggtgtatatggattggcatattgcataaatctctacctccctcttattatctccactaattatactattatctattataacggattaatacgtaccgtacaatcatttacccaaaataaactcttactaacgaaataaacccgtatgcatatcacaaaacgcatacaggtttatcttctgtcgttaattcactcaagcctcaaacacaagtaaacagcattatatatcatcacagactgccttggcatatgtgctggcttctcctttccaacttttgattacctctgattactttttaaccattctgcaaaattgtactaatttgctatgggcacttttttgttcacactctctacaatcctcaccttttcatctaatccgccggtgtcaaatgtataatattggttatttacatccgccgaatgccctaacagtgccgcagcaaccgtggccgagactccttagcatctcatcttagaattcacagtcctgcgatatgcatgaatacctttatcgctgaacgaaatgaccggagcatgaattctgccatttttatcagcaaataaaaccatactgcagctgaaccttttttatacgttccaatatttccatgacatatgttgacaaacggtattatgcactgtccaataaaaaagtttttcctgatccggttggagaagatataaaaactgccggaatattatccatgaaccatcctgtaaattctcctttcaatgcctcggaaacatattgattagaatactgattaatcctaatttccctgatatcccgccaatccggaacactaaaccccgctatgccattacccattttgaaattgcccccaaattttttgccgcatttttttctatatattttattatagcatgcccgtccccctgcttacacccaattggtgtcaaaaggcgccccagccaagccggagcgcccttaaatacgttactatctacctaaaaatacttcttgcttccccaaagattactcttcttcaaatccagatactcattataagccttttccagtatctgcttctcattggaaaacttcagcagatggtatgcctcgtagaacttataatacccggaatccagaaagtactcttcccgctgtggtttgctgtaatagctgtcggccatcatcagataccagtgtacgtccttttccaccacatcctggggagtgttaaaggagtattggctcttgccgatatacttgataatggatgcactgacaccggtctcctccttcacttcacggagggccgtctctttatactcttcgccagcttctactgttcccttaggcaaaacccatccctcatacttgttcttgtaattcttataaaggacgaggattttaccacgaaatataaccacaccgccgcagctcgttgcttcaatcattgcaattcctcctggtgttggtgtgaacctgatctgcgtctgtaccggacggatccctgacagtcccagcgtgcgtcccgcatgtatgcggcacagcatctattggcccggttacgcaatcataactggtcttagtatacaacttttggaagggatatgcaaggcttatctgctatttcagggctggcaggtattgggaagcgggattggataaacgccggacagccatgctgataccggtatcctgccagactttaatccagcccgttcatccccttaaatactttctccgcggttatgggaagttcccgtattctcactcctaccgcattgtaaaccgcattggcaatggccggggacggcgtgttgatgaccacttcaccgatggatttagcgccgaatgggccggtgggctcgaagctgctctcaaactccacctgtactctgcccacatccagacggctgggcaccttatactgcataaaggagttctcatggacctttccgtcctttgaatagcttacgtcctcatacagggccatgccaattccctggaccagtccgccctcagtctggacccttgccagattttcattgagaggcgttccgcagtccaccgcggcagcgaatttgattaactccacctgtcccgtctccagatccacctccacctcggcggctcctgccataaaaggcggcggagatatgggcgaggaatgggactgtgtcacctgaagggcgtcctcattggcacactgcaccctgtttgccaggtcctttatggagatttcctttttggtaccgtcctccccgcaggccggcttatatacccgctttccgtcaaactccagctcctccactcctgtttccaggtatttggctgccttgtggagaattttttccttcagagcttcacatgtctttaccacggctgttccggtcagataggcagtgctggaagcataggaaccggagtcatagggggatatatccgtatcagccccaaataccacgatatcatccagctcgcagcccagacattcggcagccacctgggccagcgtggtgtcgcagcccgttcccatgtcggccgcaccgataatcaggttgtaaaaaccgtcgtcgtttatcttaatagtagcgcctgccacatccaccccggatatggaggagccctgcatggccatggccagtcccacgccgcgcacctttgagccgcttacctggcgtctggggtatttcccgtcccatcctatcatgtctttgaccctggccacacagcggtccagagcgcagctgtccgcagtctcaccgtaataggccggcatgacgtctccttctttgaccatgttaagttccctgaatttcaccgggtccatgcccagctctgccgccagctcgcttaccgctgattccacggcaaagattccctgggttgccccgtatccgcggtatgccccggccgacatccggttggtgtagaccacgtcatagctgaaccggaatgcctcaggcgtgtggtacagcggaatggacttatggccggacaggcccacagtggtgggtccatgttccccataggcccctgtatttgacaatgtatatacatccatggctttcaggataccgctgtcatcgcaccccagcttcacccgtacctccatctcgtggcggggtgaggacgcaatctgggactcataacggctgtaaatgattttggcgggtttacctgtcttccaggtcacgatggcagggtatacctccgccacaaccgtctgctttgccccgaaaccgcctccgattctgggcttgatgacgcgaatcctggatttaggtatatccagggcatgggccaggattcttctggtatggaatggaatctgggtggaggccaccacattcagccttccgtacacatccatatgggtgaaggcccggaaggtctccatcatggcctgctggttggccttggtgtggtacacccgctctatcacatgagtgcagcccgcaaatgcctgctccaggtccccatggccctcaatgccagaggcgcagagattgcgtctgttgtcggcgcccacatcgcagagactcttccagtcctcctccggatgcaccagaacattgccgtccttggcatcgtgcatgtccagcaccggctccagcacttcatattttacacgtatgaggcgcatggcatggtccaccgttgcctcgtcctttcctgccacgattgccaccgcgtctcccgcgaaacgcagcctgcggtccagtatgagccggtcataggggctgggctccggataggtctgccccgccatggtgaaacggctctgcggcacgtccttccatgtgaggatgcactcaatccccggtatcttggctgcaacgccgcagtctatctcccggaccatggcatgggcgtaagggcttctgagcacctttaccaccaggcagtcttttaaagccagatcgtccgtgaacaccggcttgcctgtcaccagggcccttgcatccttcttgataaagggggcgcctaccacccggaaattccgtccggcatgtgtgctgtcactaccgccccttataccctcagatgtcttatcgtctgtatatcccatctgctcacacctcctgtttcgattccagatatttcttaaccgcccgcagctgggacatatatccgctgcagcggcacagattgccggccagatattccttgatggtctcctcatccggatttttaagctcccgctccatggccagcacattcatgatgaagccggggctgcagaatccgcactgctctccgccctccgctgccagaaacatgccgaattcctctgcttccttctgaagtccttccagagtagtgacatggcggccgtttgccctcacagccagggtggagcatgacagcacaggctttccgtccagccatacggtgcacaggccgcagttagctgtctcacagccgcgtttcacgctgcagcatcccagacttctcaccaaatccaggagaaggtcatccggctccgcctctgcctgcacattttttccatttaaccgaaactctatattcatcctttgcttacgctccttcctgtaagtctctccataaggcgccttgtatacacagcagccagctggcggcggtactgtccgcttgccctcgtattgctgccataggtaaaggaatcagctgcctccccggcaagctgtgcaaggctgtcgtatccgtcgtccctgattttcacgacctgcgccctccccggcctggctcccaccgccacataccagtcattgccccatcgggatacacagcaggctatgaccggaaaatccgtttccgaatttctctgggtggtgtaggctgcctttcttccgtctttttttatgataatgcgcaccaaaatatccctgtcatcccggcgcacaggccgtttggcaaattcttccagaggaaccattcctccgtgataaagctccacatatgtatccagggccatcaggcaggtcaggatgtcggaaaaaccaaagcggctgtaaatgctgcctcccaccgtagccaggttgcgcatctgaacacccacgatatggcgtgtgcattccttaaaaatgcctccgaaatactggttaagcccctggtctgtctccaactggcgcagggtgcacatggcgccaatcctgaattcttccttggtttcctcgattttatcaagtcccaggccggacaggtccacgatggtacgtttggtcacactggtcatcttaagccacaccatgcctcccacaaccaggctgctgcgcttctggcatagttcatacgcctcggacagactgtccacttttacataatcctctgctcggaacacgtagattctcctctcttctcaaatgcgtgaatacacgccctaaaataaagcaaacagggagattataacatgaaatctccctgttttctacatataccgttattctttaaaataatagatgcatgaacaatgcgctgattggtatggccacaatggtccgttcaaagaagcagataatcagttccttcaaggatacgggtatcttagttgacatcatgaccacgatggtttcagaaaagaagataatctgcaccatggatacggtgaccaccatgtacctggcccccacggccagggtgccgaccttatcggcaatcatcagcacgggcaggaacatctccgcgattccaaccggaagggccggcgcaatctcagccgcgttgggaacctgcagcagaacaagcaggggggcaaataatttgccaatccagttaaataccggggtataagcggcgatgagcattgctatgattcccacggccgtcagaagtgatatcacctttggcagcacataacagctgtccagaatactggaccggatttccttaaaaaggccgggcgcagtggccgctttcttgactgccctggacgcgcctgtcttaagcactgccctggcaggtacacgttccgcctgaatctcctcctttgtctgctgccgtccgtctgcaaacacagacgccttgcgggacaaaggcggaatcctggccataaagaagctgacaatgagcgtcaccagcagcgcgataaaataaatgggcaggaaatattccgaaaggtcggctgtctctatcaccttataggcaaatcccacgctgaccgcgctgaatcccgtggcgatgagggctgcttcctttttcgtgtaaatcccacgctggtacagcttgctggtaatcagcacccccaccgaggcagagctgacaaaggacgcaatggcgttgacagcactcctgccgggaatcttaaacacaggccgcatcagcggctccatcaggcttccgataaaatccacgattccgtaattcagcagaaacggcatgaagaccgcactgaccggaataatccaggctacgtccatggcaatggagtatacggtttctcctatgccgggactgacgatggccgccggcccttcaaaggcgggaaaggtgtagtgcagtaccagaatcagggcaaatatactgcccatcaggtaaaacagcggatgcagcaccgaatcctcctgatagtacctgtaaacagctgaatccctgtttttacaaaagtattttccgtatacgctggccaggccgtttcccatgatgataagtccgcccatccagagtcccgcaagtcccaggccagctttaatatttttatatatgatgccgaaggtgacatccgtgcttccccttaccgtgaccgggacaaaaaagatgatgactgcaatcaaggtgaagatgactgcctttactatcccgcctttccactgatttccggtaagcaccagggcgtctaataccgagttgtcattcaggttcccgttcacattattgtcattttccatgccttatcctccattgcagctgccgctattttgcttttttcttcactgccaggatggacaggtattcaaatacaatgttggctgccagataagcggttatttcaccgtggtcatatgccggaagtacctccacaaggtcaaatcccacaaagttcaaatccttgatattccgtaccagctccagggcttccagggaagtaaagcctcccacctcaggagtgcctgttccgggagcatatgcagggtctacaaagtcaatgtcaaaggtcaggaagcatggcttatcacctacccgttccagaatcgtcttaaccagtgtctccagccccatttctcttaccttgtgggccggaatcagcttcattcccagctctgccgccatcttatgctcatccgggtcatacagggatccgcgcatccccacctggatggaatgggacgcatcgataaggttttcctccaacgccctgcggaatggcgtgccatggttatatttctggccaaatacctcatcgcataaatcggagtgggagccaaagtgtaccagggcaacggggccgtactttttggcagccgcgcgaagctccgccagcgtgatggaatggtcgcctcccagtacgatgggacatgcgttttccttcaggatgccggcaaccccttcttcaattgcctggtaggttgggtgtatgtaacccggagtcacattaaaatcacctatatccccgccctttaacccgtccatgatgtttacctgcatgattacattgttgggcttcatcatggctgagatattcctgattgcgttgggaccaaagcgtgagccggaccggaaggaactggctgtgtcaaatggagcccctgcgatggcgaaatccagcccctctgctgagtccactttctgcattctcatgaatgttcccatattacaaaatcttggtgaagatatggcacttgccggttgtttaatgtccctgttttactgctttgatacggtcagcgacacctattatgctcttgcgaaaaagcataatctgaagctgattcccattgcccgcaaccgccccctgatccttctggcatcaaaaaagaaccccctttcacgtaagaaggagattccttttgacagcataaccgattataagttcatcatgtacgaaaattttaagtttgatgaatggctgaaaattctgaattttaaaaatgacaataatattttatatgtgttcgaccgtggcggcctcatcgacgccatccgccagagccggtatgtcaccgtgatgatgaaacgctttaccgatacatacagcgaagactgcgtggagatttccattgtggattctccctttggaatggacgcctactgcctgcatcacgcctcctacaccatgaattcccgtgaaaagcagttcatccgggaattaaaagagctgtttgccgaaaatccggctcaacggcccatatagatatcaaaaagctgtctggctatgggggccgccgcctttcctccgctgccgccttcctccaccagaaccgtcaccaccagccgcggtgactcagccggcgcaaatccggtgaaccaggcatgggtttcctttcctgtctcaaactcggcagaccctgtctttgccgccaccgtataagtatctgtgcgcacagccgaacccgttccctctgtgacaaccgctctcataagctccgtaagtcccgctgcctcctccgcgctcataaggcttccgtaggcggcgggcatgaactttttgatggtttcatctcccgcgctgacaacagagtccagaaaatagggtttcatcagggtgcctccgttggctatggcagccgtaatcatggcattgtgaaggggcgtaatctgggttgttccctgtccgatggaggtctgcagaatttcccaggttccggctccgggtttcatgttgtaggcgctctgcttatagggaattccgctcagcgggagaggtccgttaaagaggagctctcccgcggtgctgttccattttcccaggtccatctcaagacccaggctggcaaacgcgccgttgcaggaattggcaaaagccagggtgaaatcctgatggccatgggccgtaccgtgatagcacttaatccggtattctccgttctcatacacaccgtcacagtcaaactggtaattcttataatccgcaggatgttcccgcatatattccagcgcagtcactattttaaaggtggaaccagggggataaagtccctgagtggccctgtttaaaagctgtccctctttattttcctgggcggtcagggcttcccagtcccccagcaggctgttggggtcgtagccgggctttgatacaatggcgagtatcttgccggtatccggctccatggcaatgaccactccctttctggctcccagcgcggcgtaggcagcctgctgaagctctgtatccagggtggtgtatacatcgtctcccggattcttattgccggtcagttcatttcccacctgctccatcaggttcacatgggaagtcagcagatagaaattggcaagggcctcgattcccgtcttgcctttggtggaatagcccaccgcatggtcaaagatatctccgaagggatacacccttgtctcatttccctcgccgtccatctgagtctgggccagcaccgtaccgtctgatgccagaatcctgcccctcacgatacggtccgaaaagctgtccagccttgcgttataggagttgtttattacatcctcgcttttcacctgaagaaaataccccagataggctgccagtcccaggaacagggccgccaccacataggtgatgcccagaatgctgcggttggatgtttgattggactttgagccggtatctgccttcttactcatggcatcacctcctctccggtttcttcctcatcgttgcgtttcaggatataaagaccctggataatgccaaacagcaggaatgttcccaggatggagcttcctccgtagctgacaaagggcagcgtcactcctgtggacggtatgaatttggtcacaccgccaacagtcagaaatacctgcacgatatactccactcccagaccaaatgctatcagcttgtagaacacggcctgcattctggctgcaatcatcatgaactgaatgaaacagcccaggcagataagaagtacgcagatggcaaaaatggcccccatctcctccgacaccgccgaaaatataaaatccttctccaccaccggtatctttcccggcattccctggcagagtcccataccaaaccatccccctgtgccaatggcaaaaagggactgggtaatctggtatcctttgttttctatatcggcccacgggttgctccaggccgacaccctgcggcgcacatggtcgaacagctgataggctgccagggcggctcccgttcccagagcgcttcccgttatcagatacagccagcttcccgtggccacaaacagcatcagcaggtaagtgacaaagaaaatcagagcgcttcccaaatccttggaaagcaccagcaccagaacatgagcaccggccacagccgttgtcaggaaaatggtcttaaaatccgtggactgatagaacatggacgctgcgaagaatacaaaggtcagcttcacaaattccgacggctggatggacacacctgctatggtaagggacaattgggccccgaagctttcattgccggcagcccataccaccagaagaatgaggagccctgcccccgcatacacccactgaagcttgtaaagctgccatacccgctccataatatagggcaccagccaggccagggccgcggatatgaccacgatggcaaactggcgcagggccttgtccaggccctttgccatggacagccgggtaagcatgataaatcccacgcataacagcatgcaggcgttgttaaccagcagtctggacacattccggtacagcaggcggtacagataaatatagcacaggaaaaagaccacctgggccccgtaaaacgccagaagcatggcctgcatcccctcgtcctctgtcttcagaaacataaccaggtacgccagaaaatgaatggcgaacatggcccggttctgcctggcacataccttgcgcttgcgctccatatccgggaaggaaaaaaagcggaaattcgcataggtgtagaccgccatcagcagtatcatcagatatttggatatttctacaatcagattggtcataagcctcactccactccgcgcttaaaatgtcccctggtaaagtctctgaaggggacacccacatccctgttatatacaaaggaaccgatgaatgcgtcgagtaccttttctgtctgctctgttccctccaccgtaaactgaaggcgcaggcgctccgccatgagacggcgcaccagcttttcgctgcccagcagggacaggggcgcgggattgtaaatggtattgtagcagaaggaacaatggttctttacaggaagtacggcgcctgtcctgtccttcatcataagtgtcccccgtttatgggtacaccccttcaccgtattggtgatgcactgggcagataccatcataggcgcgtttccatagataatgagctcgctggtcagccccaggccgcggcatgactcaagaacaggctccagctcacggctgttcagctcccagggcatggtgagcatggaggcgcccacagatgccagcactctggcggaccggctgttccagccatataccgaagcgtccatgccaaagggcagggggagcccgggcatttcctgttccataaggtctttcagccatacggtctcctccagtgccctgattaacacgccgtcaaagccggcctgacacagcagatgacggctgtcccccaggtatctctgcgcatgggaccggaatatctgcggaagggccagccagcactgttttcccctgtcgtggcagcggtcagcgatatccctccactggtccgggccgaaaccgtccgcgtccagataaaccaccgatatctcaccgcgggccaggacaggagaaagctgggctgtttcttccaggaaggccgtgaggacgggctgagactggggggctgcggtttgggtaagaacgggccgggactgcgaagctatgttttggataagaacgggccgggatgtcgggtccgcagaagaatgtccaatggccaatgcggcgccggtaagctttttctccagctcttcaaagccggcgcggcgcagctcattgagcgcctgaaccggaaggaataaatctccttcgatttgggctgtgagtgtttggaaacaaaaggggctccctcccgtcttattcagctgttttaataccttctcccgggtcacgggctgtttttcggctgcctggggcgcctggcccagaacctggaccttttctttgcggcactccagggtcaggcggctgggctctccctctgccagctccacatgcccccgtacattctccttcagttcggcctccacataggtcttatccagatattcaaaaagtttctggtttccctccctgaactccggcttttccctcagcgctaccatgccgcggccattgtgccgggcgtagtagccgtctgtgaacccgcctctgtcaaaaaggtccaggagcatcttcctgtcctccggctccacacggtaaccgtcccgtccctgcttcagataccggtccacgtatttgcggtaaatgctcaccacgcccgccgtatatctggggctcttcattcttccctctatcttcagggagtacacgcctgcctctatgatatcgggcaggatgtcaagggtgcacaaatctttcaggctcagcacgtatctctcgctacttttattgagaggggatggatccggccggccggaggcgcccggctttttgccctggttcctttttccggtctgttcactgattcgggacctggctccagcctggccggcctgttcaggcacggaatgttttccattcatccggcttatatcctccggctcatataccgagtagggaagacggcagggctgggcgcagcgtcccctgtttccgcttctgccgccaataaggctgctcataagacattgtcctgaatagcagtaacagagggctccgtgtacaaagctctctatctctatgtctacctcatcatggattcgccgtatttcctccagtgacatttccctggcagtaactacccggctgcatcccagttccttcatcatcctggccccgtatacgctggtcaccgtcatctgggtgctggaatgaagctccagccccggaaaatgccggcgcatgaaagccagcgctcccaaatcctggactatgacaccgtccaatcccctctcgcagtaggggcgcatgtagttttccaggtcgttcagctcatcttccttgaacagggtattgactgtcatgtacaaacgccgtccgtgcagatgaacatagcccatggcctccaaaagccccttttcatccgggttatccgcataggctctggctccgaaccggctgccccccatatagactgcgtcagctcccgctgccactgctgccttcatactttcaaatgaccctgccggtgccagtacctctacctgtctcttctccattttgtccaacctttcctgaactgttaccctgaaataaaagatgcctcacgtatccccatgagacatccccctcgtaatcctcttatcttcttccacctttgtgggaaccggcctttctggctgcctgcagcgcctttctggcaagctcctcatccgtcatcccccctgtgagaggggccgtaacaggcgctgcggacggtgctgcggttgccgctgcctgagtggaagctgctgccattcccctgcctgcttctgacgcggggtttaacacccgcagagacggtgccggccgcttctcatcagactggtctgccgatgcagcgggctgctgcgcagatgcgtccgcatccggtgtctgtgaagcggtctcaggctgagaagcttccctgacagcggaaccggaaacaggttccggacgggaggcactccgtgtaatgccggcctcaatttccacggtttcctctatctcctccactgcctctgcctgcactctggctttactttcggtctcagcggatgagttagttctgagattctgaaggttttctctggcttcctttaattcgccttccagctgggcaatgcggcggttcaggcgatccagctccctctggcgctcctccaaatccttaagcaccgcctccagcttcatctgtgtactgaccagctcgtgctttaagctgtaggtctccttctccatatcgttcttctgacgctccattccctcgccccattccatggctttgaaataatcgtctgctatatttaactccgtcatgaccatctggtaatccgcactctgtttggtgaatcccggtaccttcctcatggcgctgtttttctcgtttacgtagctggcagctttctggagatagctctcatcctcgctgccgcccagtgtgtatacttttccgtctattaaaacttgggtgtaattttttgtatccatatctaatcccctgctttctgctttgctggtttgcgtcctgatgatttgtgtggcggtttcgggtgcgcgcggccgattatactgcgcgcgcctgttccgcggtgcgcgttcgattccgctgcgctccatctcactcacgggcttcaccctatgaaaaaagacatgggcagatttccttatgtgccagcacaacggcaatctgcccatgccttttttcgcactgctcattgcctacgtggacattataccacacccccagccttcttaacaaggcggtttctacatttctaagcccaggtggcgataggctgtttcggtagccatgcggccccttggggtgcggtttatcagaccgttcataaggaggtatggttcgtatacctcctccagggttcctgaatcttctcccagagccgctgccagggtgtctaatcccacgggaccgccggaaaatttttctataatcatcagcaggatattcctgtcgttctggtccagtcccagtttgtccacatccatgatgtccagggcaaaatccgttacctcccgggtaataacgccgtcatatttgacctgggcaaaatctctgaccctctttaacagacggttggccagccttggggttcccctggaacgtctggccagctccatggctccccccgcttcgatttccacgcccaggaccctggcagagtggaggataatgattttcagctcctccggcgtatagaattccagcctctgaatcactccgaaccggtcccttaatggcgcggtgagaagtcctgccctggtggtggctcccaccagggtaaaatggggcaggtccagacgtatggacctggcggtggaatcctttcccagcatgatgtcgatggcaaaatcctccatggccgggtacagcacctcctcaacctgacggttcagacggtgtatctcgtccacgaaaagcacatctccttcctggagattgttcagtatggccgccatctctcccggcttttcaatggccgggccgctggtcaccttcatattggttcccatctcattggcaatgatacctgccagcgtggtcttgcccagtcccggcgggccgtaaaacagcacatggtccagaggctcccctctggtcttggctgcttctatatagatgttaagggtggacttaatcttctcctgccctacataatccctgagacattggggtcggagcgtggtctctatacgctcgtcctccgccgttacttccgttgttataatcctgcgttccatttacacctctgcatatcccaatttcacctttgccagaatccttacaggaaggacagatgctttaaggacgcctttaacacatcctccgaagtcatcccgtccgtgacctccacctgcttcactgccctggatgcctccgtgctggtgtagccaagggctaccagcgcctggaccgcctcctcggccgcttccaccagcccggctacggatgcgcctgtatccacatcatccatgccggccccgccagccatgttccccagcacgtcgtccatggatatcctgtccttcaaatccaaaatcaggcgctgggccgtcttattgccaatgcccggcgctttggccagggccttcacatcctcgctgacaatggccaggcgcagatcgtccggtcggagcacggagagaattcccaatgcgccctttggtccgatgccgttcacccccagcagctgcctgaacatgtccctgtcctggctgtgaaggaagccatagagggtcatggcatcctcccttacctgaaaatatgtataaaccgtcacctctttccccattcccggaagctccggaagcagggagacaggtacatggatggccaggcccacatgacctgcctccaccacgataacgtcttcctcaatggccacgagaggcccttttacgtaagaaatcatatatccttcctgttctttctctctctaatgtcctgcccttcatcatatcatacccatgaatccaatgcaagtctgccgaacaaatattctgtttcggaccagactccggccatcagacacttgcgtttccggattttttagtatacactaacccatagggaatatccgcaatttaccgcagctcatatccggttcccgctaaaaaaggagtgattacacatgataaccattaaacatcccgttgatttacctgatacatatcctctggaccgcatcggaccccttaaggacctgctgtttttcgatatagaaaccactggtttttccggcgacacatcccagctgtacctgatcggctgcacataccacgacggctttggctggaggctcatacagtggtttgctgactcgcgcgaatccgagagggagcttctgacagccttcttcaccttcatggagcgctttaagatactggtacattttaacggagacggctttgatatcccctatctgttaaaatgctgccgccgtctggacctgccctatgattttgaccgcataaaaagcgtggatatctacaaaaaaataaagccctaccgcaagctgctgggcctcgagaacatgaaacagaaatccatagaacagttcctgggcgtagcccgggatgacaaatacaacggagggcagcttatagaggtctaccgtgaatacctgatgacccatgaatccttcctgtacgacctgctgattctccacaatgaggacgacttaaagggcatgccctccatcctgcccatcctgagctatgcggatatgatggaagccccgttttcactggaatcccagcagcttttcacctatgatgacatggccggaaacgcctgccccttcctcagcctgaccttaaaaagcccctgcgccatcccggtgcccctggaatacgacagcgcgccggtaagcctggagctgagccgggacactcttgcgtgcaatattgccctcttccagggcgagctcaagtacttttattccaactataaagactattattacctgcccgtggaagacacggccatccataaaagcgtaggcgaatatgtggacagggatgcgcgcgcaaaggccactgccagaacctgctacaccaaaaagcagggcctctttcttccacagttcggctgcctatggtcccctgtcctcatgcgggaatataaggcatctctcacctatgcggaatatgaaccggaaatgttgtccccggacggcatggctgacgcttatgcaaagcagattctctcttatgtgagccaggcaaaggagctttaatctcctgcctggtcacggctgccctgcacagaaggttgggctccagacggatcacagttcccttttcaatacatttcttgatgaccgtgtaggccgtattgcggttccagccaatctcgtcctttaacagcttagccatctgaccggccgtgcagtcaccatgcttccacagtgttttcatgattttaagttcagagtcaaatagttccggtttcatataaactcccttcaatgactattttaatagtcgtctcaaacctgctgccctgggccataacaaaaaagccctgccaaaaagacaggactcattaggactcattaaaacatgattaccgcatccaccctacttcctgggcaaagccgcccggtaggtttctcccaccgtattgccggaataagcagcgtacatatgggtggtggtggaatctgaatggcccagcatggcctggaccgcatggatgtcggcgccgccccgaatcagatgggcagcaaaggaatgacgcagggtatgaggggttatatctgcctggataccggccttttccccataatacttgataatcttccagaagccctggcggctcatggccttgccgctgcaattagtgaacagccactgggattccttacccttaagcagctcgtgacgccccttttccagatacacgctcaaagcctgcttggccggttttccaaaaggaaccatgcgctccttctgtccatccctgcaagtgatgtagccaacctgcatattaagatccgaaagctccagcccgattagctctgacacccgtatgcccgtggcgtacaaaagctccagcatggccttgtcccgtatctccttggatgttgtcatgccgggttggcccagcagagcgttgacctcattgacactcagtatgacaggggcctttttctcaattttgggcgctttcaggagttccgccgggtccttgcggattcgtccttctttgaacatgaaattgaaaaaagccttcatggatgccagttccctggatatggtggtcgtggccttcccctctttttccaaaaaaaggatatatgaattcagactggtcttagtcaccttttcaacttctgttattcctttatcctccagaaaagacgccagctgcatcaaatctctctggtaggaaatttccgtgttcctggaggtctttttcacatccctcaggtagctcacaaagctttttatatcggacgtcatatcgctattttcccctaacccgttactcacaaaaagtggcccaaaatcgtatgctgactatcattatatctgcatttttctataaaatcaaacacatttttcccactttggaccccattttcaggtgattaacataaaacatacaacatgttggaagggggtatttttgtatgtcaatatgttgttaagcaatggtaaaaattttttctcacataactcaaaaaaacataagattccctgtaatcctcacgcgttaaatcaatcatatcaccgtgggatatccccctgtgcttacggttggaaagggttcctttaaattcgccccacatggcggactccggtgtcaccagcccgtcgtttttaccatccatggcccggatgataaggcagggaactgtttttctcttcttcacgtacatctctccttttggaaccctagaataacagcagaagcgttcctgcggtcagaagaaccagacctgcaaaagatttgcggtccagcttttcccccaggaatattctggaaaacagtatggtcaccagaatactgagcttatcaatgggaaccacgatactggcaggcccgtcctgcagggccctgtaataacacagccaggaagctcctgttgcaaaccccgaaataatgaggaaaaaccagctctttggcgcaattctccccagatgcttctgctttccctgaaggaacaccaggagccaggccattgccagcaccacgcaggtgcggatggctgttcccaggttggattccactccctgtattccaatttttcccagaatggcggtcaagctggcaaatacagccgataaaagggcagccgcaagccatccgctgttccccggctgctccgcccttccctcccgcttttgaatcatcagcagggtgcctgtcccaatcaggaccatgcacagaattttcattcccccaagaccctctcccaaaatcagggcagccagaaacatggtcaggatagtgctggatttatcaatgggagccaccttgttcacatcccccagctgaagagccctgaaatagaacagccaggaagcccctgtggccacaccggacagtaccagaaacagacaggttccgccgcttatggttcctatggaaccggccgttccggtaaggaacaccataatccacgaaaacacaagaaccactgcggtacggaccgcggtagccaaatccgagtccgtatccctgacgccgattttcgataggacggcagtcaggccggcgaacacggctgaaccgaaagcaaacaacagccaatccatattcacttcccccacttatcctttgtgtcctgtgctccgttatccaaaaatcccccacaggaagggtgaaacgaaaacctccagaaacgccccggcgccggtgatgattaacagcagaagtcccggcaggatatggagcttcttctgcatctgtccggaccagcctgacagcacgtaccacaccaggagatagaccagaccatggggcaggaccgtacataaaaatgcggcgattcccaaaagtcccttgcggatggtcagcacggacagcaccactgccagactcatccccgcataaaaggtcaggaacccaaacagcatctggctgcacaccgtgattccgaccagccagccgccgcaggtttccaacgctctctgcctgaatacggtcataaattccctcactcccctgtttccgcctccgaaggagcccgctgcccccaggatacacccctgcaccgtaggaccgccaaataccagcgcggctgccgtaccgcaaaaaatccctgacacaaagcagaacaacagccagtcctcataggtgagcgttcccagacgcagcctaaaccacctcattcccatgcatcatcctcctgtcccagtttacaggtaagaaacatatccgctgcagcttctcccccactactgtatgacagaaattcatggtttatgacttagccccgcaccatactgtccttcttatcctcagaacggtattttctggcataggccataatggcggcaatggtcttgccgtccgtaatctttcctgtgtataccatgtcctccagttcctccaggctgcatggaaccacattgatcacctcatcctcgtccagatgctgatgggatggtatcaggttgtgggccacgaatatgtcaatggcctcatcgcagaacgcaacagtcgtggtaaggctcataagatactccaggttctccggtgactccactctgtatccggtctcctcctccagctcccggaacgcgcactccacctttggctctcccggctcatccagcttgcctgccggaatctccagggtataacggtccagagcattgcggtactggcgcaccataaggatttttccatcgtcagcaacgggcaggacagccgcggcgccgtcgtgatggatgaaatcccaccttgcctcatggccgtttgccaggaccttgtcctcatatattttaagaatgtttccctcatatttaagctggcggtccagccgtataaccggtatctgcgtattcttttctttatcttccatgtctgtaccttcctctctgttatgatttgatatcattatcctatttcatgcgccgggtcttctcatagcaggcgtccgccgccttgatgaccgcatttctcaggccatgctcctccagagcagatacacctgcgatggtggtgccgccgggggaacacacctcatccttcaactgccccggatgcttacctgtctccagaatcattttcgcgcttccaagcacagtttgggccgccatggcataggctgtctttctgggaaggccgtatttgaccccgctgtcagccagcgcctcaatgaacatgtacacaaaagccggtgaactgccgctgacgcagccaactgcatccataagccgttcttccaccagttccacccttccgcaggaggaaaagatgtcccggatggtctccttttcctcctctgtataggatgcttccccataggacacgccggtcatgccttctcccagcatggcaggtgtgttgggcatggctcttaccacccgcacatttcctcccaggcgttccgtgatattggaaatggagatgccgggcgccagggataccaccacctgctccggtgttaccacatcccttatctccgaaaacaccgcgtcaaaatactggggctttactgccagtatcagatactttaccgcttctgcacactccctgttggaacaggcatggggcacctttgtcctgactgtcactgcctccattttatcctggcgggccgctgaaaatatcatctcctccggtccatgtgtcttgagaagcccgtttaaaatggcgtttcccatattgcccattcctataaaaccaatctttaccatcctcatacctccttgtcatggacattcaaaccgcagcaaagccccggcagactgccttctgcagtgcgccggggctcccgggcatacctgatgcatcttcattcatcattcaatatccctcagtatatcacaaaaatcaaaggtagcaaagtaatcctcaggagtttctgccctgcggatcatctccaccgtgccgtcctcctttaacagaagctctgctgatttcagcttgccattataattatatcccatggcaaatccgtgggcgcccgcatcgtggataaacagaaggtctccctttctgatttccggaagcatacggtcaatggcaaacttatcattgttctcgcacagggaacctaccacatcatacatgcgggtgcagggctcatcctcccgtcccataacagtgatgtgatgataagcgccgtacatggccggccgcatcagattcacggcgcaggcatccacgcccacatactccttataagtgtgtttctcatggatggcctttgtgaccagagcgccgtagggccccatcatgaaacgccccagctctgtgcacagagccacatcctccatgccggccggaaccagaatctcctcatagactctccttacgccgtcaccgattgtcaggatatcattgggttcctggtccggacggtagggtatcccgatgccgccggacagattgatgaatgcgatatggacgcctgtctcctccttcagtttaacagccagctcaaacagaatctttgccagcatggggtaatattcattggtcaccgtattgctggccaggaacgcatgtatgccgaaatgctttgcgcccttttccttcagaatcttaaatgcctgtccaatctgctctgtggtcattccgtatttggaatctccgggattgtccatgatgtcattgctgattttaaacaggccgcccggattaaaacggcagctgatggtctccggaatatgtcccaaagtctcctccaggcactgtatatgggtgatgtcgtccaggttgatgatggctcccagcttttttgcataagcaaattcctcaggcggcgtatcgttggaggaaaacatgatgtcggggccggaaaagccgcatgccctggacatcataagctctgtcatggatgaacagtccgtgccgcatcccatgtccttcagtatatttaacaggaatggattgggcgtggccttgactgcaaaatattccttatatcccttgttccaggaaaacgcctgcttaatcctggcggcattctccctgattcccctctcatcgtaaatataaaagggcgtggggtatgtcttctcaatctcccttaattgttccagtgttacgaatggcttcttatccattatgtatgtgtctcctttcccttttttgcgcaaaaagcctgtcaggaagtacaatatgttcaattgtactcccggacagacttccttgtccagtgtttttattcgatattaatgactctcatgatattggtctgggtggctgcctcgtgacgtcttgcataggttacgactccggctgtgatgacagccagttcgccctcctccacaagtcctctgtccttaagctcttccacagaattctcgatcagttcgtccgtggattctgccctgcgtgaccaaaccggtaccacgccccactgaagctgcatctggcggacggtggccatgctgggggacatgccgatgattctggcacccggtctccacttggagagcatctgggtggtaaagcctgtgatgctgggagcaataatcacatccgcatccaggtcatgggcggttgacacagaggcaaagcacactgcgtttgaaacattcttcatgttctgctctgtcaccttcctctggcggtatcccgcatagtccagatgcatctctgtctccagggcaatggacaccatcattttaagtgcgtccaccggatacttgcccatggctgtctcgcctgaaagcatcactgcgtccgtgccgtcatacaccgcgttggcaacgtccgtcacctcagctctggtaggtctgggattgcggatcatggaatccagcatctgggtggctgtgataacgattttacatgcctcgttgcacttgcgtataatcttcttctggatatggggaaccttctcagccggtatctccacgcccatgtcgcctctggccaccatgatgccgtccgctgcctcgatgatggcgtccaggttctcgatgccctccgcgttctcaatctttgcaatgaccttcatgccggaaccctgctcatccagcatggccttgatttcctttatgcagtcagccgtacgcacgaaggatgccgcgataaagtcaaagccctgcctgattccaaaacggatatcctctttatccttatccgtcagggccggaagcttaatctttacattgggaacattgacccccttcttctctcccagctctcctccattgatgacctcacagacaatatccgtatccttcacctcgcgcacttccagctcgatcagtccatcgtcaatgagaatccggttgccagcagccacatcctcattcagtccgctgtaattgatatagccgacggtatcgtcccctaccagctccctggtggtcagcgtataggtctggccttccttcaaagtcacctttttgccgtccttcagctgtccggtacgaatctccggtcccttggtatcgaggagcgctgcaaccggaatgtctaactccttgcgcacttcctttaacagctccaggcgtccctgatgctcgttgtagtcaccgtgtgaaaagttaaaacgggccacatccataccattcctggcaagctccatcataacattcttgtcactggtattggggcccatggtgcagataatcttggtctttttcatgattcttcctccataaaattgtgagagtttatagtgtaacgacagattcagacgtgaaatgcggatcatgatttgggggaatccgattttttcacatgctgatgtgtatataaatgatccatgcagtactcatagctgccttcacattttgaacaatagcggaactccatgccgggactttcctcgtccgtcctgccgcagaccgcacacttgtgatgggtgcggttcacgggccgcatggtctttaccttgaaatcctgcctgcgcttcacttccctggggctgtacttcttaaaatcctttgtcatcaggaagaaaatgatgaagttggcaagggacaggaaaatggcgattcgctgtgggaaactgccgtatacgaacccgaacaccagaaaaaaggcgtcaaacagcgccagccatttcgccttgatggccagtataaagtaaatataaaagtactcctccgggaaaatcaccgcataggccaggaatatggacatactcaggtatgaggtgttaaggtgcatatcccagccccagataaagtatacaataaactcggcaagtatgatgccgatggctcccataaaaaagaacacattaaaacggaacgccccccacaccgtctccagggaacggcccagtgaatagtacatgagcgccgcaaatataatccagaaggggctcagtgtgggcgggtacagcagaaatgtcaccagcctccagacctgtccgtgaagaatggcctccgcgtccaggctcaggtaccgggtaaagaacatggggtccatgtacatcatgacaaaacccatgatatacataatgatgatgtaatacatcaggttgtggatggcatatttgccaaacctgcgctcaagcttattaaaaaatctcatcctatcatccttttcatttgcctgtatgttttaaatcaaaacaggtctttcttattaaatatatacgcaacaaacagtgacagcagcagggtcaggcccagaacaatggcaaatccatagggactgtccgcgaaaggcatgccatgtgagtttacgttcatgccgtagaagctggctatcatggttggtatggacagcacgatggtaacggtagccagaaacttcatgacaatattcaggttgttggagatgacggaagcaaatgcatccatggtgccgctcaggattccactgtatatgttcgccatctcaatggcctgcttgttttccacgattacatcctccagcaggtccgtgtcctccgggtacttctttatcttttcaatgcgcagcagcttctccagcaccacctcgttggaacgaagggacgtggtaaagtaaaccagggacttctccagctccaaaagctcaatcagttcctcgttcttctgggactggtggagcttgcgctcaatgacttcgctcttcttatcaatgattcggaggtattgcaggaactgggtggcatttttatagagaatctgcaggatgaacctggtcttcatgaaggtgtggaaatccctcactcttccgtccataaaggaagtgagcacaggcgtctcctccaggcagaccgtaatcagcacatccttggtggtgatgatagccagagggatggtgacaaaccagtccttgccgttgcgctcctctatggaaggaatgtccaccagaatcagggtgtattcatcctccacctctatacgggaccgctcctcctcatccagaggcgcccgcaaatggtccgggtcaatctgataggtatctgcgatgtcaatgatttctgaggctgtagggtttgttaacgcaatccagcagccaggctgcatctcttccttttcgtgcatagcaccgtcttcggtcttaaaaatccgtatcatgcgaactctcccccattttgaaattatacgttctcattatagtgactgcccccgcttttgtcaaatgaaatagccttccattttatattataccgaatatttttcagggagaatacataaattttacctgaacagtataatgggacccgcagaaacatgcacaattttcgccatttcttcacgattttttaacgcctgtccccaattgtatttatacttattttgtgttaaactctactatgaatatccagcatcccaatgccggaatttgttgcataagtcacagtattctccatgaaactgtattatgatacatgtaaaacagcttttcggtcccccagtactgccggacatggtttttctccatgacatggcagaacagccgtcaagttacaaaggaggtcagggtaaaaccccgcatatatgaaattacatacaaatacccttacgctgggaatcgatatcggttccacaaccgtcaaagtagcactgttaaatcaggcttcccatatagtattctccgattatgaacgccattatgccaatatacaggaaactctggcgggacttttaaaaaaagcccgtgagataaccggccccattcaggtaatccctgtcataaccggttccggaggactcacgctctcctcccgtctggaggttccctttgtccaggaggtggtggccgttgcctccgcgcttttggacttcgctccgcagaccgatgtcgccatcgagctggggggcgaggacgcaaaaatcatttatttcaccggaggcatcgaccagagaatgaacggaatctgtgcgggaggcaccggttcttttattgaccagatggctgccctgctgcagacagacgcccccggccttaacgattatgcggaacattataaagccatctaccccattgcggcccgctgcggtgtgtttgcgaaatccgatatacagccccttatcaatgagggtgccaccagggaggacctggccgcctccattttccaggccgtggtcaatcagaccatcagcggtctggcctgcggcaagcctattcggggaaatgtggcatttttaggcggtcccctccacttccttcctcagcttcgggaaagcttcatccgtacgctccgcctgacgccggagcaggttattgcaccggaccactcccacctcttcgcggccgtgggagcagccatgaatcccctggataaccaggcggccgtacccctggagactctgattcagaaactgtcctcaggcattaagatggattttgaggtcaagcgcatggatcccctctttaaggaccgggcagactatgaccggttctgcgcccgtcatgccagcaaccatgttaaaagcggcgacctggcctcctatgagggatgctgctacctgggcattgacgccggctccaccaccaccaaggccgccctggtaggcgaggacggcacactgctgtaccgtttctatgacaataacaacggaagtcccctggccaccgccatccgggctatacgtgagataaaggaacagctgcctgaaaccgcccgcatcgcgtactcctgttccaccggttacggcgaagccctgttaaaggcagcgctgatgctggatgagggcgaggtggagaccatatcccactactatgcggccgccttctttgagccggatgttgactgtatcctggacatcggcggccaggacatgaaatgcatcaagattaaggacggcacggtggacagcgtacagctcaacgaggcatgctcctccggctgcggttcctttatcgagacatttgccaggagcctgaactacagtgtggaagattttgccagggaggccctgtttgcggaaaatcccactgacctgggcacccgctgcacggtattcatgaattccaatgtaaaacaggcccagaaggaaggagccaccgtggccgacatttccgcgggtctggcttattccgtcatcaaaaacgcattatttaaggtaattaagattacaaatgcttccgaccttggagaccacgtggtggtccagggaggcaccttctacaacgatgccgtgctcagaagctttgaaaaaatatcgggatgccaggccgtgcgcccggacatcgcaggcatcatgggcgcctttggcgctgccctcattgccagggagcgctatcacatggctgatgaaccggagacctccatgctctcccttgagaaaatcatcggccttaagtacagcacctccatgacacgctgcaagggctgcaacaaccactgtgtgctgaccatcaaccagtttggaagcggacgccgctttatctcaggcaaccgctgtgagaggggacttggccttgaaaaagccaagaaggagattcccaacctgtttgattacaagtatcaccggatgtttgactacgaatccctgcccctggaccaggcggaccgcggtacggtgggcattccaagggtgctcaacatgtatgagaacttccccttctgggctgtgttctttaggaagctgcgctaccatgtggtgctgtctccccagtccaccaggcagctctatgagctgggaatcgaatccatccccagcgaatccgaatgctatccggccaagctggtgcacggacatgtgacctggctcatcaaacagggcgtaaagttcatcttctacccctgcatcccttatgagcgcaatgagagcccggacgcaggcaaccactacaactgtcccatggtcacctcctacgcggaaaatattaaaaataacgtggaggcgctggccgaggaaaacgtgcgtttcatgaatccctttatggcctttaccaatgaggagatactcaccgatgcacttgtaaaggaattttccagaacattccagattccggctgccgaagtcaggatggcctcccatgccgcctggcaggaactggctgcctcccgcgatgatttgaagaaaaagggcgaggagactctggcctggctgaaggaacacggaaagagaggcattgtcctggccggaaggccctaccatgtggaccctgagattcaccacggcataccggagctgattacctcttacggatttgccgtcctcaccgaggactccgtatcccatctgggcagggtggaacggcctctggtagtgacggatcagtggatgtaccactcccgtctttacgcggctgccagctttgtaaagacccaggataatctggatctgattcagctcaactcctttggatgcgggctggatgcagtgaccacggaccaggtggctgatatcctgacccgttccggcaagatttatacggtattaaagattgacgaggtcaataacctgggatctgccagaatacgaatccgctccctcattgcagccataaaggtaagggaccagagacattttgagcgcagggtggtgtccagcgcctatcaccgcgtaatgttcaccaaggagatgaaaaaggattacacccttctctgtccgcagatgtctcccattcattttgacctgctggagctggctatccgctcctttggatataagattgaagtattgcagaaccacaaccgcaacgccgtggacgtgggactccaatatgtaaataacgacgcctgctacccgtccctcattgtcatcggacaaatcatggacgccctgctgtcaggtaaatatgacctggaccacacggctgtcctcatgagccagaccggcggcggctgccgcgcatccaactacatcggcttcatccgcagggccctggaaaaggcgggaatgccccagataccggttatctctgtcaatgccaacggcatggagaccaatcccggctttaccttcaccgtgccgctgctgacaaaggccatgcaggccattgtttacggcgatatcttcatgcgggtgctctatgccacccggccctatgaggcggagccgggcagtgccgatgccctgcatgagaaatggaaggcccgctgcattgcctccctgtccaagaaaaacgcggccatgatagaattcggacgcaatataaagggaatcatccgggattttgacgctctcccaaggctggatgtaaagaagccaaaggtgggcattgtaggggaaatcctggtgaaattctcacctttggccaacaaccacattgtggagctgctggaatccgagggcgccgaggcagtgatgccggatttgatggatttcctgctgtattccttctacaacagcaactttaaggccgatcacctgggctccaggaaatccactgccagactgtgcaacgcggcaattgccctgttggagtatttccgcaggacagccaggaaggaactgacggccagtatgcatttcacgcctccgtcagccatcaacgaactggcccagatggcaaagggctttgtatccctgggcaaccagaccggcgagggatggttcctgaccggcgaaatgctggagctgattcacagcggtgtgaacaacatcatctgtacccagccctttggatgcctgcccaaccacatcgtgggaaagggcgtcatcaaggagctgcgccggaattacccccagtccaatatcattgccgttgactatgatcctggcgccagcgaggtaaaccagctgaacagaatcaagctgatgctggccacggcccagaaaaacctgaaagcagagagttccagggaggaccgcggaaacggaaggcgtcctgtgactgcctacagcccctgtctgggaaccatgtcccatacataagatggtgtatgataagatggtgcatggaaaccataatatgcatcagataatgtactgaatcagagcatgacaaaaccccgccgaccaataaaggtatccattgattgatactttattggcggcggggttcgtttattgctttttacataattccgcgaacagcggcactatccgttttgcagtcacctgcaccaggcccagggctatgttctcattgccctcatagcggtgatggtatgaatcaagttcaaaaaggaggacaaacttgacaaccagaaaacattcccgaaagaaaagaaaccaaaaaggcatcaagtggttttatatcacggcggcagggctggtgtctgctgtaattctcgccgccatcctatttaaaatccgggctgacagcgctgattcccagcgtccggccgggacaagtgtctcacagaaaattgccggcagcggagacagggcaggagattccccaaatgaagagaaccggccggataagggaaatcaatggaataagaccaatacggataacacaaacatccggaccataatcagccaaatgtctctggaacagaaggcggcccagctcttcatcatcaccccggaagccctcaccggctttcagaccgtgacccaggcaggggacgccacatacaaggcattgcaggaatacccggtggccgggcttatctattttccccaaaacctgcaaaaccccaaacagcttaaaaccatgacagccaggacccaggaattggctgccgggcttacccagctccctctgttcctctccattgacgaggaaggcggtaaggtggcccgcatcgcaaaccacgaaggctttgatctgcccaaggtggataccatggccgaaataggaaagagcagggatatctccagggcatacgaggcaggttctgtcatcggagagtatctggaagaacttggaatcaatttggactttgcaccggatgcggatgtcttgaccaatccggacaataccgttgtgctggaccgttcctttggttcggatccggttctggtaacacagatgacgaaagcctacatgaagggtctggaagaacatcacgtctatgggacccccaaacactttccgggccacggggccacgcaaggggacagccataagggttttgcctatacctataagacatgggatgaactggaacaggcggagctggttccctttgccggcctgattcaggacaacacgcccttcatcatggcgggccatatctcgctgccccggattacaggagacgacacaccgtcctccctgtcccctcaggtgctcacaggatacctgcgggagacaatgggctataaaggaatcatcataaccgatgcccttaacatgggggccgtccaggacaattatccaccggaccaggccgctgtcatggccctgcaggcaggcgctgacctgctcctcatgcccgctgactttagggaagcttacggcggagtgctggatgcggtaaaaacaggagaattgacagaggaacgcatcgaccagtccctgacgcgtattctgagcgtaaagctgacgctcccctgaaatacacaacggaacaagccgccctgcgttcgcaaagcggcttgtcccatcttcttccatatagtttttatccaatcagttccctgatataagcagccagcctctcatctttgcatttcccgaagaacagttccccgaacttctctcccgcaaacgcgcctctgaccagttcctggtccagtcctttaaagatttccaccaggtcctccctgaaagctgcctttctcacatcatccaggatccgcttgtttctctgctccggaacagccctttctctgggatatccctggccggaaggctcgcagaacagcttctcaaatatatattccaggttcagatctccgccccagccaaatcccttggcaaaaggaatggcaatggcgttcccatcgttaatctgggcaaatgtataggcgtccagcgcatcctccacatggccgcaaatcacgcccgggaacgaattgcaggccagcatggctccttcgcccgtgccgcagcccgtaatcacataatccgctgcctttccgttcagtatggctgctgccagaatacctgcctgtacataggtgagctgtgcctcatcctccgcggtgtacatgccgtagttgtccacctcaaagccgtactggtcggccactttctttaaggaattgtaaatcatgccattcttggctccctggctgttctcattaatcagtgctatcctcatgtctccacctctcaactttattcttttggtttttcctgatattgtaagcatatctcccaaaggaatttctgtcaatagacatcataaacagacatcactcagacatcactgtttcttctgttcccgcgccatcttctccatacgccacaaggtcgtcctgctgacccccagctcctttgctatatcctgctttttctttctgggctttaaattggcatacacaatcccggtttccggcaggacctgttcctttgcaggcgtctctgcgcctggcagagggccttcttttttccggaatatctttagcatctgtatttccctgagtccgatttccgtagtatcgctgagcacaatcagacgctcgcagatgttgcgcagctcccgcacattgccgggccagccgtaatgggtcatcaaatccactgcctcccttgacagtctggggatgggctttcccatctcacaggcaaaacgggtcagatagaaatccaccatttcccggatatcgtctccccgttccctgagcggcgggatggtaatgtccaacaggttaaggcggtaatacaggtcggcgcggaactgtccttcccggattttttcctcaatatttatattggtagcggaaataacacgcacatccaccggctgtacccggttgctgccgatacggcggatttccctttcctgaagcactctcaaaagctttgcctggagcgatatggggatctccccgatttcatccagaaaaatggttcccttatgggccagttcaaacaggcccgtcttaccatttttagacgccccggaaaaggctccgggttcatatccaaagagctcgctctccagcaggttttcaggcagggccgcacagttcagcgccacaaatggttccgcgctgcgcctgctctcccggtggatgctgtgggcgaaaagttctttgccggttcctgtctcacccacaatcagcacattggaatccacccggctgtaacgctttgccataaggatattctcccgtatggcagggctgcttccaatgatatcgtcaaaggaatacttggccgtaagtccctgttttgcaaggctctgccggattttagtttctgcctcaataatctgctcggtgtagcgggcaacaatgatggcgccctttcccatcttgtccaccagtacgggcctgtattccgtgtacagtttcctgtccttccactggataacctcctcccgttcccgtccggtctccaccacgtgcttccacttaagggcagggcagacctcctccacgggacggcctgtgtagtcagcctgggaggaaagcccaaaggtgcggtacgcctggttgttcaatgcctgaatcagcccgctgccgtttacagcaatcagggcatcggcgctggtgttgaggatggtgctggtcattttggacctggcccgctccatattgatggtcctggccgcatccatggcctgctttagggcctgctctatggctatatcctttgtgtggatatgaacccggttcaatgattccttatcacacagtccgcacatggttccggctcccacgaacacgtcggctccgcctgccctggccctgtggatggcctccagagtggatgcctcgtcatggaccgtataatacgcaatctccgcctggcacaatttctccagctcggacacagcgctatcatccatataccgcacacagagggctatctttttaggatggaactcctgtctggcgcaaatcagggctttcagtatatcaaaactggagagctgtatctccaccacatgcttctccggaaacagatacctgagacggtcatatgtcatgcctctggccactaaaatgtcggcgtccccgtaccgcgacagggattccggggtgccgaatacatgaagaagctccaccttgacatcatcctgaggctccagacggctcactgccgcctcgaacctgctcttcatattcatatatggaataaacatccgcactgttaccatttcatgccctctttccctctgtatctgccccgtatccgccaatacggaaatacgccgggaggaatcaaagcaatctcatgcccgtttctgccgcccggcgtctgtcatgggcccgcgctgcaggctgtctgactttcctactatttatttaccacgttctgtggtgctccgtctacaaaatgtttcagattatccactgcaatgtccataagtctctgtctggattccttgggagcccaggcaatatgtggggtaataatcatattcctggcgcccagaagagaattgtcctcgcggataggctctgtggataccacgtccacggctgcgccgctgacttttccactgtccagcgcttctcttaagtctttttccacaatcagaggacctctggaggtattgatgatttttactccatccttcatctttgcaatggaatccttattgatgattccctctgtagacgggaacagcgggcagtgaaggctgatgacatcggcctgtgccagaagctcatccagggaaacatatctgcagttgtctgtttccagcgccttgttgggatactcgtcatacgccagcaccttcatgcccagtgcctccgcgattttggctgtgccctgtccaatccttccaaagccgatgacgccaaatgtctttccggccagctccaccagtggatgcttccaaaagcaccagtcggcattgtgggtccactcccctgcctttacgcagtcagaatgctccccgatgtgatggcacagctccagcaaaagggcaatggcatactgtgccactgcatccgtaccataggttgggatgttggacacgatcacgcctgccgccttggctgccgctgtatcaatcacattgtagcccgtagccagcactccgatgaactttaaatttgggcactgtttgatgatctgtgcgctgattggggtcttattggtataaaccgcctcggcatccccaatccgctctgcaatcttgtcagcaggagtcctgtcatatacggtcagatcccctaacctctcaagtccctcccagcttaaatcacctggattctctgtatacccgtctaaaactacgattttcatggtttattcctccgatttctgattgttctattctattcgctcttgcaggcctctgtccggcccgctcttggcacaaggatttcacagacgcgctttaatcctctaccagcgcccaggccctgttgatgactctcttggtgttggccagtatgatatctccgtcctcatccgcccacggctttacctccagagacaatacataaggattatctttattaaagaagccttcttccttcagcacggtgaagaagtccacaagctgctccgtgtcgttggcactgtcagggaacccgaaccttgggtgctggtcgccgtatgcctcaaagccttccttcaccaccgcattaccgatgtgcaggtgggtgatatatggacgcagtgtctgaatcacgaacctggaagtctcataggtggtggggaaatgggaaaggtctaccagcaggccgaaattgttgtgggtggtgcgcatatccgcagcaaacctggccgcatagggagccggtccgatgagggcagccttatccatgtcaaagtcaaagacttccagctccaccatcattcccttggatgcggcatagccgcacacagccctggtggtcttaagcagctgggcatatgcctggtcctttgtctccggttcccattttcctgccaggaatgcaattccctttgcacccatgtaccgggcctcatcaacggaatcaatcaggacagcctccgccttcttcctgccttcctcgtccaggtcattggggttaagcttgggtcccagcagacggggctgggcaccgtagcacaccttcatatgggcctgggccagcatatcccttaccttgtcctttgtctcctgatcctcgatgtgggttatctcaagggcactgaagtattcgtcacagcagatggtcttaacggaatccagtatgggataattcaccggaggatgggtcatccactgtatggttccaacctgaaaatatttctgaattgggtctttcattattatatacctccttatttctgtttgcaaatcttgtttgattcaattccatttacttccaaatatatatctatatcaaatgcaggtcctgtatcatctggtccttgtcacaccagctcccaggccaggttcagggtacgttttgcatttgctataaccacttcgggaggttcgtccttccagggcttcacctcaaagcttacaacaggccggtccttctcacccagaaatccgatttccttaagggtcctcagataatgagccagctcctccacatcattttcactgtttgggaatccaaatctgggatgattatccccgtaagcctcgcagtccgggctcttgattaccgtgttccccatatgggcgtggatgatgtaatccctcaccggaagaatgctttcctcaatggtctcatgaatcatgggaatatggctcaaatccaccagcaggccgaaattcccatgctccttccggatttcccccgcatagcgggcagccagaacagccgggccaatgagggccttcttgtcaatgtcgtagtcaaacacctcgcagcagacgggcatttgccccttcttttccgcatgcctgcacagctccctggtggattttaacagctgttcaaatgcctgctccttccgttcctcttcataccggccggacaggaaggaaaagcctgcgcagcccatctcataggcctcgtcgataccttccttcagggtgtccacggccatggcccttctggtctcatccagatcattgatgttcagtcccgccgacaatgtcctggactggccgccgtaagcagacaccatatgggccatgcggatcatttccgctgcctgcttgcggacctgcgggtccttcatcctggccacctccacggcttcaaaataatcgtccccgcaaatccgctccagacattccaggatgggcccatcgcctcctcccagctgcgggtaggatacgtggagaatgattcccaccttcataaaccttctcatggattgttccataggcgcgccttccctcctgacttttctgtgtctacttgcgctttatcacttccgcacacctttccgcaatggattccgggccatagccgtatttcaccaaaagctgctcgtaatccccggattccgcaaagtcagtggccccgatacgggtcatgggtacaggcatatgctctgccaggacttccgccacagcgcttcccagtccgccgcagacagagtgttcctccactgtcacgatggcgcccgtctctctggcgcattctataatcagttcctcgtcaatgggtttgatggtatgcatatccaccactcttgcccggattccctttgcctccataagctctgccgctgccagagccttgtgaagcacggttcccgtggtgataatggtcacatccctgccgtccctgaccgttatgcccttgccaatctcaaatttcatgtcctcagaataatacacgggagctgccgcgcggctgagccttaaatatacagggccctgatggtctgcaatggcaaataccgcctttttggtctccaccgcgtccgccactgtaatcaccgtcatattagggatggctctcacaaacgccaggtcggtaatggcctggtggctggccccgtcataggagtcggaaagcccgcagtaggtgccgcagagcttcacgttcagcttgtcgtaggcaatcaggctctgtatggggtctgcccctctggtggtcaggaacaccgcgaatgtatttacataaggaatcagtccctccctggcaaacccggctgacatggacaccatatccagctcgctgattcccacattaaaatatcgttccggaaatgccattccaaaaataccgctctttgtggaggaagccacatccgcctccaggcccacgattttcttattctgttctcccagctccttaagcgctgcgccgtaagcgtcacggattgctatgttttctcccattatctggcacctcctaattctgctttcgcttgtgcgtattcattgtcattgatggccttgccgtgccaggtgttctttccttccatgaaggaaacgcccttgcccttcacggtatttgcaagaatcagggaaggctggcctttggtcctcttagcctgttccaccgcccggcagaaatcctccacatcatggccgtcacatgttaccacgttccatccaaaggccctccattttgccccgatgtctcccatgggcatgatttcctccagggtgccgtccagctgtactccgttgttgtccagaatgccaatcagatggtctgccccgaatttagatgcggacatggcagcttcccagatacagccttcctcaatctctccgtcgcccatgaccacataggtataggaatccagtcccttaatcctgtctgccatggccatacccagaccggcggaaagtcccagccccagaggaccagtggacaactccacgcccggagtcttatgtacacacggatggccctgaagcatgctgtctatctggcgcagggtctttaactcttctttggggaaaaagcctttctccgccagcaccagatacagcatgggcgccgcgtggcccttggacagaatcaggtgatcccttccctccatctcaggattctcgggattcacatgcatgatttcaaaataaagggacgtcagtatctccgtacatgacagggaaccgccggggtggcctgtctggatgctgtgaagcaggtcaatcaggtcgttccggaatttgctgcattgtctctgtaactcctcttttctctcattcgtcatctctatatctcctccaatttattcttgatttcttccatgcacagcctggggctggtaaggacagggcagcctgtgatggaagctgtctcgtcctccagatgggccatggacgcctgggcaagtacgatacagtcatagcccttcagttccctggccttttccctgagaatcatatcgtgcttcttcatgtccatggccttcatggcatggaatgcgtccatgcacacgcaggtggatatgtccgcttcccttcccgtcttatccgcctcagccttaatctttgagacagtgggtcctacggtgctctccgctgtggccataaccataatgcgctttccgtagaggacgctccttctggccatggcatcgtcaatggcaatgacgggaacccgtataaatggccggatcagctccaccgccggggtcagcgtggagcaggtagtgacaatgatatccgctcctgtcagctcctgggccttcatatcgcagagcaggcggttgcggttctgtatggtgaactccccaacttcgttggggttatttgccagaaaatcgtcccacaggttatgtatcttcacttcatatcccagataatttctcagactgtcgtcaaagcctgctgccacgctctttactgtatggatcaacgcaatgcttttcattgttccctcccgtgttcttccatgtgtgttcttccaatgtttcccgcatcagaccttccgtccgtaaacccggtccgcaatgggccttaaatgccggatagcgcccgctgcggcctcctccatggaaggaatctggaagatttccgtacagaaattgccgtcatatccgcattccttaaaggtggtaagaatcttctcaaaatccagtccgcagtggcccggataccgtctgttgttgtctgccaggtgtacatggatattgtaggggctgtacctgcggatggcctcatagatgtccttctcctccagattcagatggaaaatatccatcatcagccggaaattggggcggtccacacggtccaccatggcagccccctctgccagagtattgataaaattcgtctgcataatggtcactgtctccagggcaattttcacgttcttcggcgccccgtagtcggccagctccctgaatgcctccactgccagattttcggtctcttctctggaaagttcgctgcagtactggcctctcacacgtccaatattgatattggctcccagaaatcctgcaaaatcaatgatttccctgctcctgcggatggcctccctgcgaatctcctccctggggtttgtgtagcttaaccccagctgcccgaagatttcccctgtacataccagcacaacagacaacccgttcttttcagctgtttcctttacttcattccagtccagctcccccggattcagggtcatcagttccaccccgtcatatcccagccttcccaggtccccgaagctcttctccaggcttccctggtatgctgtcactgaatcagcaattgccacatccggtgttgctacctgataacatagtttcatatccaaacctccttcagtgctttgtcttattaacaagcaaaaaccgtgccaagggtacggatccgattcccatatgtcccgttccggtcctctcccgcatttactggttttctaatgcatcagccgtgtttgagccgcatttactggattccgttggcagtcatgtagtccttttcataggttgtcacgtattccgttgcggcggcagtatccatatagttgccaatcagtttgttcttttccagataatcattcttccatgtatcggtctcagccaccttgcccagctgaccgctccagtaagcggccgcggcatcgctcatggccgcaggggctgccacgccgcgccatacagggacttccacattttcatagtctccgatttcgctcagcgtaggggcgtctgccagattaccggtgtaccgctccgtggacagtgccagcacaggaatgagagaaccggccgtcacgtactcagaagcagccgcgggcttggagataacaaattccacatggccgcctagggctgccgtgatggcgtcgccggtggaatcataggtgatataggacatcacgtccttgctgattccaatttcctccagcatggcatcataggtagcgatatcatctcccttggacccgccgatgacgatctttgtaccattcttggcagcctcgattgcctccttgaaatcagcatactttgtctgctctcccttgaaaataagctgcttgtcaacagccataatagccaggatacggaaattggaagaacggttttttgtattctggaccatgggcattaaatcgccgctgttaaatgtgagtagggtatagtcagccttgcttcccttggtggcagccacttcgtttctgccgatttcaccgcttccgtccgttttattggtgacaatgatgggctgtccattgacaaggttttcctttgtcatgatatcggatatcattcgtgtatagatatcgctgccgccgcccggactggacgtaacggtccagttaatggtttcctttggtgtaaatgtgctgtcgctgctgactgccttgcccgcacacccggttactgctgatactgccataagagctgccattgccattacaatacttcttttcttcattattaaatacctcctcaatccatgttcataaatgtatgaacaaatctgcatgttacctttattattttatttttcctttgcctttctaaggatggcctttattacaggcgtgcagataaacgccaggaaaatcagcatcagcacacatgtaatgggtcttgtgaagaaaatgctcaggcttccccccgatatgataaatgcctttcgcatattggactccagcagctttgcaagaacaaaggataaaagcatgggagccgtgggataatcattcttcaccagcagatatcccagtatgcctgacaaaaacataatcagcacgccatacatggaatagctggagctgtaggaccctaccacacacacagtggtgataataggaatcatgtactttacaggcacggacaatatctgaatcaggaacggaataacgccgattgccactaccagtgcaaatatattggagaggaacagggatgcaatgaggccccacgtgaattccggttcattggtaaacaggagaggtcccggattgagtccccacatcatcagaccgcctaaaagcactgcgcctgtgccgcttcccggtatgcccagggccaaaagcggagcaaatgcgcctgcagcggccgcattatttgcggcctcgctggccgcaatgccttctatggctccggttcccagctcttcctcgttcttgaacttcttctgggccgcataacccataaaagcgccggtggttgcccctgctcccggaagcacgcccacaaaggttcccatgacgccggatcgcagggcaggcggcagcagacgtttgaaatcatgctttgtcagaaggcttccgcgaatggtgagcttcatgtgaggctctgattttacctcattgccgcgctccatgaccagtttaatgacctgtgaaaagcccactgtaccgataatgaacggcgtaaagggaatgcctcccagcagatacatgctgccaaaatcatatctgggcgaacccgacagggtgtccatgccaatgcttgccagcaggatacccagcatggtaatcaccacgcctttgatgggattctcccccaccagccagctgatggatgtcatggcgataagaagaagggctgtcatctcagaggggccgaacttaaggccgatatccgccagtgcaggacctgtaaaggtcaggatgatgataccgatggttcccccgataaaggaggccatattagccgtaaacagcgcctgcccgggacgcttctttttggaggccattgggtagccgtccatagccgtgcagatggccggtgaatctcccggaatatttaacaggatcgcgctgaacgcaccgccatacatattggagtaatacagggctcccagcatgatgatggcagtggtcgggttaaacttgtaagtcagcgggagcagcagggccacaccggccagacttccgataccgggcatcgcccccactacaaggcccagaaccgctcccaaaagggcggctcccacattgctgaaggtaaacagcgtggagaagccatgcattaacagttgaatattttccattttgtttacccccttctacaagaatgcttcaaaaagccccatcggaaaatggactcccagccacagccggaacacgccgatggaaatggccatacagacagcaaggacaatgagggtctccttccatccggttttctcaaacaccttcagccacagtatcacgaacaagtagcagctgggcagcaaacctataataaaggaacctgctatgattcccgctccccctgctatcaccgtcatctcatcccgctcatacttggcggccttctcttccttcagggaccggaagaaggaagccatgctggccaggaacatgacaatcgccatgatggccgggaagaaaccgggctgaggcccgtccacatccttccagaaccccagctgtgtaaaaccaaccacggcaaataccacagcaaatgccgccaacaccaagggtacaatctgctttgtacctatttttttcatgtaaacccctcccttttatcagcagcctttcagatgggcagccatcttggcagccatcttgaccgcattctcaaatgccgaagtcttgacaactccctttcctgcaatatcataggccgtaccatgggcgcatgtgacgattggcgccggaagacctccagcaatggtgattccctggtcaaatcccttcagcttaagcgcaatctggccctggtcgtgatacatggtcaccactccgtcaaattccccgttaaatgccttgatgaacagaatatcggacgggaacggtccgtcagcgtcaattcccatttccctggccttttcaatggcaggcgcaatcacatcgatttcctccctgccgcattttccgccctcgccgcagtggggattcagggcagccagggcaagcctcggcttctcaatgccggaattcttaagagatacgtttgccagtcttatggctctcatgatggtatccactgtcaggctctcgctgaccttgctgatcggaatatggctggttgtcctggtggtccacagatctcccaatacattgatttccccaaatggatccgtgtgaccaaagaggtgggccatataatggtgctcactctcaaaaggacacccagcctgaatcatcgcctgcttatttaacggagcaaagcagaacccgtcaatcctgccggcctggtaaagctcaatggccgttttcaacatattcaggcaggcgcgcccgctttctatgctgatgtttgcaaacggaacctgctcagggtccacgtccctttggtccaggacaggcatacccttggtccagtccgcttcctccaccttatttacgacctgcaccgggatttccagaccgcatatcctggcgcctctctcaaataccctgacatctcctattaccaccggacggcagtactcatcgtaaaacctggaagctgccagcttgacaataatttccggccctacgccggccgcatctcctaataagattcctaaaattggtttaccgctcataaaaaaaatcatccttccttctatttttggtttttatttctgctcttgacttatgcctgtattaaaagcaaaaagcgtgccaaacttttcaggaagaaggttttttatattttacttccgggaatcctttatttacgttatgcattttgcatataccactatcatttatccccgtatgtatccgtacttttcacggcataaatgtttcattatctctaacacgttttatttttgtttcataatgtatttttgtttcataatgtttctctgttccaaatcataccttgtcccttgcattccttgtacctggcgttccttgtcatccgcctacccctcaataccatattttttcattttcctccacagagtactcttatcaattcccagatacgcggccgtcctgcccctgtgataaccgcacagctcaagggcatcctccaccgcctgcctctgcgcatcctccaggcggggggcgcggcagcccgcggccgatgccgtcacatgatttccggacgcctgaaaacatgtgctgccaaaaccgccgtctgcatgccggctgtctgccgtttccccatgctcccactctcccggaagggcctggagtacgtcctcggcccctgcccttgttttctcgcagagaatgcagatacgctcacagaaattgcgcatttccctcacattacccggccagccatagcgcatcagaagttccctgccctcctgtgatattgcttccagtctgcttcctgtgcgctcgtgttcaaaacgcaccatccggtccgccagatacaggatgtcctgtttccgttttctgaggggcggaagattaagttcaagcacatccagacgatacagcaaatcctccctgaagctcccccgggccacttccttcttcaaattcctgttggtagcgcagataacgcgcacatcaatgggaatcaccgtatcattgcccagccggatgatttccctttcctgtatgaccctcaggaggcggctctgcagctttggtgaaatgtcgcctatctcatccagaaaaatagtccccttgtgggcaatctcgaaaaatcccattttcccgcccttggacgctccggtaaaggccccttccacatagccaaaaagctcgctctccaacaggttctccggcaaggccgcgcagttaatcgccacaaaaggcccctttcttctgcggctggagttatgaatgctctgggcaaacaattcctttcccgtccctgtctccccatatatcagtatgttggaatccgaatagctgaatttcacagcctggctgataaccgcctccatgcagctgtccctgtaaagtatgtgggaaaaatcgtacttggccgtaaagccgtccgaatgcatccgcttgcgcagtttcccctcctccgcctgtatctgttccgttccctggaaggtgagcacgcagccgaactcctccgagtcaccggccaccggcacacaattgaccagcacctgttttcctccgaacctgcacacctctgacaggattttctgtttgtccctgataacactgtcaaaatcaatatccggaaaaaagtcctttatatgctctcctgccagcgaagtcttcctgtccttcatatatgtatagcagcatgtattggcaagggttatgattcccttcctgttgacggaaatgatcccctggaaggaatagttcatgatatttgctatctcatcccttttctgtctctcataccgggtgagatgggccactgctatggcctctgaaatggcatggtttaccgcctcgattcctgaatggatcatggcggccggcacccccaggcgctctgcaatctgaaccgtggaatatccccccacaatggcctggtttccgtccttcagggcctggtgcaccgccatctccagcttggtttcatcgtcctccgcatagcagcccagccccagattcggatacaggtggcacatctgctccgccccatacaccatattgaaagcgcccaccacggcaatcctctcaatattccccttctgcatacattgattgaccgccttcattacgtcgtatcccgtggatttaagctccgcgcatggaatgttcctgcgcttcagggtatgggccgtaaatcccctggctatgaccacgtccgcctccacctgttccagtgtgttattgtaataatcctgaattacctcataccggatggcttccgactcaggccgttcccggaacacctgctcaatgacaggcagaatgtccggatatggtgcaaaaaatacaattttaatcacactcacccacctcccattgtccatattatcccatatattgtattttcgcaatcattaaattgcatttaattgctaaatcgcaatttatgtgcaattttatatattccaattttttatctgttactccttttttattgtgcaaatagtacacattctcccatgcgtttttagtcgttttaaataaaattttattctgttttccccgcaaatacttttttggcacaacaattgcttttttaatcagtcaacaccattgcaatggtatgtaaaaacaaccagaggctgacgcggctcatatggccagtgagcatggcagcccacgtaaagaataagaaaggataagagatttatgaggatattagcgacaatgaagcgttttccggcaggagtgatggtgattcccctgctccttggatgtgcaatgaatacctttttccccaacgccctcaccatcggcggttttacgtcaggcctgtttaagaacggggtccccaccctgattggcctgtttctgttctgcagcggcgccaccattgatgtaaaaatggccggcagcactgtgtggaaaggcgttgtcctcaccgcccttaagttctttatcggttttggtctgggacttctgctcaatgcactgtttggcgaagcaggattcctgggtctggcgcctctggctgtcatcggagccgtaaccaattccaacggcgtcatctatgccaccctggcaggcgaatttggcgatgagacagacgtgggagccacctccattctcgccctcaacgacggtcccttttttaccatgattgcattgggcgcctccggcatgggcaacttcccaattacggatatcattgccagcatcatccccatggttatcgggttcattatcggcaatctggaccacgagtggagaaaaattctggccacgggcatgattcttcttcccccctttaacggctttgccctgggtgcgggtatgaacttcaacaatattctcagagcgggtgtttccggaattctgctgggcctccttaccgtgctgtccaccggccttctcaccttcttcctctacagcgctctccgcaaaaaggcggatcccatgggcgctgccatcggcaccacggccggagtggccaccaccacgcccacagccgtagccatggccgatccatccttccagccacaggtggaaaccgccactgcccagacagctgccgccgtggtaatcacggccgtgctttgcccgctgctggtatcctggctggccaaggtatcccgtaagtggaatgaggcccacggcatagtcacagacatacccgctcctgagcaggagagctgcgaaacccagccagcggcaactgctgatttagactcgctctaatgtaggtaataaaacagatgatattgacagacggaggaaacagaaagacatgaaccgaaccatattaaatgcaggaatgattttatgcggggaacagcttactcccatggagaacggatcccttatcattgaggacggaatcatccgggaaatcctgccccgggaggccagggatgcattatccatagaagacgcagaagaaatcagccttccccatatgactctgatgccgggcatgatagagtgccacaaccacctgtgcattgatgccacccttccggaacacctggagctgctggcctggagcaacgaatgccagctgaccctgctggcattaaagggacttaaggaagacctgatgagcggtgtaaccacagcccggtgcatgggggataagtactacatagacgtgaccctgaagaagctgattgaggacggaaaggctgaaggcccccgtctcctggcagcgggcatcggcatgaagggaagccacggagcgggccacatcggaatgccccactgcggaaccgaagaaatccgccgcacctgccgcgagaacttgaaaaaaggcgcggacctgctgaagcttttcataacccccggtgttccggatcccttcagcacctttgtgccgagctttctcagcctggaggaaatctccgttgcagtcagtgaaggcgcgcgcctgggcatccccactgccgcccactgtatcggcggccagggcctgaaagactgcattgacggcggagtggatgtgattgagcacatgtacatggctacggaacaggatgtggatcgtctggcttcatcacgctgtgtggtggacctgacctccggtattttcttagaccccagccgggaggaatttctctcacccgccaatgccctgaaggtaaggcagaaccgcagccgggtccgcgaaaatgtggcccgcatcatcaaggcccgcctcccctttgtcctgggaacagacgcttatcacggccttctgtaccgggaggtaggatatgcagtggaactgggagccgcccctgtaaccgccatccagggcgtcacctcccacgcggccaaagtctgccgcctggaagacagaatcggaaagctggaaaacggcctggaagcagatatcattgccgtaaaggggaatcccctggaggatgtatcccgcctttcacaggtaggactggtgatgaaaggcggcgtgatttacaggcagccttaggagcgcccggatatgcagaaagtatagtttcaaaagcgcagtttcaagtgacattgaccgtcaccaaaactgcgctttctttcataacacacttcattgcaagacaggatacaaaagggccgccgtccggatatacggctcaggcagtccccttatagcgcttcagatactccccggccgtgtcccggctcaaagagaacatccgcaccagtttatccaatatctgcccttctgttttcccttcctccagattatccaggacaaaggcccttataccttcctcaagtccggcttcccttccctcttcccttccttctgccttagcatcctgaagctgatacatccgttcttcccattcctgcatatatctcactccaatctcttcactgactttgacccggctgacccgcctgtgcagttccttaatccgcagactgctgcttttggccgcctctgtttcagaggtccgctctatgtaatgaagcagctctatcagctctccgcttattccctccggcacagttccatgggtattgagaaatatcctgaccgccccgtcttccagaaaaaggccgctttcctcctgacactccatccgaaatgtgtatctgtaccttccatatccccacaagtcaaagggcatgatggtaatgaggcaggagggctgcatgcggttaaaatcaatttcaccgggcgccagcagtgaactgtcaatcaacgcctgataaaaccggcttctcttaatcaggttcccggtattctttttctgtacttccgcattgtaaacacggctttcctcgtccacggaatacacgtccagccggatagaacgcagccagggcactgtccgcatttccctctctgcctgaggctgctccgccagatgaatctcctcaccaagtatgatggaaaggaccagctccatggtcccgcgatcctccataacacatgcaaataaaaaacggtccagcagggtcagctctgccagcggtttcatgacaggcctgccggggtcattcattttcttcatcttattctccttttattatacaaaagctttgcctccgttgcaagaatatacacgaatcacaatcctgaatcacatatccacagaaccaccgcctgacattttaaaattattcagccatacaacacagggatacaggagaaaaactcccttaagattatctcggacagaacatccttaagatttatatatgtaaaatagcacttaccgtcagtcaagtcaatagcatgagcacaaataacatgaactcaataaaaaacagtaataaaaaacgctgcctgaaaatgaatccatatgataatgaatccatctcaggcagcagccttaagccacacctgcctcagcctatttccgccccaggctcattccagccttcagcatcctgaatgtacggtccgcggcactgatgtacagctcttccgcccgctccagggcctcctcgatatccatggcgccgtttatcgtggtcataatactgtcaatgccgtaatcaaaaatcgtctcagccttgtcgcccatacctcccacgatggctgccaccggtatgcctctctccctgcagcgctttccgattccgcttggcacctttccaaaggcagactgccagtccattctaccctctccggtaatcaccaggtccaccccctctaagaggctgtcaaaatgaaccaaatccagtaccgtgtcaataccggacttgagattggccttcaggaacacgcagaatgccgcccctaatccaccggcagcgcccgctccgggaatcttatccacatccacgcccagcttttccttcagcagagccgcataccgaaccattccgccctctaacacgtccaggatttccggtgtaccgcccttctgctttccaaatgtataggtggctccgtccggtcccgtaagaggattggtcacatcgcacatcacggtgaatccggcctgggccaccgccgggtgcatccggctcgcatcaatatcagccactcttgtcaaatcccggcctctgccctccagctcatttccctgatcatccaggaaccttactcccagagcacgcatggcccccataccgccgtcattggttgcgctgcctccaatggcaatggaaatcttccggtatccccgatccagagcatctctaatcaattcccctgtgccgtaggtggtggtgttcaggggattgcgcctgtccgccggcaccatgggaagcccggaagcagctgccatctcgatgatagcggagtccccttcaaattccccgtaaaaggactgcgcctcctccatcaaagggccatggaccgtcagtctgcggtatgtaccgttcagcgctgaaatcaccgcgtcaatggttccctccccgccgtcagccacaggcacgccagctgtctcacagcccggaaatgtccgccctgccgctgcctccaaaagctgtgtaatgcgctctgacgacaaggtccccttaaacgaatctgatgcaaataaaaacttcatggttccgcctcccaattgtgattgattttcttacgtctattgtactgtttccaggctgccgcgtcaatgttccaaaaaacatatattctgtatattatttattcttaagcacaacaaaccttctggcaggccataccccattctgtttcccgtcccgccgctaatcctgcatcatttccttcacatccctgaaaaataccatcgccatgtaaaacaccgctgactggctcagtacgcgcacgtcatatcccgtcagttcctccagcttcctgagcttataggtcaatgtattcttatggatgtgcatggcatccgacgcagcctttaaggaaccctcggctccgaaataagcctccagaagccccatccactgacacagctcctcataaccgcagttcttaaataccttgcgaaggtactctgccttcacactatcagccacatcctccgtaaacagctccagggtaacgctgtcatatgtcatgacgtcccgtttggacatatcggctgagcgccatgccttgttggcctggccatatgccacatggatgtccctggccctgccgtcgatccccataaccagacctatgccgaatttcttctgcacacaggagcgtatgcgcccggccagctgggtcatatgacggtcggaagcaccctgaaccaggaaaatctgccggccggcattgcggaacaccagacatcccgcccctgccagggaaacagcttccccctctgcctgctccagcagcttctggcccgacgcggtggatgcgtattcctggaagtttttgacgcctgccaccatgacccttctgggaacagaaatgtcgattcccagcgcaaagcctctctcctccagtaccctgggctgaaggagtccgcttccaaggacccagtcctccagaaaacggttcagcacccgctgccccatacggcgttcatcctgccaaacattttcccgaatcaggatttccaccatcttcttcacaatctggccatagccggccacttcctcataccggcccgtgatgccgataacgccggcaatgcttccggcctggtacacaggcaggttcagccccggacgggaggtgaacgtggcctcctcgtccctcacatacagctcatccagatgctccctgatgattttcctggccccctcatgaagcgtgccgattcgctccggatccgtactggctatgacataaccttccgggtccatcatattaatattctggcccacaatggcccccacttcctccacaatggcctgggctccctgctgtgaaagcctcagcgccttccctgtctgttccatccattccacctgcctttataccatcctgcctgttttgcggccgtctgcatgccaaaagggggctgtggcgcccgggacacccccatggccgcagctccccatattcattcctgttccctcatgtttcttttatcacttttccccggttctactgataaatggggtatttgtcacagagctttgtcacttctctcctgatataatccgctttattctcaaaatccgtggcagccagccaaatgcactcggcaatcttcggcatgtcctcttccttaaggcccctggtggtaatggccggtgtaccgatgcgcacgcctgaagtgacaaatgggcttctggggtcattgggaaccgtattcttgttcagggtgatgtacacctcatcgcagcgattctgcagctccttgcccgacacttccatgccgcgcagatcaaccagcatcaggtggttgtccgtgccgtccgtaaggagcttgaatccctgttttttaagagcctgggcaagagcctttgcattggctgtcacctggcgctggtatgacttgaattcaggctttaatgcctctccaaagcacactgcttttcccgctatcacatgctccagcgggccgccttgggttcccgggaaaatggccttgttgaaattaaatttctcagccgcctccttgtttgccagaatcatgccgccccttggccccctcaatgtcttgtgggtggtggtggtcaccacatccgcataaggaatggggctgggatgttcgcccgcagccaccagacccgcgatatgggccatatcaaccatgagataagcgccaacttcgtcagcgatttcacgaaaccgcttgaaatcaatggtcctggcataggcgctggcgcctgctatgataagctttggcctggcttcctttgcaatccgctccagctcatcgtagtcgatgaacccctggtcattgactccataaggtacgatatgaaagtaaaggccggaaaaattcacaggacttccgtgggtgagatgaccgccgtggtccaggttcatgcccatgaccgtgtcccctgctttcagcatggcaatgaacaccgccatattggcctgagcgcctgaatgtggctgtacgttggcgtaatcacatccgaacagcttcttagcacgctcaatggcaagggtttccaccacgtccacgcactggcatccgccgtaataacgttttcccgaatatccttccgcatacttattggtgagaaccgtccccatagccatcatgacaggctctgacacgatattctctgatgcgatgagttccaggttgcgtctctggcgcgcgcattcagcctgaatggcctcgcccacttccttgtcatatccggtaataaaatccattacttcattaaccattatcttacctcttcctttcgcaatgacagcctttttctgctgattataacctatgtaacagcaaattgcaagacatatggcagagcccctttctctttatctgttaattttttatcgctgtttttcttaataatttcataataattatagcactttctttaaactttagacacaattcggacacaattataggctattatcaaactcgttccataaaaatttgtgtttagaaagtctcaccgggaggctttcagaggaggaaaactattatgaagaagacaatcgcaaaatccatgaccgctattatggcggcagctatgatcgcaggaagcctgaccgcttgcggcggcagcgacaacaaggctgagaccactgttgctgtagagaccacagtagagactactgaggctgttgaggagaccactgctgaggctgctgacgttgaggagtctaccgaggctgctgacgctgaggagtccactgaggctgctgacgctgaggagtctaccgaggctgctgacgctgaagagtccagcgaggctgatgcgactgaggcttccaaggaagaggctgccggcgaggctaatgctgaggctgcagaggaaacaactgaggctgctcagaactaatcttctttcacgccaaaaagggtgctgtccgctgcggcagcatcccttttttattcctgatgtatgaaacttcctaaaaacttcctaatggaacttccaattcttcactacaatctgcagattcctgtttccgttatactcatttactcccggatagtagataatatccatgacacggcggtcgcccatttcctccatgaacaaatctccctccgtaaaaatcacgccgtccatggctgttccccgctcatttactaggcttacccgcaccacattcctgttacgccccatgaccctggcactgcgtataaacagtcccttctgggcaaactggggtttctcatttccctgtccatacggttccagcagctccaattcctctatgaacggttcagttatgtattcaaaaggcatagccacatcaatccacaccttgggtatgaaatcctcttccgtcagccgctcccgcgcgttttcgttgagacggcgccggaattcgtccacatccttttcctccagtgaaaacccggccgccatgggatggcccccgaacttaagcagcaggtcctgtacctccaccagggactggaacatatgatatgcctctatggaacgtcccgaccccttgacgcagccctcggcccgcgtaagcacataggagggcttgttgtaccgttccctgagacgccctgccacaatgccggccagtgattcgtggcagtccggcaggaataccaccagcaccttatcctcccggtacagctcatccaccatggctgccgcctgttcaatcccctcctgggtcatgtccttgcgctggtcgttgagggcctttaattcctctgccatccggtccgccgccggctcatcctcacacagaaggagcccaagggctatcttggccgtctgaagccgtccgctggcattcaggcacggtccgatgacaaagccgatgtgataggccgtgatgttccctgcctggagattatttttctcaatcagtttccgaagtcccagattggacgtatgttccagcctggagagcccctcctttacaatgatgcggttctctccctgaagcttcatcacatcccccaccgttgcaatggccgcgatttccagcagaccgagccattcctcaccgggtattttatggacctcataaagcacctgcaccagcttataggctaccatgccgccgcatatatcgggaaagggataaaggctgtccctgcgcttgggattgaccacggcatccgcgggcggcagcatctccctgccctccggcgtctcactgtcctcagtcagtatatcgtgatgatccgtcacgatcacggtcatccccagctccttggccctggctatctggctgatggcggcaataccgttatcacaggtaaggatggtgtcgattccgtcctctgccgctgcttctataatcaattcattgatgccgtatccgtccttaatgcggtccggaatctcataatccacctcagccccaatccgctttaatgcgcggtagagaaggtatgtggagcatacaccgtctatatcgtagtctcccacaatccgtatacgcctgccttcagccgccttctgtccaagtatctccactgcccggtccatgtccggcagcaggtgcggatcgtgaagctgctccacggagccgtgaagataccgtcctatatcttccacatcctccagaccgcggttgcgtatgattctggccgttaccgggctgatatggtatttttctgcaattttattaaagtctgccttcttggcatacagcatccatcttgcttctgtcattgtctcgtcctgtccttgtctattcttcctggtcccccatgaccgaggagtaaatgataccggccgccattcccgcaaatgccggcacaatccaccccaatccagccccgtatccgggcaggaacgtagttgcctgggtgaggaatggaatcacgaatttgctctgttccagggcgtataccacgctgactgcgcctgtaaacagaatggccgccggatacatggccggccaccttcttgtaagcggccctaaaaatgccagcacaatcagcacaatggcgattgggtaaatggcgttcagaaccggcactgacacggccagtatcttattaaggcccgcactggatataatcaggctaatcagggcaaataaaaacacccatactctgtagccgattacaggtatgatagaattaaaatactggctgcagcagctgagaagccccacgcatgtattaaaacaggcaatgaggaaaataagccccagtatcatcatacctgcatttccaaagaggtttcccgcaacgaaagtaagtatccttgccccattatccatgctgccggccgcggctcccgccggtgcaccgatgtgggccagggccgcataaataagggccagcagaatacctgctatgattcccgccctaatggtttccctgacaatcgcaccctcctgatccacccccttggcctgtatattgatggcaataataattccaaaattcagggccgcaatggtatccatggtctggtatccctccaggaaaccagtcacagcggggccagacttatagacagctccgggagcgccgtaatgacccatgggccacaccaggcatcctataaaaataacgctgataagcaccagcaatgtgggacacaatattttccccagcctgtccgtcagcttatccggcctgaatgccactgccatggcagccgcaaagaacaccacggaatatccgaactgtgccatggtctggaccgtaaagccggtcccgcttaccgtactgttcagagaaacgcccatctgctcaagaaccgggaacaccgtcatctcgaaggaagtactggaggtcctgggtatggccaggcacggtcctatggagagatagataagaagggtaaacaggaatgcaaagccggggtgcaccctgcccgccagcttgccaatgccgcccgaaagggcaaccgcagccactcccaggacaggaagtcccaccgcgctgagcagaaaacccgacatggccttccaggtcagcacccctgcccgggcgccaagaaaaggcgggaaaatcaaattccccgcaccaaaaaacatagaaaataatgtaaaacccacaagcagaagattctgcttcgacaatttctgcctcatatttttatccccgcttaatcaaaataagagataagaatcaaacttccccgctctttcttacctctgctcgtaacataataccacaaaatgcggcatctttcaagaaggttgcatatttgtggcagttggcagtgatgttagcgttttaaaatattttcaaaaaacccattgacatttctccccagacaggctataatagctcttgcgctgttagagatagaaatcaaacagcagcatgcgtcagtagctcagctggatagagcatacggctacggaccgtagtgtcgggagttcgaatcttctctggcgcatgaagaaaacctcgcaggcgtaagccttgcggggttttttgttttgagtgaacgtgcgcccgccgggcgcacccaaaggaggacaaccattactggttgtcctccatcacctctctcaccttctccagcatcaccggcgtcagcttaagaatccgctgttttttagacaccttccccacggcttcctcaaagctcataccattaccagccgtcatggcatccttcaccagaatatagtaaagcataactgcctttttatcttccttgggaagcttttccctaagctgctgctccacagccgccttctgggccgtgcctcccggaaaaatgcggtgcagatattccctctcctcctgctcccgctcctccttgctcttaatctcaaatccgaatatattcatattcccctcctgcgcactcgcaccaatcactaaatatagtacaagtataaaatccatagggaagtacgtcaagaagtttctcagtgttacccgctgcttgttacccgccgcttgttatccatcccgtcccgcttccatattttcaaatacggcccggtccacgccgccgtcctggaatgccaccacagtggtacacactgcatccccggtaatgttgacagccgtcctgctcatatccaatatgcggtcaattcccataatcagggctatggcctccactggcaggcccactgatgcaaataccatggatagggtaatcagtcccacccccggcacaccggccgttcccacggaagccagggtggccgtcagtatcacggtcagataatccgccacggacaggtggattccaaatgcctgggatgcgaacaccacagccaccccctgcatgatagctgtgccgtccatgttgatcgtggcccccaggggtatggtaaaggaagaaatacgccgcggcacccccatcttcctgtgcagggtatcgatggacatgggaatggttgcattggaagtcgcggtggaaaacgcaaagcccattacaggcaggaatttcttgaggaatttgacaggactcagccctgtaaaccccttaaggatcgccatgtagaccaccagcccctgtatggccagtgcaatcataacccctgccatatacttaaacaggggcagaaacgcgtcaaaaccaatgccggaaaacgttctggcagtcagacagaacacgccgtagggagccagcttcatgaccatgactgtcatctgcatcatcacatcattaaactggctgaataaattccccaccgtctgaaccgcttcccccagaccggccagaatcattcccacaatcagcgcaaagaggatgatggacagcatatccccgtctgccagcgccctcaccggattgaccggaatgatagccaaaagcgtgtccgccagcccttccttctccccgatagtgacctgggctgtttccagggcagaaagatctaacccggctcccgggttaatcatttgggcagtcaatatggccgcggtgatggccagagcagtggttgccagataaaatcccagtgtctttactcctatttttcccagtttcttcgtatcccccatggacatgctgccgcacaccagggagcagaataccaatggcaccaccagcatctgcatcagacgcaggaatccatttcctatcagatagaatattccgtctatgagcagtacgtcccggaccttcccctccggaacagcgtaatgaagaaggatgcccgcagccgcccccagcgcaagtccaatgaagatagcggtggtaagtcccggacttttcctattttccatagccgataccatcctttccctcagcccgtctccggcttccggttcgccagtccttcatatacgcctccagcatctccttccaatggggcaggagacgcatgtcggatatgcgcagcatcatattgtccagcacgctgtaggaaggcctcatggagcttaaggtgtcctcagaggcatacacaggttccaccgggacctgataacccgccagccggacagcctcctttgccagctcataccggctgcagcagccctggcccgtcacatggtacaatccgtcctcgccgttctccatcagctctatgaccttggcggccagtccgtcagcccctgtgggtgatgccatctggtccgaggcagccctgatggtcttaccctggccggccatctccagaatacgccccaggtatgggcttccatccccgaatatccaggaactccgcacaatgatatggcggttgcagaactccctaacaaaattttcccctgccatcttggacttgccgtacacggtccgaggtgagaccgggtcaaattccgtataaggcgtctggctttccccgtcaaacacatcgtctgtggacatctggaccagcctggacttccccattctggcggcaacactcagattcctggcccccagagcatttacccggtacgcttcctccggccggacctcacaggcagccacatcggtcaggccggcgcagttcacaatataatgtggcctgttgatatgggcgtattccatcacagcctctgaatccgtgatatccaccgaatccacatccgtcaaaagcagctccaccggcctggacgccagaatatctgtcatttttcttccaacccgtcccccggccccgcatatccatattttcagcatcctgctccatccttccatatataactgaattgctatactttttccataaatacatcaggtagtatctgcaattgcacgttcttcatacacccgacggagcagaaggcaggaattcagcgctgcaaaaaggcccgggcggaaaacgctcggacctcttggcagctcaaatcaaagaccgatattaaaggccggtatgttctcaggcaggctgccgaaacgggcagcttccatttctatccagcatacagataaattgtgagcattctgtgatggttttctatagaaattataaactccctgcttttcgctccatggccctgccgcacagatcagagaacagatgattcatggcgggggctgactcaagaaggctttcgggatgccactgtacgcctaccatcagaccatcctggtcctcgatggcctcaataaccccgtcatttgcatatgccgaggccctgagccccttccccagctccttcaccgactgatggtgcatggaattggtcatgcagacgccgctgcccagaagtcttgacagcctggtcccctcttccacccgtatctggtgggtaaggtaatcccgcctgcccagctgcagatgcctgatgcagtcaggccccttaagggaaaggtcctgatacagggaacctcccatgagtacgttaagcagttggcttcccttacagatgcccagcatgggctttccatgctccagggcataacggcccgccctcatcagggcttcgtcaatatccggcttaaatacctggatggccggatgagggtcctccccatagtaggaaggcgtcatgtcctcccctcccgggaacaggattccgtcacagatacccataatttcctctgtccgctccataacggcagacgccggtaaaatcacagggattcccccgttcttcatgaccgcatccacatagcagctgttctgataagccctttccatgctgtcaaacaaacctggctgggtcatgtatgtatttcccatgataccgataatcggacgctccatcttctccgcctccctacagtatatcctggcgcaggatgtggcggatgcgttccgggtccagccccctgatgacctgggccgccagctccgtagccgcctccaggtcatcctttgcgcagaaattataatgggaatgtacatatctggaaggtacgcccagcacaaggacaggaaccgcctttcctatgaggctgattctgcccgcattggtgctacctccccgccttacggcctcctggtaccggataccgaatttgccggccagctccatggcatattccatgaacaccggattggatatatagctcttgtccatgcggcggatctgaacgccgtttttcatccttccctgggcctgggcagcggaaaaaaagaagtcatccgacggggaaccctcgaacaggatggccaggtccggcttcaccacctgggtggtgacggtggcgcctctcatgcccacttcctcctgggccgcaaacgcgcccaccacatccactgccagctcattcctgccgtcatatatcttattcatggtatccacgatgcaggcgcagccggccctgttgtcaaatgccttgccgaagcagatcccatgttcctcatcataggaaaaggacacctccgggaccatgggatctccgatggatacgccaaagtcgtcctccacctccctgcggcttgtggcgccgatgtccacatacaggttttcaatgcacagttccagggaagccctctccttatcgttcatgaaatgcacgggctttgacataatgataccccttattttcctgccggcccttgtctttatgatgaccgtgtgggccggaaggctggtcaggtgaaagcctcccagcatgaggattcccaggcagccgttatcatggatgcactgcaccataaaaccgcactcgtccaggtgggcgtccagctgcaccaccggtttatccccggcgacgcccggcatgcgcacatacaggttgttcatggcgtcattttccacctggtacttaccgcagtaacccgccacggtgcgcaccacctcttcctcaaacccactggggccaaatgcatctgatatctttccaaacatatctatatccattgctgttttctccttattcaaacgcgctttaatacaccacaaagcaatgggccgtcaccacatccatccatctggatgtctccagcctgttggtaaatgtgtccactgccctcattcccgggtaaaaggacatctggtatgccttcttccagtctttataggtcacttcatatgtaaatgtctccggaagcgctgccctgcaccgggaaagattcccggccagcgccttcttcactccctggcggatggattcctccacctgccccggcgccttacagtaagtggatgcacccagaccggtctttgtcacggccgtggtgatagccggcaccatttccctggccatgtcgcagatggtcctgtccccggacagaaacagcaccggaaccccgtgggaagctgcggtgtagctgttcagcatgaactcgctcatgcagctgccgtttaagcggatgtacaggctgtttcccgtggaagtgtggctgatggcaaagcccggatttcctgccggggcatggtatcctatgtacatgaccccgtcaaaggaatcgtccaggccggacatcatgttataggggtgaccgctcttgccccgaatcagggtcacgtaatccggcatgcagagaggatcaatgttagccgcatccccgtggccgtcctttaccactatctcgtcagctcccgcttcatgggcagcctcacaggcagccaccacttccctggtcatctgccccgcaaattccctgtacgctgcttcattcttatgggtctcatatgccagggccactcccgcgcacccttctatatccgcactgataaaaagtttcatcccttgttctccttgattttgtcatcatagagatggcagtatacataatggtcgtccgatacctggtagcgctccggcgccttttccttacagatgtccatacacttgggacacctggtgtggaacttgcagccgcttggcggatttaaggccgacgggatgcttccttccaggatgatgcgctccttctttgccgttgggtccgggaccggtacggctgacagcagggcctgggtgtaaggatgaagcggattgctgtacagcttgcgcttgtcccccacctccacaaaattccccagatacatgacgcccacccggtcgctgatgtgctccaccacgctcaggtcatgggccacgaatatataggtcaggttaagctccttctggagccggtgcagcaggtttaacacctgggcctggatggacacgtccagggccgatacaggctcgtccgctataatcagctccggctcaactgccagagccctggcgattccgatacgctggcgctggccgcctgaaaattcatggggataccggttggcgtggtaatcatccagtccaacctttctcagaagccccattacacggtcttccatttccttcttgctctttgtcagactgtgtatgattaacggctcagcgatgatgtcaaatacagacatcctgggattcagggacgcgtacgggtcctggaataccatctgaacctttttgcgcacagagcgcatctgctttctgccataggaggagatatcctcaccggacaggacgattttacctgccgtgggggtctccagcttgcagattccccttcccaatgtggatttgccgcagcccgactcacctacgatgccgaacacctcgccccttcgcacctcgaaggaaacgccgtccactgccttgacgaattcacgcccgctgcgaaaatcccccttcacaggataatacactttcataccttcaacattcagcaggatatctgccatcacgcgtcaccgcctttcttttcacagagccagcagcggctcatatggcctcctcccacatcgtagaagccgggttcttcctccctgcacttatcaaaggcgcaggagcatctgggagcgaatttacatccctgaggcatgtattttggattcgggacattgcccggtatggattccagttcctccgcatactctcccagcttgggaatggatgccagaaggcccctggtatacggatgggacggattggcgaaaatggacctcacatcccccttctccaccacccggccgctgtacatgaccaccacgtcgtcgcaaacctccgccaccacaccaaggtcatgggtgatgaacaggatggaggttcctgtcttctgcttcaggttctccatcagatccagaatctgggcctggatggtaacgtccagtgccgtggtaggctcgtccgctatgaggatcttcggtttgcacaccagggccatggctatcatgactctctggcgctgtcctccggaaagctggaagggatattccttcatcatgcgctccaccctgggaacgcccgtcagcttcagcatctccacagccttgtcccaggcctcctgcctgcttatgttgttgtgcatcaggatacattccgtaatctggtccccaatcttcataacagggttcaggctggtcataggctcctggaaaatcatggaaatcttttccccgcgcatcttcctgcgctcctcgtcgtccagctttgtcaaatcgcggccctcaaacagaatctccccttcggccacctttcccgtggttcccatcagaagtcccatgacggacagggcggtcacgctcttgccgctgcctgactctcccacgattccaagggtgcttccctctctcagttcaatatccacgccatccactgatttaatcacaccgctgtccgtgtagaagtaggtgtgcagattcttaatctctaaaatattattattcgtattctccataagtccactcctaatcagtcagttttggatccagcgcgtctctcaggccgtcgcccagcaggttgaagcagagcacggtgaagaagattgcaagacccggaaacagggtgatatgccagcttgtcagcatgtagttacgtccgttgctcagaagcagtccccactcaggcgtgggaggctgggcgcccatgcccaggaaactgaggctggaagcagtgataatggaggttccgatggacatggtgtactgtacgatgatattgggaatggcgctgggcaggatatgtttgaacaggatgcgcatgtcgcctgctccgatgttgcgggcagcctggacaaacacgctgttctttgtctccagtgtattgcccctcaccagacgggcaaacttggggatgttgaacaccgcaacagcgattaccacattataaagtccgcttcccaggatggccacaatggcaattgccaggataaggcccgggaaggccagcagcacatcgcagatgcgcatgatgatggaatcaatgatgccgccgtaatatccggccagaagtcccataatggttcccgcaatcattcccacggtcacggcaaacagtcccacgctgagggatatcctggttccgcagattaccctggaaaacaaatccctgccgaattcatcggtgccaaagagatgggcggccgtaggcggctgcataatggcagagtaatcatattcattgattccataaggggcaatcttatagctgataaacgccagcactacaaggaatatcagaaataccatggcagccatggctgtcttctgttttttgaactttcttacaaactctgaaaacggggtattgatgtccgtcctttcagttaacactttattcttagccatcttttgtcgcccccttctagctcaattgaatttcaggattcagcactgcgtacagtacatccaccaccaggttaatcagtacgaaatgcagggaaaatataagaatcagcgactggattgcaggataatccctgtagttcacggattcaatcaaaagggaaccaagtcccggaaacgcgaacacagtttccgtcacaacggaaccgcccagaagaaaaccgaactgaagtcccacaaccgtcacaacggatatcatacagttacggaacacatgtttccagataacagtcttttcccgcaggcccttggccctggccgtacgcacgtaatcctccttcattacctcgatgaccgaggaacgggtaaagcgggcgataatagccgcaatgctgacccccagcgtgatagacggcagaatcagattcttaaaggagccggcccccgtggtgggcagcagcctgtacttgaccgcgaagaccatgataagcatgaacccaatccagaaggagggcatggatatacctgagacagccaccgtcattcctgtgtagtcctgccacttgctcctgtttcttcctgaccagacgccgataagaacccctgcaatcacgctccaggtcagacttaaaagggtaagctgcaccgtattcatgtaccgcccctgaacctcagtcagcaccgggcgcttggttctcagcgatgtgcccaaatcccccctcacaagtcctgtcacgtagctgacatactgctggggaagaggcttgttaaggccaagctgttcccttaccagttccacatcctctttggttgcctgcggccctgccacctgcctggccggatctccgggaatcaggcgcacaaagaagaatacaaacgtaactacgataatcagggttggtataactccaacaactcttttacatatgtatctcagcatatagactctcacctctcaaatcattattgggtatacaccctgtattttatcttaaaaaggtctggcagagaatccccctccgccagacccttaagccttttatttcgtcatcttaccatttctgatattaaggcagttatctgggaacatctttacatttaccatcttattggaagttgcccaggagttgaagtcagttgccagacataccaggggactttcttcccaaatcaggtcctgagccttggcatatgcttctgctctcttatcacggtcagccgtgttcaggccgtccttcagatatccgtctaattcatcgttctcgaaatagcagatattgtagctcataggaggctcagactcttttgccagcagtggacggataccccagtccgcgtcgccggtagaggatgaccagccgatgatatacatatcaacttctgcctctgcgccgggagcgtccgtatcctggatcttctcgttcacgattgcgctctccaggctgataagctcaacatcgatacccacctcggcaagctgctgctttaagaactcgccctgcttcatgtttgcggaagtgttggcaaatatcagggttgtcttaaagccatccggataacccgcctctgcaagcagtgattttgccttctcgatgtcgtatggataaggatcatttcccttgtagtactgaagcttgggagcaatgacagaggttccgggctgggagttgccattctttacaaccgccacataggcgtccttattgatggcatagttgatggcctgacggactttcttgtcattgaacggtttcttctggttgttcatcatcaggtaacggactaccaggccctggtcctgtcccacgattacgttaggatcagatttaagtcctgccaggttttcatccggtaccggccagataagctgggcatcgccggactgaatcatggcaaccctggtggcggactcaggtacaggctttaaggtgatgctcttgaagccggcgtccttgtcagccagaggcgtgccgccgcagatatccgcgtcatagccccaccagtccttgttcagttcaaccgtaaggtggtcgccctgaatccactctttaaatgtatactgtcccgtaccgatgggggcctctgcgcacgcctgtgatccctgctcgattaccttggggctcatgaccacgcaggccggatgggccagtgtctcgatgaacgcgccaaagggggaggacagctttactacgatggtatagtcatcctgaaccgtagtggtgtccagtatattgcataacaatgtggttctcttaagtcccagggacttatctgcccaacggtcaaagttggccctggcagcctctgcgttccatggggttccgtcagagaacgtgatgccctctctcagcttgatggtgaactccgtggcgctgtcattggccgtatactcagttgccagcatgggaatgattttcatttcgtcgtcaaacccaaacaatccgtccatgataagacgctgaacgcctcctgagagggtgtcgctggtatccagggggtccagtgtggtgaagtccacattgactgctcctataatatccgtgtcctgggaaacagactctccctccgcaacagctgccgctgctgtcgtttcttccgcagctgccgccccgcctgcagctaccgtggtcgtatctttggtgcctgatggtgaaccacatgccgtcaatcccagcatggcagcaaccagtgccagggcgcacagcttctttccgcttttcttcatagaatatcctcctttttgtgatgatacaaaaaaagcccggaaacctacagctctcacgctcattttgtaagcatccttgcttacaataattttacacgtttctgtgctgccttgtcaaataaatcattcttttttccgtaaagcattcgttacaatttaaaatttaaagccattaggttgttatatcctaatatttttgatataatcaacctaatattactcaggaggacggcccatggacagaagccagccaaaataccatgtgctcattgtcagcatcaattccagcatacgccttgaattccagagttatctccacaagatattgggagcctatattgcctttgatacaattggtctggagcaggttcagcgcccggatcaaatcaagggctaccagtgcatccttttttccagccccctggtccagtctgaatttcctatccccatcccaaaggagatcatggagattatctgtaccaggaccttcaaccatgcctgtctggaccaaatcatccgcataccgcccggcgagcgtgtctacatcgttaatgacacctatgactccattgtcaccatcatggaacagctgaaggaggcaggagtggtgcagtaccggtttgagcccttttatccgggatgcatccaggctgacgagtccatccactatgccatcaccgtaggagagccccagctggttcccagccatatcaccaatgtcattgatattggcaaccgcatcatcgacatctccacggtcaatgagctttgcgagtatttccatcttcccgccagcctgtccaaccagattaccaaggcctatgtgaacagcatcatgcagattgccaagctgaccagcgcctattaccaggattacatctattcccgccagcttctccagaccgttatcagcaatcttcccataggtctgtgccttctgtctgtccgcggggaaatcaacatggtcaaccgcagattctccatggacctggagctgccggagacaggcaccacgggccggaatctgtcacggttcctgccccatccctgtaaggatatggatttctgtcacagcgcggattacaaggtaatgaaccgcagcggaaagcctctcctgctcagctcccttgaactgctgctgcccaaccacgagcccctgtacctgctcaccagcgcgccgtgtcctgtgctggctgacgggaccggggattatcctgccatcccggatcccgtattctctgattccagatatgcggacagcatgttcacaaactttaccactgcctcggagtctatgaagaacatcctggaatatgccagaaggctctccctctatgacttccccgtgctgattcagggcgagagcggaacccagaaaaaactcctggccagggccatacacaagacctcctccaggaggcagcatccctttgtctgcctgaatatgcccatggggcttaatgtggccgcagggataaacgggacttccgtaccgggcggtggttccggaccaaacagagcttccggaccagacgttttatcagatccgggcggtacctccggtctgtcaggagcagccctgattgtctctgatccgctctcccagatgctggaactgtttaaagaagccaaccacggaaccctgctcattaacagcgccgaatacctgtctcccgagattcaggggctcctgattcacattcttcaggacaaccggaccggaaatgtcttcggaacccgcttctccccctttgatgtacgcatcatcgccacagccggacaggacctgtacgagctggtacagcagggcacgttccgcgaagaactgttcttcctgctgaatgcggcttccatcgacaccctgccgctcaggaaacgcagggaggacatccctctgcttatggaccagttcttccgcgagctgttccacaacaaaagcctgatggccagggacatcctgtcctccagtctctttgacttcctgatagactacgattatccgggcaatgtccaggagctttataacctgacccgttatttcttctcccactatgctgcccatcccctgatactggcacagcttccctcctatatcaggaaccagatgcgaaaatccggccaggaccacagcccggtccgcctcagggtgctggctgccatagccgcctccccccgcatcggccgtggagccataaaaaataccctggcagaggccggcgtggaagtaagcgacggccgcctgcgggggctgctgaaagaattatcagaagaagggcttatccgcatcaaccgcaccaggggaggctgcgagataacagagctgggacttatgtcccttcgtcattaatgtttaagaatctgcggaaggaactccgacaggctgtaatacacctcccctgccagtcccccggtgcgtccggctgctgtcatggaattcaggatggcttcatgaacagcttccgcggctgccttgaaggccacgttaatcaggtcctccctgatacatgtgcttgtcatgatttccggactatcctttccctgcagacggcccgcggtggtgaatccaatcatcacttcgccgctgccgtggccggtgtaggcgcctgtcctggcaatgcccacacccgccctgcggatgatgcgctttaactgacggtcgctgacaggcaggtccgtggcgacgatggtcataatggacccctggtcctgttccgcggcggccatcttcctgcgcctttccttttcctccagaatccgctcaccggcccgtatgccgtttatgaccagatcctctgttgccccgaaattggactgcaccagaacccccagcgtgaattttttaccgccgattctcatgattctggaggcggatccgatccctcccttcaggccataacacacggttcccgtgcctgcgcccacatcaccctcctcaaaatcctcatctgcccgtgaaaatgcttccatcacatcctccatggacacagccctgtgctgaatccggttaatcttacagtcattgcactcacccaccaccgggcttacggacgtgacctccacctgctcctttgcgcactgcctgatagtatactccaccagggcgtcggctgccagacctacgttcagggtattggtcagggcaatgggagtctccagggttcccagctcctccacctggaccaggccgcaggtcttgccgaatccattgtgcacgtatcccgcagctacgaacttgcggtcaaatacatttcccggtcccggtacaatcaccgttacgccggtcctgctgtctccacttctcactgtcttatggcctaccagcacgcccggcacgtctgtaatcttatttttaggcccggttttcataacgcccggcacaataccaaaatccctgattctctttctctccatcttctttcctcctcccacagcctccggcctccatgtggattatattatcatgtacagcaacattattatagaagaaaagcccgcagaaacgcctttaaactggcgtccctgcggactttcccccatcgtactgggccggcgggattcgaaccctcgagtgcaggagtcaaagtcctgtgccttaccgcttggcgacggcccaacaagccgtatagtgatccggcatgccaaattataataccatagaatttaccggtttgcaagtttttgaaacccacttttgcagaattcctgatttggctgattggggattcctattttcctgatttacatctgccccgccatctgcctgcggatatgcttccaccacacccacgccggcattgccgccattgcctccgaaattggaaagggccgccacagggcgtccagcccaaacagcgctgttcgtatcaaagcatgcattagctatacggtattatataccggtatctaaaacaagaaaaaaatcccctttccacacttggaaaggggaaaagggtgagtagagggattcgaaccctcggcctccagagccacaatctggcgcgataaccaacttcgccacacccaccataataagttatgaaacatcagagcttacgctcaatgagcctgaagggattcgaacccccgacccacggcttagaaggccgttgctctatccaactgagctacagactcacaacttctgacagccttgatgtgactctgcactttcatgccgactgctgtcaacgagctatagtttatcatatgtctgtggagattgcaagcacttttttaaatttttgtccttttttgcagtactttttgcagtcttttccgcagccttttccaaataccggtttccggcgctgaaaaaggctgcgtcaaagccatattttgccgcaaaatctaccgtggcttccggtaaaattgaatccgtttataatccccgtccatgcggcatatggtgccaaagggcagggttcccatgggcttatcgtggcctgacctgatatgatacatcacaggcaagtcaaaggttccaaagcggtcatgaaggaattcttctatctgataggtgccgtcataccggtcatgggtacagtccgtaaaatctcccaggagaattcccgccgcgtgttcaaacatccccgcgtattccatttgtgtgatatacatgtcaagggaggcgatgccttcctccacatcctccagaaacagaatcttatccctggtttccagctgatagaaggtgccgcaggccctggccagcacggatatatttccgcctgccagaatgccggccgccgtccctccccggatggtcttaaagccttcctccccgggcgggttccgaaactccagctcctcctccatattgagggctgcaaacaggccggacctggtgtagtcgtcaaaatccttcagcatattggagcacaccatggggccgtggaaggtgaccagattcccaaacatctggaatactgagtgcaggtttgttatgtcgctgtatccaacgaaaatcttgggattttccttcaccaggtcaaaatccaggtatttcatgatttgggaactgccatagcctccccgcacgcagaaaaccgccttcacctgtgaatccgcaaacatgcggtttatgtcctctgcccggacacaggcatcccccgccagataattatgaaaattatacatattctcaagacatgtgcccagttttacccggtaccccatgccctccagcagctttacgcagccatccctctcctcttcctttacgggaaacgcaggggccgccagccccaccgtgtccccttccctcaacctctccagaaataccatctgtctcaatccgtcctttcatccttaatccacagagtgtcagaaagcaattatccggcactctccagccaaaaagccgcccacgctctgatttccgggcgtgggcaatcctgcttcgcttaatgactatggcctggctctctcaccgtgcctactgcttatcagcatatttaaatatcgtatgtccaatataggtcttgataacgccctcgcatcccggctttaccagaagctgtgcattgcggtaatacagaggcagtatgggcatctcctccatcagaagcttctcgcctgtctcaaacagctccatgcgcttcttgttgtctgtaaggctcctggcctctttcatcatgctgtcgtattccttggcctcatcgttcagccagcggcactgggtttcatttctctggagaaggaagcagtccagattagtgctggggtcaggataatcgccggtccagccgtcatagcagatatcgaaactgccggccgtctgctcatcccagtatacctttggctcaaaggtaacaatctccacattcacgcccagattttccttccacatagcctgcattgcctgggccacgtcctttttctcctggtcgttctgggtaatcagagtcagtgtggggtatccctctccgcccggatatcctgcttcttccataagcgcctttgcagcttccacatcctctgtgaacaggctgcccaccgtggtgcggtaatcttcgccggagccctcatagggaatgccgtgaggcacaaaagcataggatgattccggcctggaggcaacgatggactggttgatgacatccctgttaagagacattgccagcgccttcctcacccgcgcgtccgacaggtagtctttctcgcagttaaagtcataatagcaggttcctatgagatcataggacttaagctcgtcgcttcccccgtactgtgactgtgcctgggtctggatgatggtattgtccaccacgtccacctctcctgcattgtaagcggacagcgctgcctctgcggactcgataaacacaatattcacgccggccagcttcactgtatctgcgtcaatgtattccggattcttctccagcacatagctggcctggggattgatttccttcagccggaacgctccgttgcttacataggtgtccgccgacttggtccaggcctcctgcccttccaccgcatccttcttcaccggaaaataagcggtgacagctgtaaggtcgatgaaataagcggtggggttctccagggtgaccttcagcgtcttgtcgtcctcggccttgacgcccacatccccggcagatgcctttccctcattatatgcttcgccgttcttcagatagaacagataccatgcgccgggagatgccgtatcccgcgccagggtgcgcttccaggcatactcaaagtcgccggccgtcagaggggaaccgtctgaccatttcaggccgtccctcagtgtaaaggtgtattccagtccgtcctcactcatctcgtacttctcagcacatccattgataaggccgccgtccgggccaatctgcatcaggccggtaaacagattctgaagaacaatggatgatgtggcatagttgttcatggtagggtccagtgtctcaggctccttctgcatggcgtaggtcataacctttccgccctcgctgccggtgccgtcttccttccctcccgaagcctgagcggtccgctccgcagccccgctctcagccggtttttcagatttctgtccgccgcaccctgccagcatggaagcagccatcacaagactcagtaatacttttaaattctttctcattccactcctccttcttatgggcacccagcgggcgttctccggccgctaagcgcgatatatgccaccggcgcccagtcaaatgaattcctgaccgccggaaccgtcacatgcttctggccccatgcttctgctcatgttaatctggccccattcgcctaatcaaaaagatgacaggccaccttatgtttgtcattgaccgctttcaactccggctttgcctgggagcagatatcctttgcgtaacggcacctgcttctgaagggacagccgggagccggattaatgggcgagggcacatccccttccagaatgattcttttgttctccttagccagctttgggtccgccacaggcactgcggaaatcagggactgggtgtagggatggagcatattgtcatacagctcatccacccgggcgtactcaatcaggctgcccaggtacatgacgcctacctccgacgagatatggcgcaccatggacaggtcatgggaaatgaacagatacgtgaaatgaaatttatcctgcagttcctccagaatattgatgacctgggcctgtatggatacatccagagctgatatgggctcatcgcacacaatgaactccggctccgcggccaatgccctggctatgccgattctctgtctctgtccgcctgaaaactcatgaggataccggttaatatgatccggtttcaggccgaccatctcgattaactccctgacgcggtcattcttatccttccccgtgtgcagcttcatggcccatatgggctcggctataatgtcgcctatgttcttccttgggtccagggaggtgtaagggtcctggaatatcatctgcatcttcttcctgtagggaaccatctggctgtcgctcagtccggtgatgtccgttccctgatagagaatctgacccgcggttgcctggtacagcttaaggatggtgcggcccaccgtggtttttccgcagccagattcccccaccaatcccatggtacggcccttctcaatggaaaaagagactccgtccactgcctttagcacctttggcttggaaaaaagaccgcttttcagcataaaatgcatctttaaatcatttacttcgatacagctattggtatcagtacattgagccatcacagcttcacctcccccatccgggctttcaccgattcattgtgaagccagcaggcgctgatatgtccgttacccaggtcgcaaaagggcggctggcggaccgcgcaaagcttcatggcgcgggagcaccgggccgcaaagggacatccctttggcgggttcaaaaggtcaggcggcgtgccgaagattggcaccagcttctcctttgtcctctttggtatggaggccagaagtcctgccgtgtagggatggccggtccggtagaaaatatcctcgatattcccttcttccatgattaatcccccatacatgacaataaccctggtacacaggctggatataacgcccaggtcatgtgtaatcagtatgacggaggtattaaactcattcttcatatgggccatcagttccagaatctgggcctgtatggtcacatccaatgccgtggtaggctcgtctgctatgagaagctccggcttacagcacatggctatggctatcatcaccctttggcgcataccgcctgagagctcatggggatactgcttcagcctgcgctccgggctgggaagccctactgcttccagcatggccagggcctttgcctcggcttcctttctggaaagcttctgatggcgcatcagaggcccccgaatctgctcccctacagtgaacaggggattcagactggtcatggggtcctgaaatatcatgccaatcctgtttccctgaatcttcctcatttccttcggagacttcttaagcagatcctcaccgccaaagagcagtgcatccgcctgccgggaggcgttgtcctccagcagtcccatgattgacagcatggtcacactttttccgcagccggattcccccacgattcccaggctctctcccttccccacacggaaagtgatgccccttacggactgcacgctgcctgcgtctgtggtaaaactggtacgcaggttctctacctctaatattgtatcttccatcatgttcatccacctatttcttaagtcttgggtccagagcatcccgcagcccgtcaccgatgaagttcagggcaaatatggtgatgctgattgccagcgccggaaacagcatctgatacggatatgaaaacagatattctatggcgtcattggccagggttccccagctggccttcggcacctggatgccgatgcccagaaagcttaaaaatgcctcctggaatatggctgacggaatcaggaacgtgaccgtcacgatgatggaacccatgctgttgggtatcagatgatgaatcagtatctgccatttgctcagtccgctgaccttggctgccagggcaaagtcctgctctctcagggtcagtatctgggcccggaccatcctggccgtggtaatccagtaggtaaggcacatggcaatcaggatgctctgtatggtgtttcccagaaacatcataattaaaatcatataaatcaggctgggaatgccggtcaggatatccaccacacgcatcatgataatatccgcagttcctcccacatagcctgatatgccgccgtagagcacgcctataaccatgttgatggccgctgccgcaaatccgatggacaggctgatacgggccccgtacatggtcctgacgaaaatatcacgtcccattttgtctgttccgaacaagtgggcgctgttaggccactggagggcatttccaaaatccgtctggtcatatgtataaggagaaaacatgggtacaaatatagccgccaatgtcataatgaccacaatggcaatacccagcatggccagcttatccttcttaagccgtatccagcagttcctccagtaggagatgctggggcggttaatggattccatctcccgctctgtgtcggaaagtcccgccagaagttcctccggaatcacatccgacatggtaaattcaactctctcttccatcctcttcacctactccgttatctttactcttgggtcaatcacagcgtacatgatgtcaacaatcagattgcagccaataatcatcacgcctaagaacacggtaagtcccagtgtaacagaataatccctgtccgtgatggcggatatgaaatagcggcccagtcccgggatgctgaacagcttctcaatgatgaacgtaccggtgagcagcgcggccaccagcggacccacataggtcaccaccggaagaacagagtttttaagggcatacttgcctatgacctcccattccggcactcccttggagcgctctgtccgtatgtaatcctggcgcatggtctccagcatgctggatcgcatgagacgggtgatataggccacctgggagaatgccatgcagaacaccggcagcacataatgcttccacgaagtcagtccataggaggggaatatcttccacttttcgcagaatacatacatcatcagcacgcagaacacaaagctgggcaccgacacgccgatggttgccagcaccatggaagcgccgtccgccagctttccccgcttcacagcggccacgattcccagcggaattcccgccgcaagggccaccgcgattcccagcgcccccacctttgccgataccggaaagccgttggctataagctcattgaccgtggtgtcctgttttttaaaggaagtccccatgtccccgtgaagaaggttgccaagatacctgacatactgggccggaagcgggtcgttgagaccatatttttcggaaatctgctccaggattttttccggcacattcctttgctcagacggactgaaaggacctcccggaatgacatgcatcagaaagaatgtaatggtaataagaataaatagagataacatgcctgctaccaatcgcttgattatgtattttgccattgccataccacctttatcttagataagctgaaatcgggctgaaccgccctgtgtataaaaaaaaggcgacttaaagaacagtaagttcactgcgccttcgcccgacgtacttaattaaaaattatacctactgacaggttaaaagtcaataaaaagggctcagtttcacattgcattttctggcagaaatacctataattaaatttgcggctgccggattaccggaccggatgagatttttacccctgtttttagccgcgagatggaaagaaggtatgaatcacatggaaatccctgttctgaatgagataatgagagatacggtggtggaggtggatctggaccgcatcgccttcaatgtgaggcagattaaggccatggccggccccggcacccaggttgcggcagtggtgaaggcggacggctacggccacggcgccctgggtattgcgcctgccatcatggaaaacggagccagcctgctggcagtggctaccctctccgaggctgtggagctaaagcaggcctatccccgctaccccgtgttaattatggggctgacaccggaccggctgctgccctatgtgctggaatacggcatcatccagaccattgacaccctggcccaggcaaggctccttaaccgcctggcctcagaaaaaaggcagcaggctgtcatacatatcaaatacgacaccggctttcaccgcatcggattccctgactgcccggaaagcctggacgaaatccgccaaatctgcaccatgccctggctgaaaccggagggcatttactcccatctggccctgaaggacgacgagtccaaccaagtccagttccggtgtttcatggatgctgtcactgaactggagcgcgagggctgccatttcccatataaacacattgccgacagcattgccgccgttgattttcctgaatacaggctggacatgatacgggccggagccattgtatacgggttaaagggcttccacaagggacagcttgacattcgtcaggccctgacctttaagacccgcatcagccacatcaccccggtttttaaaggccagggggtaagctacgattacctgtggaccgcgccgcgggacaccagggtggctgccctgccctttggctacgcggacggctatccccggaacctgcgcggcaaagccatggtaaccctcaggggaaaacaggtcccggtgatcggaatcatatgcatggaccagtgcatgatagacctgaccgatgtgcctgatgcacagataggggaccaggttatcatatacggcgacggaacaggaaacacgctggacatagacgcggtcagccgtctggcaggcaccaataaaaacgaaatcgtgtcacggcttaccagacggcctccaagggtctatgtgggcggagaaaatgtaaggacagcagactattttccggaaaggatgacaccatgaatataaaacaacggacagaagaattatacccgcagctggtacagattcgcagggatctgcaccggcatcccgaaccgggttttaaggagcactggaccagcgcccatatccgcggccttctggatgaatggggcatttcctaccaattccctgtggccggtacgggaatcgtggccatgatccagggcgggaagcccggctccggcaatacggtggcactccgcgccgacatggatgccctgcctctgacagaggactcctcccgcccctgctgttccttaaatcccggccatatgcacgcctgcggccatgacgcccatgtggccattgccctgggtacggcccgcatattgatggaagcacggagcgaatggtccgggtgtgtaaagttcttcttccagcccgcggaggagaccacggggggagcccttcccatggtggaagcgggctgtatggaacatccccacgtggactacgtcaccggactccatgtgatgcccacccacgagacaggagaaattgaaatccgctacggcgatttaaatgcctcctcagatgagattcacataaaggtccatggaaagagctgccacggcgcctatcctgatacgggagtggatgccattgtcatggctgccgctgtcataaacagcctgcagaccctggtaagccgctgcatttctcccctggacaacgccgtcctcacgctggggaccatacacggcgggaccgccggcaacattgtggcaggcgaagcagagatgaccggcaccctgcgcaccacggaccctgacgtgagacggaaaatcattgacgccatgacacggcaggtaagctgtacctgccaggccatgggaggaagcggggaggttgtcattgtcccgggatatgccgccctcataaactcagacgaaatcgtggatgtgctggtggaggcagccacagatgtccttggcagcgaacacatacatccaaaaaaattcccaagcctgggagtggaggacttttcatttttccttgaaaaggcaaagggagtattctatcatctgggatgcgccaacaaagaaaaaggcattacatccccccttcacagccaggacttcgatatcgacgaagcctgtcttaagctgggggtggagctgcaggcggaactggctttaaggctgttaaagcggaatcttacttagaataaccagaatacaggaggaatgacattatgaaggtttatatcagtgtggactttgagggggtggccggctccacttcctggagttcaaccaacttaggtgatttggaacacgggcccatggccagggagatgaccctggaggcagccgcggcatgcaggggagccctggcagccggtgcaacagaaatttacataaaggatgcccatgaatccggcaggaacatggatatctcccttctgcccagggaggcaaaaatcatactgggctggaagtactccccggattccatggtctgcggtctggacgggagctttgacgcccttatgttcgtgggataccactctcctgccggtaccaacggcagccccctggcccacaccatgaaccgcaagaccaattacattaaattcaacggcaggctggcttcggaatttctcatgcacgcctatgtgggcgcatccctgggcgtaccatctgtattcatcagcggcgacaaaaatctttgcagccatgttcatgagtacgatccccgcatcactgcagtggcagtgaaggagggcatgggcgcggccaccgtcaacctggcgccggagatggcccaggagctcatcgaggaaggcgcaaagaatgcccttctcgcaaaggatacctgccatctggaggtacctgaaaccattgtcatggaaatcaacttcaaagaccatttccgggcgctgagggcttcctattatcccggaatggtgatgacagatgattttacggtctcctataccgcccgctccatcaatgaattgatgacagcccggatgtttgtgctgtaatcgggggattcgtgcatacactatactacttccggttcctggcaaacatgactgcgtactcaagagaattcttcagactcagctcgctggctgttcctgttcccgcctggtcaaaggccgttccatggtccacggatacacggatgacgggaagtcccagggtgatgtttacgccggccaccgcgtcccaggcctgcctctcctggttatatacaaatcccgccaccttaagggggatatgtccctggtcatgatacatggccaccacgatgtcataccagccgcctctggccttggagaacacggtatccgggggcacagggccctcggcctggattccctctgctctggcagcctcaatggcaggaatgatctcctggatttcctcctgcccgaacaggccgtgctccccgctgtgaggattcagcccggcaactgcaatcctggggttctcaatccccatctccctgcatgccctgtccccaatccggatcacatccagcacgcgctgcttcttaacccggtcgcaggcctcccgcagggacacatgggtggacacatggaccacccgcacgttctcatgggccagcatcatggtatagtttttggttccggtcaaatcagcataaatctccgtgtggccggaatagtggtgtcctgccagattcacagcctccttattgaaggcattggtgacagtggcatccacctgtccgtccatggcaagttcaattaccctcttcacataatggaacgcggcgtccccgcacatggcggacacctgcccccgcaccagttcatccatggaaaccagacccatgtccagtacgtctatggtaccgtgggtaaaaacagcatccctcacatcctttactgcccggacagtcatttcctcatgtcccacgattttcagcgcggcttccaggacacaggcatctcccacaacaatgggcctgcatgcttcgtatatggactggtcggccagggccttcacggtaatctcggggcctatgctggccgggtcacccatggtaatacctattatttttctatcttccacgcttacgcacctctattttatgcagataagaaactaatacgggacaaaggatagctgtcacaatgatagcagcggtaatctgtgcagtggcggcctccgccaccgccagaagtgtggcgtccacagctgctaccgacgccggcgtggcagccgcgttgccggctgtggttccaatggctccgcccacttccgggtggtccatgcgcagcagcttataaaccagatagcccgccagaccggtaatcagggtacaggcaacgcccagaaggattccggggcctcctgcctttaacaggttcatgatgttcagtcccgcccccagaggaaatgcgaagaagggaatcagcatggtggcgcccggttcacagaacttgcggatatcttcgtccaggttgcccagtatgcatcccacgatgacagggacaatacagcctatcaggatagacatgggtatcttggcaacaccggcggctcccagggcaaccatggtaaagaaggggccgtcattgatggaaagaatggaaacggcgcctacgtcggtcgcatctccgtactctccggccagggccgcgtacagtccgccgttggagttagccagagcgcctacaatagccagggtggaaagacccaggaaacccttctctccaaaaagagtaccgcagatcagtccgatgataatacccactccaacttttactgccgtgataagcatgcctttatataccgtaacgccggcctttttaaaattaatggtagtggcgttacagaaaataaaaacagccagaatgggcatggctcctgatttccacagatatgtagtgaatgtaccgtcaaaggcgctccacaaaacatttccgaaaaaggtgttgacaattgctcccagaagcagcggtactaccatcaatcctcccggaatcttcttaactgcctgtaaaatcttcatacttaatgttccccctgtccggcttttataagcctgataatattatctaccgtataagccaggttctcctggctgcggtgcctgctgacggaaaaatcctgaggaagcctgttaatggggaacaccgctgtcacgcccatatcgtaggcctttcctatctcgtcgtcatctgccccgcctaccaccgcaatcacggctttggcctgcttattagccctctttgcaattccaatcactaccttgccccgaaggctctgggaatccagctttccttcgcctgtaaggatatagtccgcgtcgcctatgatttcatcaaacttcaccgtatccagcacggtctgaatccccatctgaagcctggaaccaaagaatgcaatcatacctgctcccatggctccggctgccccggttcccggcacctggcttatatcggtgcccgttgcctgggcaatggccctgctcaaattcctgattccctcgtccagctgaaggaccatggcctcatccgctcccttttgggggccgaagataaaggaggctcccgcaggtccgtacatgggattatcaatatcgcacatggtaacgatttccacctgttccaggagactgtcccttcctgacaggtcgattctgtcgatatcggcagtggttccgccggtgggaatgaattccctgccgcccctgtcataaaacctgatacccgccgcggccgcggcgccgcagccgccgtcattggtggaggagccccccaggcccacaatgattttctttacccccttaccggccgccgcaagaatcagctgccccaccccataggtggtggtaagccttggatccttcctgtcctccaccaggggaagccctgcgcaggacgccatctcgatgacagctgtctgccctccgtctatcagcccgaaataggactccatgtcctcaaaatagggattcttaaccgtgacatattccttaacgccgcccactgccgtgataaaggcatccacggagccctctcccccgtctgcaacaggtatggagacggtccggctgtcgggaaaatgcttttttatcttctcatccatcactgcgcaaatctggctggaactcaacgtccccttaaatgaatcaggtattaatataaacttcaaatccgtatccccctcttatcctcttacgatgacagacacgccgtccggaatcactgttaccttataatcttccttatcaaccattgcctttgccttttccagggcctcctccatggtgtgggccggaatcatgtgaagctcctccaccagtttatcgtcgcaggaggacacaaacacaatcctggcctttaacatgaccctggcaaaaatctgtgactgccattggtctatgatggtttcctccggttttctgtccataaaggtcttcatcatgcggtttaagtccttttcgtcccggaaggtctcatggaaatacttgccgccgtggccgtccgctgccttggagagcatgatgatgactcccccctccttcaccgtcacctctgctgccgtcatgccctttacggactggtaaatattctggtccagaggatagcctccgtttgtggatattacgatatccgctggtacggcatccacctggcacttggaagccaggaattccctgcccacacggtgggccaggtcgcagtcccccgccactgcaaaaatggggtcatgggcggagtcaatcaccacattgacgataaagtccagtcccgccaccctggcggcgtacagcatgtcattgtgaatggggttgccctcaatgatgccggtcctggagtggggatcgccgataaaggccgagttatggttgtacataaccgtctcacggctggccacgcccggaagcacgctttttctaccgcctgaaaatccggcaaagaaatggggctcaataaatccttccgcaaccagcaggtctgcttccactgccagtttgttgatatacaggtttccgcctgaaggcagcttgcccagatagaccatattatccgtatcatcacagtcatggactatgatggtctcattttccgtaatctcagggccaaactttgactccagctcctcccttgtggtctccctgtgaagtcccgtggatataagaatggtaatctcagcatccggattccctctgcggatttccttcaggataagaggcatgataatgtggctgggcacaggccttgtgtggtcggaagaaatgaccacaaccttcttcttgtcaatggccatgtcgcatagcctgggagtcccgatgggatgctccagtgcctcctgcaccagccggcttccctccatgggggccttgtaatcatgaagttctgatacaagcacaccagccagatgctcctcctcaatttccgctttcagtgtttcctttccataaggcagtaaaaattctctcatgggttatattcctcctctttcttttatttttctcatggcaaaggccgccgcatcctctgtgccgaaagcccctgcctttgttaccagtttaagtccctcataggctccgcccttaaccctcaccagcggaacgccaaccaggatttcagccagtatctccgaaccgtcggccccgatgttcatgagcattcccagggccgtatcacctccggtaagatatactcccgacaccgctgccgagtccagcacctcttttgccatcctgcctatgagtgagcggacatagtctcccacctcggtcaggtccatcccgcttttctctcccacctcctgggacagctcaatcaattccctgtcataagccgtatccgtaagaaggatggtatcccttccgctctttagatatttcacagccatgtcgcggtaatcctcaggccgggctgttcccgtcataatccgggctacaggcaccttgaccattgcgtatccggccctttcgcagtaacgcatctgttcattggccaccgaactgatgctggccaccacgccaaaggacggaagggtgggcttctccagttccatcagattgtcggccattcccgcagttcccacataaagggtccgccgcccgtcctgtctggccgcggcaatgatccgtttcaagtcgtcatccgactcggcgtcacagacaaagatcctgcccctgtcaaaggaaaaggactggcttcttacgtccggcaggtattttaactgtaccggttcctcataaacctgctccagcagctttaccagattatcctccatcaccgggttcttggggtccttggataattctgttttacagatttccacgccgttcagacactgcactccgtccatggtggtccttcccagcgcgggaagagccggggcaaacaccaccagatccgggcggaaggcgtcatccactgcctttatttcctgggaaatgtttcctctcatggtggagtccactttctttattatgtagcaaaactgtccgaaatctacctgttccaatgaatgacgcacgatttcataggcgtggcctggcaaagcgttcctgctctccgtatcaatcacaatagacttttgtgaatccaccggttttccggcaaacaggacctccgtcggatatcctctcctctttagctgcactcccgtatcatttgcccctgtaaaatcatccgcgataatcagatatctatcttccattggttcccaacttcctttatcgttcatttttgaaacatatcagtttctttcaccagctccataatttattgtaatataggaagccttttcaattcaaggaaaatgctgtataatatgtttaaaattgtaacattcggaagatacgtattccagaggaggcagaatgggcgaaaaagtcaggatacttggaattgctccctataagggattggtaacattaatgaaacgatacggaagccagagggatgatatccagctgacagccatgcttggcaatgtggagacaggactttccctagcaaaggaacattacagaaactatgacatcatcatctcaagggccaacacagccagccgcattgcaaagggtgtacccattcctgtaattgatattggaattgattattacgacgtgctcctctgcctgaaaacagcagagaatacaaagaccaaattcgcggtcctgggattccgttccctgaccaccatcgccaaaagcatatgcaatgtacttaagatgcccacggatatattttccatcaacaccacgtccgaggccagctccctgctggacaaattaaaggagcagggctacaagaccgtcatatgtgatacggtgccctacaactatgcaaagctgattggcataacccctattcttctcacctccagcatggaaagcctgaaagccgccgttgaccaggcagtctatacgtggcagacccacagggatttataccactccctgtcccttatgcaccagcttttggacagcagcgccaaccgcttccttgtgctgtcccggacaggcgagtgcctctacaccacactggaggacgaaatagccgtccctatacaggcaaagcttcagaatgaactggagcagtgctgcgccggccggaagcgcgccttctttataacagtaaacaaccagatgtactccatcacctcccatctggtggatgagaccctgagtccctacatcatattccacatcatgcgctcagaaatccccctggcctactcaaaatacggggtgaccatcatggacaaacagtcggcggaggacagctttatggacagcttttacagcaatacggagctggcgcgggaaattctcaccaacaccgaggaggctgccccttcccccttaagtcttatgataaccggggaaatcggcacgggaaaggaccgggtggcccatatctattacgccaaaagtcctctgtgtgacaatcccctctacgtcatcaactgctcccttatcagtgataaaagctgggacttcatcacaaagcattacaactcaccctttacggacaatggaaataccatctatatttccaatctggacgcgctgcaaaaaacaaagcagaaacagctgctctccatcatactggacacaaacatgcatgtccgcaatcatttgatattctcctgcacccagcccgcgggaagcgccactccccatgtggtgtttgaatacaccaatgccctgggatgcatcctggttcccatcaagccgctgcgggaacaaaaggaggacatcatctcatccgccggtctctatatcaataccctgaaccaggagctgggccggcaggttgtgggggttgacgacgaggccgctgcgcttttagagcaatacgactatccctacaacagaacccagttcaagcggattctgaaagaagccgtcatacggacagaagggccctatatctgcgctcagaccatacaggaggtaatccggagggaagatgtcctgttttccggattcccccttccggcacgtacacccctgggtggctccggcaaagacacggctgctgatacgcagagcaatacgccgccggatccttatccggtttcattccatctggataccagccagtccctggacgggatgaaccgggatattgtgcgctatgtgctgaaaacctgcggcggcaaccagacatccgcggctaagaagctgggaatcagccggactacactgtggcggtatctgaaccggtagacagccgcaaaaggcggtgcaaaagcgatgcaaggccggtctgccgtacgccgtatattctttgaaccagggcaagacaaagggagccgtcaggcggctcccctcaaactgtagacaaacgcaactttgtgcatcaggtgctcgagggcagagcccccgaattggaatcacgcaggcggaattcacttccgccgtagtgtagaaatgccgatttccaggggctaaaagcccttgtgcgaggaaatcggcatttcatccttacaggattgaatttatctacttgtcagctcccacttcaatcacaggctctcccggaccggttatccattccgcgccgttttctgtcaccagcacctcgtcctccatccgaaaggacagatagatggattccactcccttttccaggtcatatggatagaccccgttttccacagcaaacaccatgcccggtttcagcttttcaccggcttcatcatgtatggtgggatactccaccacgttgaggccgatgcagtgtccgctggagtgaagcagaaatttcccgaatctggaatcccggatgtacccctcgcagatacggttgatatcggctatggaaactcccggcttcatggcctccttggcagccgccacgcagccgctggctgtttcagccatttcacgctcctcccgcggcacggttcccagatagaacaccctggtaaggtcggacgcatacccgtcaatgtggccgctgatatccaccaggacatactctcccttctgaaccacacggtctgtggcatatgtattaaatgtgcagtacttgtcaataccgctggtaacggtcagatatgatatcttatccactccgccctgtgccatcctcattgcaatgcccttagatatatccttctccgttgtctctccggccacaatggtctttcccgtatccaatatggctttttccgttatccggcacacatgccggattcgttcaatctcccatggtgtctttaccattctggctctctgtattgccagggaaccatctgtgaaacagatgcccggctgggaatcaatgattttctttaacagctccatggaccagaagtactgcatgccgtctcctgcctccaggccaatggtccttgtatccggctggatttcctttatgattctgtcaatgatgctgaccggttccccgccctccaggggccccaggtttctgctggctgttccccagcagtagatacggctggtccagctcgtatactgcaccgtggtcttttccagtattctcaggataatagccgggtcaccctctctgggtaccagcacatataccggcctgaaaaggctggaggtgtaccaggaacggtaaccggtggaataatagatattttcaggagtggagagcagcagcatgtctatatcctgcttttccatctcagcctgaagcttttcattgtggagccggaattcttccggcgaaaaagatttgtattcctgtgtcatatttcctcctaactattatgcaaagattcccaggagtccgcctgccaggccgactgccgcaaccaggatgatgatattgacagacgcccccataccgcccagaatcaccttctctatttcaatcccctctttgagaagcgactctatgatttccggaacctttacaagaaccagaaaattctccccccttaccggctcctccttcaggaattcccgggcttcggaaaccgactgtatcagcacctccacccccatgggagccgcggccttgtagatgcgctccatcagccggttctgggagagctcgtcatcaataatcagtatcttattgattggatactgtttaatccaggcagtcaccacctgtccgtgaatcagcctgtcgtcaatcctggtcaaaacaatgtttttcatatgcttttgctcctttcctatatggcagcccgcgggtatcagctcatctgcagcagaacatggctgtctacaatcccttccctggcaatgtccgccagtcctccgaaacttcctctgcttccatccatcagacggcggttgatggcttctatcagcagagggaggttggtacccgtgatatgagtaaaggaacattcctcctccagctgaatcatggtgttaaacggcgttccgtacatcaggtctgtaagcaccaggacttcctggcccgaatcattggagcgccggatggattgctccactccgtttttcatctcctccagattgcatcccggctccacacagtaggtctctatatcaggctggctgcccaggatgagccgcgatgtccttaccaggctttcggccagtgaaccgtgtgtgaaaacaatgattttatacatattatctcccctccgtaatgatattctgtatgaattccgtcatggcccaatccggacaattatccatgagatagaccattttcgacgcaaaaagcataaaatcccaattggacatatccataatcaccttatccagcttcttcctgcataaatccgtcacaaactcacaccggttaatgcccgcctcattatggatatagacaaactccacctcctttaacgcagtgacctttaacagccctgttaccggaatctccgttggcttccggttcctcacctctatggtgcatccgatatcgtacaggtcattcctggttctgatcagctcccgcaaatacaaatcctccctgtgacggcatgacttcagcagattgttgacaaccgtgcagtccttctcatccagcagcggcgaaaccagcgcataaggtatcacatgttccccgctccccaggggcaccgtggacaaaatcaaatcatactgtttctgggacatgttaagaaaccggttgtaatcacagctcagcacagaccactgcggataattctgggacagcttatgcttcagtatattggttatgctgttggacatgttggaaaccagaatcacattcattttctcctcgtcggccagcagctcgccctgtatgtacagcatcagataacaaatctcatcaaagcttatctccggcagcctgaacttttccgtcagtatcctgcatataatctggcatacattgatggtacccttataattatccagcagtatatctatgataggattcctggccggggtactggacgctgcccggttcagcatcagcgtgatatgggataccacattcacataaaatgttgattttgttctgagattgattcctgtaatcacggaaaatgcgtcgataaaatcttcaccaaaggccacggccgttttcctggactcttcctccggcagctccttctggagcaggaaatttcccaaatgggtggcggccagaatattatagatatgtgaggtctcagacaccgacagcgtataccggtaagagccgctcaggcgggaggccagttcaaacgccatggcgttcaggggatctccgtcctgtttccggtaattgctttttaagatcggctccatgaaaaatccatttctcaccctgtaaatcatcaccagcaaattcacggaaaattccatgtactccagctcatcaaacctgtatccggcggacgtctcaatgtgttttatgagtccttccacgaaattcaggtcttcctccgtaaagatgtccagaatcgtcatcagcgtatccgactcaaacatacctgccgcggccggacctccgccggcattgacatttatattattgtccaggatgtacagcagcagttccgccagggccttccgaagacagctctctgttccctccaccgatgttcccccatgtccctgggcgattctcaattcatgctttccggcaaaaggcaccagggctttcaagtccccggctatgctgctcttgctcacataatatttgtaggcaagtcctgacagcgaggtggtctcatccgaatagagcagaaggttcagggcgatatccattcttctggacaattgattccaggacccggataatgcgccggaatccataagctccatcataaaggctgaattcatcagccttcccctctcctcctcattgacttcaagcttgattccggttccgggccggctctcgacggctccgttataggacatcagaatctcattgactccgggaatcattctgcgcagcgtcttgtccgatacatccattttccccgcgtagaagctcacgggcagatactcttcgtgttccagtaaaagtctcaagaatgcaatctgtcttgaattcacgtcttatcctctccatacctcccaggtgccttctgataacttgattataacaagagctcctgaggattgttagctttgcggtttccttaatttgaccggaaccatgtggacaaaactgtacgcgcatctgtacataaagctgcatctgtacgtcctggcccggtgaatatctgtctattgtaccatgacagcctttgtaatataaggtgggggaataagccttgaacctgggcgggatggggggcgggatgggggggggggggggggggatgggcggacgggatgggcggacggccggaaacggcatcagaatagggtataaatggaatcttgcaaaatggaaagcgtgaaaagggaaacacaaaaaggatatcccaaaaaggaaagcgcaaaaaaggaagccccaatgcaaaaggcttccctgacaaaaaaagagagcaggtgatgggaatcgaacccacgtatctagcttggaaggctagtgttctaccattgaactacacctgcatatgacttaatctatttaattataatcggggtgacaggatttgaacctgcgacctcctggtcccaaaccaggcgctctagccaagctgagccacaccccggcgctggcataatataacctgtcatccaatcccgtctctcgacgcaaggattattatatactatgccttcacaaatgtcaacaaaaatcctacagaaaattcagcgaaaaatgagcctctccctctttgtcaatctccatgagcatgaaagagggcttatgtccgtcctggcggggataggacaggcttcccggattcagcacaatcaaatccttatctccttcctttttctccatctcgtagaagggcctgtgggtatgcccgaacatgacaatgtcaaagcctctggctctggcctcctgtttcagatactcagcccccacagagacattatagtagtgtccgtgggtcagaagggtcttataccttccaatcatcagttccttctctttatccagacatgaaaaaaagtcattgtttcccaaaataatctctaaatcgcagtcttcattgacccaggtggcaatggcatgttcactcccctctgcgtctcccaaatgaatcagcatatccagcggtccggtgcgccggatcacctcttttagattctcatcccttctatgggtgtcactgacaattaatatcctcatccttcgtcctctccatctcttacttaagcacaccttccagggcctccttcatagcccttaacgccttccccctgtggctgatttcattcttctgctccatggtaatttcagcggatgtcttgccgaactgaggcagatagagaatgggatcatacccaaaaccgccatttccggccggttccacggcgataagcccctccatcacagcctctgtgtggagtacccggccgtccggcagcatggctgcgatgctgcacacaaacctggcgccgcgctcctgtcccctggcctccttaagacgctctatgatactccggttcttaacctcatagggcgtatcctcgcccaagtaccgggcagagtagatacccggctccccgccaatataatccacctccaggccggagtcatccgccagtacaatatcccctgtcagattccacacagcccttgccttaatctcggcattctccccaaaggtggtgccgtcctccacgatttccggttcagcgcccgcttccttcatggaaagtatgggcagccccaaatcagccagtataaggcgtatctcccgcatctttccctcattgcccgttgcaaatatgattctgtgtcccatatccaaagccctctgccttctgttccttttataattctctgttatttctttgtatatgccttcaggcacaggttgcaggactgtgtttcctccacatgttcccacacctttccgtcatgactcagatacccttcgccgtctgttaagtccacctgggcaataccgtcccctgcgttgtattcaatggccaccggatgtacggtaccgggcgttattattttaattattatagcaaatttttcgttgtcctccaaggggatttttttatccagcacaattgtgtaataaccggcattgtccagtctgccctttgccagcaaaatcctcttatccagggcgcggtccatttccccggctcccgcgtccggcaggttccgggccgcatacaactcgtactctgtattcttgtccgttgcatagaaacctgcggcagccagattctctcccttaccggccctgtaggcattggcaaaccaagcctcgtcctgcccgtagccaatctgtcccacccatccgcacagatcgctctggtggatgtagtcgtaattgtccaccggctccacacctgtgtatacaatattatggacaccgatattgctgtcaaaataggatacataaaaatatccctggtccccaaaatcctctccccagctgttggtacagataaacgcgccgtcccctgccaggtccaggttgaaattctccctggaataattatcatcccatccaacgataacagaatcatgattaggcttttcgtttccgatgtaacaataggagttggtctccctgttatagtaaacggactggctccgataatccctcatggatgtatacagggagctctgtacgccccccctcaggtacacggcccgtttaatggcctcgtaatccttggagggaagaacctgaatctcctgtacatgcacgctgggcgtaaggccgtccggcgaaactccgtctccgtatgggtcctgggattccggcaccggtccctgccaggccagcagataggccatggacatggtatattctccgccctcgtcctgtcccaggagaaaactgttgtgcatggacatatggtccaccgcaaaggtcatgggctttcccggaagcagggaggactccagggcagtcagagacgcaaaggcccagcaggttcccagggatccctggtttccaatctggggcgccctgcccgtctttcggtagtcataggcagaaggaagctttacattggccatgtcccgcctgttccactggtacacgctgtctgcgccggatgtttcagagacagacggatttctatttccgccggtatcgcccatgcggttttctgcggcatcctctccgttccccggcgtacccgcgccgcctgctgccgcaggactttcttccccgccaggattccgggttccgtcagggttccggctgctgtcagggtcctgaatgccgtttgtattctgtgccccgcctgggttttgtgtctcagcaggattccgcgtcggggcgcatccggccgtacccaaagacaatgtaaccgccagaaacaggaccgctgcttttttccttattccattttttattatatctgatacaacaaccatggccgtcctctcaatttcaaccgttctcccggagctccatccactcagaaactgtactgccagcgctgaatattttgtcattctgcaaggcgggggaaggaagcggagtgggcctccgctgactgacgacaacgcggcagatggcaaaataggcagtgctggaagtgctgtttccggctggatggagcactagctgtgcctgggcggtcttggccccatgaactgatagaaataggttttcagcataccgttgtatatcttcctgtttttgtctgccttccgtccaatgtacttctgcgcatcttcataggaagtaatgaggtacatggaccaggaatccagagccgcaaagcgctcccctatctcccggtataacgcgggaaggttttccttttcctcaattctctcaccgtaagggggattagatatgatgaagccgtatttcttgggatggctcatcgcgctgaccgggcgccgctgaaagtgaatcatatggtccactccggctgactgggcattggacctggctgctttcacaatatcaccgtccacgtcgtatccctggatatccacctgaacatcctcttccaccaggtcacccgcctcatccatggcttcataccagcatttgcgcttgatcacgttcctccactcctctgccaggaaggaacggttcatgcccggcgccatattggcggccatcatggctgcctcaatgggaaatgtaccgcttccgcagaagggatccaccagaattctgtcccggttccagggcgtcaaaagaatcagggcagccgcaagagtctctgtgatgggcgctttgctggtcagtgtcctgtacccgcgtttatgcagggactccccgctggtgtcaattcccaccgtcaccatatctttatagaggaacaccctcagcggatagctggccccattttcagggaaccaggtgactccataacggtttttcagccgctccaccatggccttcttcattatagactggatatccgacgggctgaacagcttgctcttgatggaagaagcctttgtcacccaaaacttcccgtcttccggtataaaatcctcccagggtatatttctggtgccctgaaacaactcctcaaaggtctccgctttaaagcttcccgccttgagaagcactctctctgctgtgcgcagaaacacattggcgcggcaaatggcctcatcatctcctataaacgtgacgcggccgtcctccaccagggatatctcatatcccaggtccaaaatttcttttttaagtactgcctccagcccaaaatggcagggggcaattaattcaaatgttttcaatcaattttcctctcaatcagcctctcttttttacagcttcagttccttgaccacttcaccctccagggtccgtatggagaacaccccatcctccagcatggcataggtattgggattgtctccctttgggatggacacagaacctgggtttaacacggtaatgtgcctgcccccttccgcctcaatggtctcggccttcagtatatgggtatgaccgtggaccaggatgtctccgtcctgcaatggcggaaggtggtcctggttgtatacatgcccgtgagtggcataaaaagccttctcctccaataccaacagactatagtcagccagtatgggaaactccaggaccatctggtccacttcggtgtcgcagtttcccctgattgcatatatctggttcttaaggggattcagcatggcaatcacttccttgggggcatattcccttggaaggtcattgcggggaccgtgatacaggatgtctcccagaatcacaagccgtccggctcccgattcactgtatatatccagcatcctcctgcaataatatgcagaaccgtgtatatcagatgcaaacattatcttcatgggtctgtctcctctaaaatagaataatcacgtttctattctaaagccgaaagcggcctcctgtcaatgtatttccccctgtaattcaacattccgcccgccaggtccacggcatgataccccatcctccacaagtcccggcagaccaccatgcttttggcccctctgtcacagtaaaatacaatggtcccgtccttgcggatttcccccatcaggtcctcaagctcatcatagggaatgttcacgctcccccatatcctgtcctgttcaaacatccagggttccctcaggtccaccagctgcgcaatctttccctgttccatccattggtcaaactgtctgtatgatatcattggaaatgtcgtcatttcccactcaccttccctttctgtcacgttctgtcctggccaaagcctgtcatatgtgtcctactaccaatatatgcaggcatttcaacagggtgaggacaagaaaaagcccactccgcgtcatgcgaagcaggctccttccatcaactgtactcagtgcgctgcagccttttcgataatattagaagttgttgttctggctgctgttgcggctgctgttctgagaactgtttctggagctgttctgagagctgttctgagaattgttctgggaattgttctgggaattgttctgagaactgttcctggagctgttctgagagttgttctggctgttattctgctggctgtagtttcttgagttgttttccatgtcgttgttgaagttattcctattagacatcttcaatacctcctaaaaacattcttatttagttacagccttagtatggcagtattgcattacttttatacgataaaataaaaaaggttgcttttttccataaaatcccgttttccgcaaaatgaataaaagccctaaagtaccagtgtttatgctgggttcagggcttgctcttatttcgccttctttaattcagccttgcctgctgaatcatcgaaatcaccaattcctggcccgcctcccactcttccgtgcagtgtatgataaaaccgtgattggattgagtgaagcatttaagtgttactttatttcccatggccgccacgcgcactgcataatcgaaatcctcaaagcggaaattatcataacccgccgccaccactaaagtctccgggaggcctttcagcatctcatcatccgccaggaggggactgcagtacggattcttcgctttctcaagctccccatcggtgtatgcctcggtgaacattcgtccgcgctccaccgggatcatgttcgtttttgcttcctttttgtctgcgggatccgtagccatatcaaaagcgccgtaatccagcacctgcaggcacagagcgaaatccccagtctgctttgctttcagaaccgctgccgcagtcaggttcgcgcccgcgctgtgtcctcccatggaaacccgtttttcatccgcatcccattcgcccagcttggaaaatgtccagcggcatacctcatacgtctcgtcaaaagccgtgggaaacggatattccggtgcaagtttgtaatccacatccaccacaatcccccggatcgcgtccgccaccttggcagaatatatctcatcacgctccacatggggacggacgaagcccccgccatggacattgatatgtaccgggcagttggccgtccggttcttcgccgtaaaaatatagcaggtgacctcatcattttcccccaccggaattaccacagtctctttgtccgctagttccagattctttcggtactccggggtaatattttcctttgcaacgctggttcctcgcaaatgctctgccagctgctcttttctttctttacttaatgccattcgcttctcctccttcgcctgcctgcttttgcaaaccggttgtccactttctcttgttcctaatgaactgtccatcaattacttgtgcatttcgcgtaagattctgttggcaagcacctaatccaggcaaatcacagcattcggtaaatgacgatatccacgccgccaactccatccttcacgctcccggacagagcgcccacgtacgcaccgtaattcagccactcatacctgcccgccggggcaaaaaacctgggcgttgttacaatataaggctgcccgccccgtttatcacgcttcccggaattctgtatctcgataaacacaccatcatctgtctggagcagatacctcgcgtaaacctccacgctggtaaaatgctctggggcatcaccgccgaatcccgtattccagtctgcgccgcccataggaaatactgtcccgttaatgcgtgcgccgtggaactcgccacctgtaatatagattgcccgcagaaggccgaaatcatttttccccaccggaatcctcatatcgtccggacaatttgcgcggatggtcatcaccttctccgctttcagctcggtcaattccattttttcttccataccgaaaaatcctcccttcccttatcctgtatatacagagcttatgctgttctctttttctgcagcagcggctttatgtacgggctgaccacgcagaacacggccaccagcaaaaagagcagggataccggacgggtgataaagctgctgtaatcacccttggaatagctgactcccttgcggaaatattcctccagcttgccgcccagaataaaggacagaatcagcgggctggcaggaatcttgaacacatccagcatcacccccagagccgcaaaggccagcacacagagcacgttaaaggtagtattggtgctggtaaacgcgccgataaagcacatcaccagaatcacgccataaagataatgatacggaagcttcagcagcatggggaaccacctcatgccgaaaaactgctccaccaaaacaaaaaccgcagacaccataacagccgcaaaaatcagatacacgatctgcggattggaagaaatcagcagagggccaggctgcaggccatgaatcattacaaacttatgatggggtgtgtgatgaatacaaaagcctgcgaatacattgtggcgattgcagaaaaaaagaacctgtctgcggcagcggccagcctagggatctcccagcccacattatcttcctttttaagcaatacggaacggaatttaaaacagacacttttcacccggcaaaaaaaagaatttgtcccgaccccggctggacagatctatctggaagcctgtcgggaaataatccaggtaaagaaccggacctatcagtccatgctttctttaagcagccagtacacagaccgttttacggtcggcgttaccccgcaccgggggagcactgtattcagcaaggccttcgcccaattctatcgccgctatccgaatatttatattgatataaaagaaggctacctggtttctcttctgcaggccctggacaaccacgagacagaccttgtactaggatccgtcacgaaagaggatatgattacttacaatgtcatgcagaacagcattgacgagctttatctctgtgtccccgatttccaccctctggcttccttagcaagcccgcccacggcacccaaggcccagatcaatgtggaacgttttcaggatacgccttttgtcatgtgggggccggacaccactaaccggaaggttgtcctgggccgactgtcggaagtcggcatgaaacctaccattgtatacgaaagcaataacgttcttctgatcgaccagatgatccagggtggagtaggggtggggtttttgccggatgcttactgcaggccgaaccagcaccgcgtgtatttttcattaaatccgcccctgacctgcgccatcggaacgatttaccgaaaaaatgagcggctcacccggccccagcgctatttcgcttacctgatcgcaaaagcgcagatgttttccgtcaacccatggggagtggactttaatgagcttactatggagctggtaaaagaattcgaagaggaagatggatggacaccagacaattagaatacatacttaccattgcagaagaaaaaaacttatcccgggcggcggaccgactgttcctcacccagtccgccctcagtcagcagctctccaagctggaggccgagggactgccgccgctctttacccggcacaagggagagatgcagctcactgatgccgggaaaatctatatcaacggagcccgctccattttgaaaatcaagggggatgcgcaagaagccttaaaggatctgagccaagcaaaaatccaccacatccacatcggtgtctgcaggctgtttcagcctttatactatgagcggatcctgccttggctgaaacgttcttacccggatgtggaagtcaccgcagtcaccccgaagctagggcaagtccgcaacctgctggaaaacaacgaaatcgacttggccctgttcgcctcccggcaacgaaacaaatttttaaaatacatccccttgcaggaggatgagctggtcactgccttcctccccgccctggaaggcgctcccctccctctggctctcccggcaccggacacccatctgcgtcagctggccgacgaagcctgcgggaacgcccagcagctgatgcccatctacgccgaaccggaggacctgcgttccgccattgctttagccaaaatgggggaatgcgccgccctgatcccaaaaagcctggtgcgcggaacaggcctggcctgctccagcttaaatccgcccttccattaccagaatactattgtgatccggcggggaactcctctgcccattatccgggatatctgtgattggatccagcgttatgggttccgggatggatgccaggcgtgaggggacagccttcatatggcgggcattgaccaccatagcattcaggtctgaggattcaaggatgttatacagaggcttccaataagaaaggggcggctttctgtataatgtcgtttagttagacaatcccgcccaagctttgcaaggctgcgctactcttttacaagtaaggcctgaacattctgtaaaacaaaagggaattgatgtaggcggttaaaccaaatccaaaaaagaaccagcaataggcataaagtggcaaaagttttaagtctaaataagtcataatcatagggagcgttgaaattgtcacaatcgctaaagtagatggaatgtgcataaaggcgaaagcaaacgcatttttgacaagctgtctggtagtgttagaaaatactgcaatcacagggaatatgtaaagcgccagaatgagcagtagtacagccactccaaatgatgcgcagagtaggagttgtcctgtgatggatggggaggaccacaaaaatccaatgttcgtgattaagataaaggctgcggcaatcatgctaagccagacaatcaaagactgcacaaagttttccttcaaggcgtggaagaaggtgcggattgttccatagtcatttcccttgattgaacggagcatacaatgatacagtgcagtaagggagggaccgatagtaatgatgggaatacagcacagaaggaagagcagattcgcaattacaatatcgccgattttatttaaaaagatatggactacgttgttttcattcaatagattcatataggtttcctcgactttctcgtttttatgagcatcaattctattaggtattctaacatcgatttgtacagattgcaaaaggttttgttctgaacgaagaaaagcaaaagaaatatagaaaaatgttggggtgattttgaaaaattatcttgtaattcaaaaaaaagggtattgtaattggtaaaatgctgaaaaattaaaaagaatgttatggaaacaagaaaaaatacataaaaataacatttttccatataatgcagacaaatctccatttaacattattccatgtgaaattataataaaaaacaacatatgaaacagatgctaaatcaagtaatctgacaaaaaaataagggaggaaaaatatgaaatttaagaaggcgttggctatggtgttggcaggggctatggcactttcactggcagcatgcggaggaaaccgaaacagtgaaagtacagatgacaacaaggaaaaatcagacagcggagaactctctgtttctatctgggattcttatcaggagcctggaatcaaagagattctcgcagatttcacagaagagacaggaattaaaacaaagcttactgtggtaaaatgggacgagtattggaccatgctggaagcaggtgcacagggcggctctcttccagatgtattttggatgcactcgaacgaaagtgaaagatacatgtctaacggtatgcttctagacttaacagataaaattgcggaaagtgataccattgatcctgaaaattatccagaggatatttggggattgtacacatataaagataaatattacgcagtgccaaaggacgtggatacaatcgctctgtggtacaataagacgatgtttgatgaagcagggcttgcatatcctactgcagactggacatgggacgatgtgacagaagcggcaaagaagctgacaaaagaagatggaagtcagtatgggcttgcaatgagaaatgacaccaatcaggctggttattacaatatggttttcgataacggcgggtatatcattaatgatgacaggacaaaatcaggctgggatgatccgaagacaattgaagcaatggaaacattagaaggttggattcaggatggtgtgatgccttctctggagacgatgtctgaaaacagtgaggatgttttgttccagtcgggtaaagttgcgatggtatgccaaggttcctggatgcttccagcctataagtctaatgagtacacggctgagaactgtgatgttgtagaacttccgaaaaatgcaacaacaggaagaagagcttccgtatacaatgggcttggatgggctgcatcagccaacggcaaaaatacggaaaatgcatggaagttaattgaatatttgggttccaaagaggcacaggaaaaacaggcagaacttggtgttacgatgtccgcatacaagggaacatctgacgcatggaaaaattcagcagacttcaatttacaggcttatttgaacatgatggatgatatggaaatcaggccatattcaagatctaccgtaacttgggagaatgaggacagtgagttgttaaagagtgtttacacaggccaaaagagtatggcagatgtgtgcaaagagatggcagatcagatgaacaataagctagaggaagaagcacaataaaaattaaaacgtttcaatttgtcaggcagattcttttgaatctgcctgtattaaaggaagtagtggtttgcatggataaaaagagaaaacttatgggatcaagcagagagcgcagtgaatttctatggggctggctgtttattttgccaacgatggtagggttgattattttgaatctcattcctatttttcagacaatttaccaaagtttcttcaaaacaggggactttggaagaggaaatatttttgttggattggataattatgtgaaggtattcggagataaagaagtatggcaggctctgattaatacattaaaatatgcgattgtggaagttccgttttccattgctatcgcactggttctggcagttcttctgaacagaaagatgagaggacgttctgtatatagaaccatcatattccttccgatggttgcggctccggcagcagtggctatggtatggcgatggttattcaactcagattttggattgattaataatctgttccatattcatgtaaaatggatttctgatccgaggatcgcggtattttcgattgcagtgattggtgtctggtcaatacttggatacaacatggtactatttctttccgggctgcaggagattccccatgattattatgaggcggcagaaattgacggggcaacaggagtgaaaagctttttttacatcacaattcctttattgtccccgacaattttctttgtgctggtaacccgcgtaattagttcccttcaggtattcgacttgatttacatggtaatagataagacgaatccggcacttgaaaagacacagtcactggtatatttattctataaatacgcattcattaataagaatatgggatatggcgcaacgattgttgttctccttcttgttcttacgatgattcttaccgtattccagatgattggacagaaaaaatgggtattctataattagggggggcagaatggctagtatggaaacaaaaagaaaaatatctacaattgtaatacacattgcattggttcttatatcgattacgatgatggtcccctttttatggatgatactgacatcttttaaatcggtcacagaagccaccgcaattaatccttttgtaatttttccaaagttatggagaacagaggcgttcgcagcagttttgaataatatgaacttcctgatgctgtataaaaacacatttctgttaatcctcttccgtgttttatgtgcggttttgacggcaacgatggcagggtatgcatttgcaaggcttcactttaaaggaaggaacttttgtttctcattggtattgtttcagatgatggttccagtgcaaattttcattattccgcagtatctgatgattagtaaaatggggatgctgaataccatttttgcattggtattcccaggtatggtaacagcatttggaacgttccttttgcgtcagggatatatggggttgccaaatgatctggaagaagcggctagactggatggatgtaacatcggtcaaacctttctttatatcatggcaccgctgacgagatctggcatggtggcacttggaatttttacagcagtttttgcattcaaagacctgatgtggccgatgattgttaatacagacaaagacatgttagttctttcctctgcactggcaaagatgcagggacagtatgtagcgaagttcccggaactgatggcagcgtctttgattgcatgtgtaccgatgattatcatttatgtgattttccagaaacaatttattgaaggaattgctaccagcggtggtaaattataaccgtagacatttttggctggcgtaacagtgattacgtcagcctttttttaaacaaggagagaattatggcgataaagtatcatgaaaaaacaaaaacatttcacattttcaacaaagaagtgagttatattatccatattatggagaatggtcaactggagaacctgtactatggaaaggcggttcgggataaagaagattttacttatcttcacgaagaatgtatacgttcgcatatgtcgatttgcataccggaaccgggaacgctgtctatgcattacacaaagcaggaatatccggtatatgggacaggggattacagaagtcccgcattgtcggtaagacaagaaaatggaagcagaattgtaaatttcacctatcggtcacatgaaatctatggtggcaaaaaaaaccttacaccgttaccggctgtttatactgaaaacgacgaggaggcacagacattagagattctgcttcatgattctcttatggataccgatctggtgctttcttatacagtatttgcagagatgcccgttcttacaagaaatagcaggattgttcagaaaggaaatcagaaaatcgtactggaacgtgcgatgagtgcaagtgtagaatttccggatatggactatgaaatggtgcatctttccggcgcttgggccagagagcgttatgtgaaaaacaggaagttggaaatgggaattcaggcggtacagagtctgaccgggacatgtagtagtgcagagcacaatccgttccttgcgctgaagcggcctcacacaacagaagagcagggagatgtatatgggttcagtcttgtttacagtggaaattttctggcgcaaacagaggtttcaacttttgatataaccagagttatgatgggaattcatccagaaggattccactgggaattgagcgcaggggaagagtttcagacaccggaagttgttatggtctacagcagtcagggattaaacaagatgagccagacgtatcacaaattgtaccggaaacggttgatgcgagggatgtggagagatcaggcgcgaccgattcttctaaataactgggaagctacctattttgatttcaatgaagagaaaatactaaatattgcggcaaaggcaaaagaagcaggggtagagctttttgttttggatgatggatggtttggtacccgaaatgatgattacagagggttaggtgactggtatgtgaatctggaaaaactgccggatggtatctcaggactctctcacaaagtggaagaaatggggttaaaatttggtctttgggtagagcttgagatggtaaataaagacagtgacttgtatcgggcacatcctgattggatcataggggttccggagcggtttgaatcgcattccagacatcagcatgtattagatttctccagaaaggaggtagtggattacatttacgcgatggtttccaaaatcatccgggagtcttcaatctcttacatcaaatgggatatgaatcggtatatgacagaaccgtatagcagaggattggatgcttcttcgcaaggggaagtcatgcataaatatatccttggagtgtatgatttatatacaaggcttacaacagaatttccggaaattctctttgaatcctgcgcaagtggaggtgcaagatttgacccggcgatgttgtactttgctccacagacatggacaagtgatgacacagatggcaatgaaagaacaaaaattcagtatggaacttcctatgtatatccaattgtaagtatggggacccatgtatccgcagtgccgaatcatcagcttaacagagttactccgctttcaacaagagcaaatgttgcatattttggcacattcgggtatgaattggatctcaatttgttaagtgatagagagatggagatggtcaaagaacagattgaattcatgaaggagaacagagaattgattcaaatggatggcgatttctacagattacgcagcccgtttgagggaaatgatacagcatggatggtagtttcacaggacaaaaaacaagcgattgccggattttatcaaaagttgaataaagtaaatgcgtcttggctgcgtttaaagcttcaagggttggacaaagaaagactctatgatgtacaatgtgaagaaaccatatatcaggcgtatggtgatgaactcatgtatgtcggaatacctttggacagagagcgtttaaataaaaaaggaggagatttcgcgtcgttgatttatgtactcaaggaggctgaaaaataacttctgtttgtgtaaaggagaagatgcattgaatcatacaatagaatttacgaattcagcaacatataaatgtctcggggatatgcaggaaggttcacttgaactgtgcctgacgtactgcgggtgggaatcttgtaacccagcccacaggttcggtccgaatcaaagagcgtccagtgtattgcacgtgattcagaagggaaagggtaccctggaaatcaataaaaaggtataccaattgaaagctggcgatgcattcttcttgcctcccggagtggaagcgtggtatgaagcggattgggaagaaccatggtgttatatgtgggtcggatttatcggaattaatgcggaggaatatgtcagtagtgcaggttttagcctgaaaaatccggttcgtaagattaactgtgtagagaaggtgtggacgtacatcagtcagatgctggaagcccaccaattgacctatgccaatgaattaaggcgaaatgctttccttcgacttgttctcgcagaattgatcggtgattatcagcaaacggcaaggggagccaatacggttcatcattattctggtgcgctgtatgcacaacatgcgatggagtatatcacctatcactataatgaacgcctaaaaatcaatgaactggcagattatattggtgtaaacagaagttaccttgcaagtagcttcaagaagacgtttggatgttccccacaggaattcctggtgaatctgcgaatggaaaaagcaaaggtgcttttaaaaaaacaagatatatccatcagcgcagtagcaaatgcggtaggctatacggatcagcttgcgttttccaaagtattcaagcagcattttggaatgagtccgagcacgtacaaggatgaaaaaaactgtttggtagttaaaacaaaaaaagaggagcacaagaatttttagcggtatgttagtggatacaactctgtgcagtctgataccgagattttatgaagtgtctgcaggggcggtctgtctggatggagtggacattcgtcatatcaaattaatttaccgttgctgatgaaaaaggttgcttttttccataaaatatattataaataatatgaggtaaaatggtttcccttaaaccatgacctcatccttattaattatttatactccccttgagaagtccccggatagctcccctatccggagacttctctttgctgttacttccttttaattctccttgacttcagccgcaaaacgcgggtaaacggtccctttttatgtcctttaatccagacccgccggacagcacaagggcccgccggattactccggcaggccctgcttatttatattgaaaatcctatcctagcacattcactatcttcaccggattcctgtaatcccagttggacactgtaatgcctgtcctctctgttgaagcatgaacaatctgtccgttgccaatatacatggctacgtggttgatacttcttccgcttccgtaaaaaatcaaatctccgggccgcatctggtcagcgctgatggcaattccctgctgggcttgtccgccggaagagcggttcatggatatgcctgctgaattctgcagcacgtatctggtaaatccggaacagtccgtccctgtacgcgggtcgctgccgccgtacttgtatcttccgcctacaaactgcatggcgtaattcaccacctgctggcgcttatatgtatctgaagactcaacggcatcctgctgtacctctgccatctcattttctcctacctgctccacggtagcattaccggatacaggcaaaaatccttcggagtcattgacccgaaccttcatccatccgtttcccatatcctccagaacttcatatacattccctgtcttggctgtcatcagtacttcttcactgtcctggcttttgttaatgttgacgctctccgctgtaatagtggcaacgtatgtacctgctgtgaatccaggaccgattgcagccagggaagtaaatggattcatgaccatcagcatcccgcatacagctcctgcctttaaaaggctgcctaacatttttctcattgaagaaactctcccatcgtggttttatactgaatgtagccggagatttatttattacataattgttacattcattacgaatgtattatatcacaattttgtgctacgtcaacaattttagacatatttaatacttccttcattatttttaacattttatgtagtaattttgaattaaaatgaaatcctgcccttaaatgactcccctgccggcccggacagcaagaaaaaaagcccgctgtctcaggacagcaggcttacaatcttaactggctttctgtaatcatatggggaggtcttgattcctgtcttttctgtggatgcatgcaccacttccccatcgcctatgtacagggccacatgattgatgcccccgcccccggcgtaaaacagcagatctcccggctgcatctggtcctctgttacgaccttgccgtatgaggactgtccggtggatgaatgggggagatttatggaagctgccttgcccagcacatatctggtaaagccggagcagtccacacccttattggggtccacaccgccgtactggtaacggccacccacaaactgaagggcatattccactacctgacggcgcatcttggcatcctcatccacggtttcatgggctttttccaccactgtggcattgccggaggtctttatgtatccttcccttccgccggttcggatcctgacccagccctgttgcgttcttcccagcacttcataggtctggcccctcatgacctggccctgtctggccgaaccttcgctggcacttctgtgtacatccacggagggcgcctctatcttcactacataggaggaccgggtctggacctctgcctgctttacagctgcctggctgtccatgggtctcatcccccacagtcctgcacacaggcacataagccctgatgcctttatgattcctttccttaatccccttatgttcacgctgattctcctaacttttatctattttcctgataatgtaaatattacgcaaatattacgtttattgaaatcagtatattatttattcacatttttgtcaagaaaaaggagctgttttttaacagcccctgccatatgcaccctgccatatgcttctgccatatcagcgtaatgtcagctcctgattatcttctgggtcccctgaacatccacacggccagcataaccagcagcaccggccatatataggacagaatccagccagctagtcccatgatgccaaagaacacggtcatcaccaggaatatgaccaggaatactaccagcccggcaatgagtctgacataccacttgctgaagtccacataatggacctccggttttcttcccctgaacggttcccgttcttcctggctgcttcctgctgcccctgtccggtaggcggactctgattcaaaggaatcaaacccatccggcctgtcctcggtgtcaagggcagcatccactatggtcctggcaatgattcttgggccgcccagactctctatgacctcatcctctgtctggcccttggcagcctcctccataatataggagtcataataccgcaaattctcctgtatgacggaataaggtacccgtccttccagctcactttttagtccctgcaaaaattctgtcctgctcattactcaaccctttccttaatcgttccctctctgtaagcagctaccagctccttcaaatcggctatctgtccttttaattcttttcctttatccgtatcagccaccatcaccctgctctttaccttttccaccacggataccctgggcgtactctctttctttgggtcaaagggcctgtgctccgccagggccaggtgatgtgaattataaatcagggtataccccgcaatgcccgtggtgctctggtatgccttggacagaccgccgtcaatgatgaacagcttgccgcccgccttcatgggcttctcgccatccttaagcttaaccggcacatggccgttgatgatgtgagatccctccacgggaagcctgaattcctccagcagacggttgcagaattcttccttcaggctcaactggtagtaggggttcatcacttccttatgggtggatttgtcctccacaaagtaatgttcaaaggtagtcatcttatccttgccgaacacaggggattttgccccgcaccacagataccacatcatatccatggcctgctcctttccgggcgtcccctcgggcatgaaataggcattctgaacctgctggttaaagaagtccatcagctccttcccgccataggataccccgttcatggtgatggtatcaaaagaaccgtcctttttcatgggaatacagccatggtaaaggaggttggaattataacatttataaattgccccatgagagtacaggaaccttatatgcttgtgcagcagttccccatgtttaaaggacgcctgcagggtgcgcagaagctccttctccccgcggctgagctccaggggattctttgggtccacggtggggaaattcatgtccagcatgggaaatgtcttaccgtcaatgaccacggtccccttctcaaagtcaacgttggacagcaggaccctgttatccatctcatactccggatggcgcttaatcatggcgccctccaccttaaactgaatcacggcaatggccttgtgcatcttggccgccaggccagggtccaccgcatcgtaaatgttctcgtccagaatcttgggcatgaaccgcgcgcaggggtcttcctggtataccttggccgcaaacatggagagcggcctcagattgatgccgtaaccgtcctccagcacatcgaagctgttgtagctgatggcaatgcgcagcacattgcagatacaggccagattccctgtggccgctcccatccaagagatgtcatgattcccccactgtatgtccacatcgtggaagcacatgagctcattcataatgatgtccgccctggggcctctgtcatagatgtcccctatgatatgcaggttgtcaatggtcaggttctgaatcagatggcacagggcaatgatgaacttgtccgccgtatcattctcaataatggaatgtatgatttcgttatagtacagtttcttgttatcgtcgttgtagtccacgtgaagcagctcgtcaatgatgtaggcaaattcccgcggcatcttcttgcggaccttggagcgggtgtacttggaggacacctccttgcagctctgtaccaggcggtagatggtgattttctgccagtcctcggtgtagtgcccctgcttcatcatacgggccagactccgctccggataataaatcaggttggccagctgtacctgctcctcctccggaatcaggtggccgaaggtctccctgattttctccctggtgataccggatgaagaccgcagcaggtgtatgaatgcctcatattccccgtgcaaatcgctgaaaaaatattctgttcccttcggaaggctgcaaattgctgtcagattgacaatttcgctggtagcttccttaactgtggggtattcttttgccaggagcttaagatatgccaaatccctcatcatcatattcccccaatcccaattgcattttatttaaagttatagtaacataaatttttccaatttacaaacaatttaagaaagccgtaagccttataaattcaatatttagtaccttgtgagaatatgcaagaatcgctcaattagtaacaaattagtaacaaaaattatatcccgtttgaggccgattgacaatgactaatatatcagataagggagcgcccattttaggcactccccagcattttttacaaaggtattccttttaatccgattattaaatagtagacccgctctataaccgcatcgctgtccaaccactcaataatctgagccttcatctgttctttgcttaatactttacatgccataacatatcaaacctccttgaaatcgggtggcctacgtgatatattaagcttgtgatatcactatgagtcaccgtttatgagtgtggagcagccatcgccgaccaaagttctggctgctctattttcgtgccctgatgtcttccggatttcatctgtctgtagtatagcataacccccaaatctaatcaaacccctggaaattaccttcttaatatttaaaatagcaattttcccaatagttatgttctggcagataaaatttctgtatatcactgtaattgatctgtgcttcaaaatgatcgcttcctgttgcatgtatcgaaggcatacttagcacaatgccatcgggttttaaaaaacatattacattgcctggtatggtaaacggatctaccgtttgatattcaggactctgtaattgtaacatattatgaaatagttctttatcataagaagttatcggattttctgggaagaatgccttttcaaaaaaaactttcttaaaatcttcatttgtagtatacaaatcgtttaaagttaattccttcattgactgtaaatctacattgatagaagttaaattggttgttttatccgggctgttgtcaacagacgattccccccagaaaatgatacttacaattttactgttttttagagtaacagccgatttgtactctgctgttagtgcagcatcaggcgaaaacagggcagtatcaatctgtccaacttcctgcacttttctatgtataattgaatttagttcttctgccttagaatcaagaaataccggatatgtaatgcttacagaactgctagcgctgtgcgcttgtgcataaaccagcataaaattatcgagaatccctaccgattcactggctgtaggttctgtatcgttctcatcctcatttgtttcttgactttgctgcataggggcagtttgtgaaatttcttgtgttgttctctctcctgaactatacgcttgggtggaatctgagcatccggttactcccaacacacataatgcagaaaaggtcatgatatttttaaaaagtttcttcttcaaagtgatgtttacctccaagtttttttatattatagaacaacaaatacttttataccagtgacaaaactatactcctgtctttgacagttatacgaagaaaaaattgctgtatccattgtatttactgggctacagcgatttctttcgttgtcacgaagtatagtaatttattctttccctttactttttttctgaatggtcctcattttacttttggttatgaattgataatccgttcggaagccacagacctcatgaagatcatccgtgatcgcttcccgtttatacagtgggataaatccctgctcctgtatctccacaaaattcattgcttttagagtgtcgagcagttcttcgcaggtatattttgaacccagttttttctcaagaaaacggtagaggaccaacgcaagaaagcagatcagcaaatgcgccttgatccggttttcttcctgtaaatatacaggtctggcagaaaaatctgttttcatgatacggaaacattcttcaatctgccatctgccttcgcttacttttaagatatcaccgacctcatcatccaaaagatctgtgcatactgcatagaatccgtcatactgcgcctcctcagagatcttatcctcatccggatactgtctgatatccgcagcttccccttcttttgtaactgccatttttccgatgaagcgggccgggtcattggggttcctgcggttctttttggctttccctgaatctagcattttctgtacccgttctacctgcttgtcacggatagacttctgataaagcgcatattttggggaataggtgatgagcagacgctgatgcagtttttttgtggtatacggctcatccttgtagtaaagtcctttgtcatcttccggcagttttgtgatgtcgacgggagtgtcatctgctacccgtttaaacccgtggggatttagcgcccatcccttttcttccttcttcagcttcttgatagactgggtgacgatataagcccgttctcccatatggttgtactcccggatggattcggaacccaggccggcatcactgcagtaaatgaatttctggcatccaaaatctccaaggactttcttttccagtggtttcagtgatgtctgctcattcgcgtttcccggaaagagcgagaaagcaagggggatcccatccccgtccatgaacagtcccatttgaatgatggggtttggtctgtgttctttactttttccatattttttacagccatcttcctgctcgatctcgaagtaataattcgagcagtcataataaaggatcttatcatttctctgaccaaggaaatggctgtttttatagacttccgcctgaataagatcacattccgcgccgagaacatccaatgctcggtacacatcatggagcttgtaggaaggtttctctaaaaattccgatgaagctttataggaagaatgcttactgcagggttccaggatccttgtgtagatcaggtcggaaaggatcgcgttgatatcatatttgaatttatatttttgttttaatttccgacagactttattcatctgcagctgataataaacagattgaaggaaaagataaccgccacggtaaaagctctgtttatcatgatctaactgcctgtccgcatggaaagggatcaatactgtttttgtctctttttcttttttgtatttttcggtttctattttcacttcgttttttgcccatgcgatcacgtcatctcttgtcggtccgtgttcgaccagaagatgctccaatgttcctaacttgcgaacaatagttgaagaagtactaccgtctatcaaactcccgagctgaaaaatgcaatggctaaaatatcatgagcatcttgacatttctcttaaaatggcataagataaagataaccaaaaaagcgatgattgtccactggacaaagcgaaagccccggaggtgctggctccgaggctttctttctaggctgtgctgtctatttatttctgtccagccatttgcatatgtagtaaccagctacagatgccgcaacagaaattaaaaaagcgatgattatatccactgaatcacctcccttctgctggaaggcttcgacagctatttcatgataacacacttttcaagtttcttctacacgatactgaaatccacggactaaaatttcataactttttattcaatataatactgaattagtaacaaattagtaacaagaaatacctgcaaatattgtaaaatcaaatacttgcaggtattataaagttatagtaacatattcttaatgaaatgaaaagtttttccaactgaacaaaggtttaagattatctaaattttttctaaggagaagagatgccaatggaggaattatacgtatttggaacaggaaacgcccaggccacccgctgttataacacctgttttgccataaaggacggagatgaatatttcatggtggatgcaggaggcggaaacggcatcctgcgcatcctggaggatatggatgtggacctgtgccatatccacagcatattcgtcacccatgagcacacagatcacatcctgggcattgtgtggatggcgcgcatggtggctgccgccatgaaaaagggaaaatataaaggtgagctgcagatttactgccaccaggggctggtggataccatctccaccatctgccgcctgaccattcagggcaagttctataagatgattggaagccgcattttcctggtgccggtggaggacggcgaaacagtccatatcctggaccatgatgtcaccttctttgacatcctgtccaccaaggccaggcagttcggatttaccaccatcctgaaaaacggacgccggttcacctgcgctggcgacgagccgtacaatgcagagtgccgcccttatgtggaaggcagtgactggctgctccacgaggccttctgcctgtaccgcgaccgcgagattttcgagccctacgaaaaacaccacagcacggtaaaagaggcctgtgagctggcggaggacctctccatccccaatcttgtactgtggcatacggaggacaaacacctggcggagcgcaaagccctttatacagccgagggcagggaatactaccgcggcaacctgctggtgccggatgacggggaaatcatcccgctgtaaaggagctgcatacgcgggattacagagtcatgtcatgagaagcgaaaacaccacgtttttatttttccgtggtgtttttttgcttaatatccgcaagaatagtcgagaattcctttttccaattctgtataatcataaataccggaggtgacgcagatgaaagaacagatagaagcagtccagagtatgcagaattatatagagagccgctggcaggagtccattactctggccgttttatcggaggtctcccatttttctccctggtattctaccaggccatacagatggttcagacagccatggaccgttacgacctgtcggtaatcggtccggcccctgaccctgaaaatcccaggattcagccggaacccacccatcctgcgccggctgccaatccttaagaagttttaacggcccgcctttctgaatccgaatggataataacgctgaccctcttatagaccagggcggtgagcaggcttacaatgacgcccttcaatatgttgaaggggcctacggccaggattacaaaagtccacacattgctgatggccgggttaatggccgcgcctgccgcaatgatggtgtccagaggcatgaaatgggaatagaacggaagcataacaaccgcattgagtatcacagccacgattgtcatgatcacggttcctgccgccattcctatgacagctcccttttttgttttgttaagcctgtatataaagcctgcgggcagcaccagggaacatccaacgcagaaattggcaaactctcccacaaatcccgtgctggtaggcttcagtatcagcttcaccaggattttcaccagctccatgacaacgcctgccacaggccccagggcaaaggtacccacaagtaccggaacctcgctgatatccatgccgtaaaatgacggcgcgataaagggaaggggcacctcaaaaatcatgagcactgccgccagggcgccaaacatggccatgacggttacattcctaacactgagtaaatgattctgtttcattttcctgtcctcctcgttatgagtacttattatgtgtccttcggaatgcgcacatcggataggggagattttaacctccccttccacaccacgtagcgtaccgttcggtactacgcggttcaatagtttactcggactttcagatagtgggcagtcatatcgggataaccaagtctgtccactatgattcttttggtgagtgccgagttgagcattcccgccgctctccacactccctttcggcagttcgccatctcatgcaccttccactctggtaaatgtaacgcccgcaacattttatatcttgtgcgtaccttcttccattgtttccagtacaccgctcggattctgtggcgcagccactcatccgtctgttccatcaggcttttcatgtctgcatatcgataatagttaatccatccccttgcatagcttcggcgtttttcttccctctcctgattgctccatttgttccctctggttgtcagctcccgtatccggttcttcatttttgccaccgacttcgggtgtatcctcatgcggcatttccctttatgccggtaaaagccgtagcccaggtattttatcttgctgacgtggctcactgtcgttttctgaagattgactttcagaaacacttttcctgtgatgaatggcacaatgttttccatcgtcctctctgcgcttttcctgcttttgcacagaatcaggcagtcatccgcatacctcacatacttgtgtcccctgcgctccagttccttgtccaactcattcagcatgacatttccacataagggacttagcgggcctccctgcggcacgccctcggtcgttgcgtgaaatcctccgtcctccattactccggctttcaggtacttgtgtatcagcgagattaccctcccgtccttcaccgtcctcgacagcacctctatcagcttgctgtggttcaccgtgtcaaagtaggattgtaaatccatgctgaccacgtagacatatccttcgttgatatatttcctacatctttccagtgcgtcatgcgcccctctgccgggacggaatccgatgctgttgtcagagaactgttcttcatataagggcgtcagttcctgtgcgattgcctgttggattaccctgtctaccactgtgggtatccccagtttccttgtttttcctttctcctctttgggtatttctacccttcggactgggtttggcttgtatttgccttccctcacctgctcgaccaattcggactggtgttctctcaggtagggtagaagttcatccacctgcattccgtcaatcccaccaacgcctttgttcgttttgaccttcttataggcggcatttagattgtcgcttctaagaatcgtatctagcaggttgtccgtccgaaagtccgtgttggtgtcggggttcccggtaatcctttcatgggcgtactctcctgtttcccttccctgttccgcaggtatctctcgcaggtagtcctcaatatgaagttgtctgtacttaattccatgtccggtttccatttggtaacgacacctcctactgttcagtccttcccggtgcgtttgcgaccgcccggtactatgacctctgctgacttctcacggcaggctttactccgtgacagcgaatgttttatcgccactttcacgtccgtgagacctccccgggtactcacacgttctttcccacttatacctgccccgtttactgctggcgttccgtgcagttattggactttagtttgttaggcaacctcatccacgcttcacagcctatccggacaacttttacaggccagtggtttgcctccggcttccttcagaccccacctcacgatgacgcccttgccattggctgcacccttcccactgccgggcgggtcagggactttcacccgttagaacgtgcgcccgccgggcgcacctataaaagccccggatacgcaaataatccggggcctgttcatctaccacttacacaccttcttctctcatccagactatactgtcggttctggaatcacaccagatcagccgccgtagcgggtcgcggactattaccgccggtagggaatcacaccctgccccgaagaactttatttaattatagctgaatcatagcacatatgaggacggttggcaatagtctgcatatattttctgcacttcagtcccggcgtctcagtcccggtattctggctccatcctttcgtctcatcgtctccagaccaccacgtcctcaaacccttttcggggcctgggtgacggcgactcctccggatagccgaaggccacggctgccaccagctcacccccgcagtccatccatccgcacagctcctcataggcaaagaatatatcgcagatccacagacttccgattcccaaatccgttgcttccaaaagcatattctcaattgccgcgctgacagactggatattacagagctcataaatcctgtcctcgtcattcaggggagcaaacagcccttttcccaggggattcaggacaaatatgaccaccggcgcctgttccatgatttggaccgtgtactccgcgcctctcaggtgcctgctgctttccggcagcatggctctgcctgacttttccctctggatgccggcccgaaacgccctcaacatttcttcctttgcctgtccctggatgaccataaatttccacggctgtctgttcttggacgagggagcctttatcccgctttctataattttacagataatatcatgcggtatttccctgtctgagaacctgcgtatactcctgcggctgttaattgcgtccattttctgtctccttcttgttgaccgggcaggccaaactcccatggccgttattctgccatcccggttattctcccatagccatcctgtaaatttccatcatttcttccttgcccagttcccggatgcccggcagggtgcgcttgcccatgttggtgcacttctcggccatctcttccaggcgttcttcctccacaccaagttcttttaaggaggacggcatacccaggctcttatagaaatcctccgtggcccggattcctgccagagccgtgttcatagggcagtcaaaatccatgtctatgttccacacccggaccgcataccgggcaaagcggttcacatcgccggggcacacaaacctggcccaggacggccacagggctgccagacctgctccgtgggcaatggacgggtacatgccggaaagctcgtgctccagctggtgcacctgcataaagaaatccctccccgctcctgtcagtccgttatgggaaaggctgcctccccacataagagcggccctggcttcatagttatccggctctttatcggcaatcctgcccgcctccaccgtggactttaacaatgcctcggctatgcggtccgtcagttccgtgtccctggtcctgctgaaataccgctccagggtgtgcatcatgatatccaccgtaccgcaggctgtctggtatttgcttaccgtacaggtcagctccgggttgcagatggaaaacagggggcggtgggtcacgctgttaaagccacgcttaaatccattttcctcatttgtgatgacacaggatgcgctcatctcgctgccggaggcagaaagcgtcagaatgacgcccaccggcaatgccctggccggcacagcctcctggcggaaataggtccacacgtccgcatccgggtttcccgcgccgtccgctatgcacttggctgagtcaatcacgctgcctcctccaacagcaagcaccaggtccacgccctccctaagacacagttctattccctcttttgcctttgccagagtgggattagcctgtacgcctcccagcgtcacatactgtattccctctgcctcaagggctcctgtaaccgcgtccagaagtccggacttccttgcgctggcccctccgaaatgcaccagcaccttcttaaatccgtattcctttacaatctttcctacctgctgatgggtattcttaccaaatatcatcctggttggtgtgaaaaactcaaaattctccattatgcaatcctcctctatgccgcttttatcactgctttcattatacataaatcagagggctttttccacttaaatctgctgcctgtattttcctgcgccagctttcccatttttctccggataaagtaaaaaagggccccgcggaacgttttcaccatctgttcctgccaggcccctccgtaggttccccgtaccagtctttccagtgcttcgcccgggaaccggcgccacgacatctcctcatgctttaccaggataggataatagtataccccgttgtccgccgcggcctcacagtctcccggcgcatcccccaccatgagcacatggtccggtacaggatgcgctccccgcccacttccaggtaaatggttgtctctgagccggcgggcatcacggagtatacttccgcttctatgctgccctctgccggtccgtccagtatctccgccagctccggtctcaccccgaccaccgcctcaaagctgccgtcgccgggagcttccccggtaaaggacttcttatcaaaggtcacggttcccaatacggattccacggtcatggcatctcccgacaccctggcctttcccggaaggaaattcacctttggattgccgataaaatcagccacccgcagggaggcggggttttggtacagctccatgggaggcgccacctgctccagtacgccctcaaagaaaatggctaccttggtagacatggtcagggcctctgtctggtcatgggtcacatagataatggtggtgcctaactcctgatggagccgtttgatttcacttctcatctcaattctcagcttggcgtccaggttggacagcggctcatctaaaagcagcacctccggctccgacacaatggccctggctatggccacgcgctgctgctgtccgccggacagttccgatgggtaccggtcaatgaacgcctcaatcctcatgcgctttaaggcgttttccaccttctttcgtatctcctccttgggcacctttgccaccttaaggccaaaggccgcattgtcaaataccgtcatgtggggccaaagggcataggactggaacaccaggttaagatggcgttttcccggttcctcataaaacttttcaggcgcgttgacaatctccctgtcccccatgtacatataccctttctggggtttctccaggccggccgccacgcgcagggtggtggtcttgccgcagcctgacggtcctaacagggtcataaactccccgtcctcaatcaccaggctgatgtcctttaacacatggttcttgccataatatttattgattcctcttaattcaattctgctcatctttcatatcctcccgcattaaaagcccttggtgatgtccgcgtccgtaaaggtatttgcaaaccagtagacgaagaataccagcacaaacataacgatggtcactgcactggacagctgaatcagattttccgccgaataggcgtacgccatatagggcagcgtctgctggctgggcgtcatgagtatgactatcaggtccagttccttcatgatgctgatgaataccagcatgaatccgcttatcatgccgccctttgacagggggaacacaatcttaaagaacctgcgcgggaaccccgcgttttccacctgggcggcttcctccagctccgtgctgatctggagcatattggacgttcctgccctggaggcaaagggcatgtttttcaccaccgcgatactgccggcctgctcctcgtcggcgcagacatagggaatcccacactggcccgtaagctcattgagggccaccatgggcacgttgtgaatgaactcactcatgctctccgtgctccttggaccaatgggaaatatcaggattccctccacctggtgttctgccagaagcttcagataatccctctctgccctcagttcccggaagctgttgcacagcagcacctgataccccctcttgtgagctgcgtccgacgccttcaccatgagttcggagtaaaaaggactcatgatatccggcatgatgatgcctatggtctgggtcctgcgctttacaagactcctggccaatccgttgggggtgtaggagagccgttcacatacccgcaatatccggctgcgttttttctcgctgatgccgtccatcccgtttaacgccctggatacagaggcgatgaatacccctgcctctcttgcaatatctttgattattacttgtttcatattaggccttctccccatttctccgttttaaagaatggttttcgtaaaatttacggccgtatacgtttacggccaatagaagataatttttcttttgtacaaattgccccctctcccctcattcatgcataaagcaccttgggcagacataagattactccaggacccatatttcccgaaagggtgtcaggaggcggttatattatgagattcttccgaatgctccgggagcatttacatatcagtgcaaagacagtgatttacggggaaatgctggtgctaagcctgctgtgtctcagcatattcctttttaaaacagatccgggccaggcagtcataagccaggcatccaggctggccggatacatgaatcccctggaaaacacggacagcgcggacccggacaatacagagacagataagaaagcggataaaaataaggattatatcaaatgggtggactttggtgtcacctcagaggcaatgaaccaggcattccgccttgacgtggacacatgccgatctgacatccatctgaactgggtggatttactggcctatctgggtacccgttacggcggagacttttccaaatataagccggaacacatgaccgcggtggctgaaaagctgaaaaacggcgaaaccaccatggaagaattgacaaaagacatgaagtattactcgtattaccgccaggcttacggggctgtattagacggcatggtaggccagtttgaggcagagataccggcaagcgaggcccctgccgcttatcttccctcaggcgtggcagggggagcccccggagatcccgccacggtctgggtgacaaaatacggactcaaggcattttcccccatcgccaaaggatttccctacagtgattttgacgacttcggcgtggcccgcagctatggcttcaagcgccagcacctgggccacgacatgatgggccaggtggggactccggtggttgccgtggaatccggctatgtggaagccctgggctggaaccagtatggcggatggaggctgggaatacgcagctttgaccacaaacgctactactattacgcccatctgcgcaagaattacccctaccagtccggcctggaggtgggcagcgtggtgcaggccggggatgtcataggctatctggggcgcaccggttacagccgcacggagaacaccaacaacatcgacgacccccatctccactttggcctggaacttatattcgatgaatcccaaaaggacagcaacaatgaaatctgggtcagctgttatgaactggtaaaattcctgaatctgaaccgctgcgagacggtgaaggtggagggcactaaggaatggaagcgagtgtacggcatcaaggacccgtcggtaccggctcagccggctacgccgtcccagcccacagagccgccccaatcataaacattctgcgatacccccatatggttcggactcgtcctcaaccacctcggcagcaacaatcaggtcattcaccggggacatatccacaaacacctgcatcttggcagcgcggaaggaggtgtacacaaccatgcactggggtatgatggaggtggctgccagcagatagataaacaggtggatgaaaaagcctttgattccataggcctccttgggctgtatcggcctcatggagctcatggtaaaggacttggtattcacataccatttctgaagcaggaacacggtggcggtgactaccaccatgatagtcgccatacatgccgcaaagttggcggagccgcctgtctctcccacgaactcggagtataccagggtaggcataacgcggtatccctcgccaatcagggcaggcgtaccaaagtccgccatacagttcataaacaccagcagtgctgccgctatgagggtaggggttacaaggggcatgattacggtaaggacctttttcagtcccccgcatcccaggctttccgccgcctctgacagggccacgtctatctttttgagggctcccgacacatacatatagataaagggatacagcttaagtgcaaataccaacagcattcctccaaagccgtaaatggacggcatatggattcccaggccctttaaaagctgagtcacggtgccgcttcttcccagaagcaggatccaggagtaggcgccgataaagttggggctcatcatggagatgatgaacaggatttccagcgctccttttccttttatcttatagaacgacatgaaataggccagaggcacgcccagtataatggccgccactgtcacgctgaaggtcagcttaaacgagttgagcagtgcgctcttataatacttctttgaaaagaacctggcatagttgtcaatggtccagacccctgtctccgtgtccttgaagccgcttaagaaaagactgatgagcggatagagaaggaacagggcaaacagggcaatgatgaccactgtcacaaaagtccagaagtcccacctgattttcttattcgtcatatctcttcacatcctttatcagactctgttccatgtcctgggtgaacacgttgattttattggggttcggtctaaggcgtatcttttctcccaccgcgaatatacggtccacatggcccaaatcctgagagtactcgatgcttggctggtcctccagcaccataccctctccgaagcgcagaaagtagttggtatatttgcccaggaaggtcctgctgatgatttcgcaatccatgccttcccgattcagcgagaattcctcagggcggacagataccactaccctttggccctccgtcaccgtatccacaagatttggcatctccacatggtatccgccctcaaacacaacggagggcacacccccttgctttcttatggttccgaaaaagagattggaatggccgatgaaggtggatacaaatgcattgcagggccttgcatagatgtcctggggacttccaatctgctgaatcacccccagcttcatgaccgcaaccctgtctgaaatggcaagggcttcctcctggtcgtgggtcacgtaaacagtggtaatgcccacctgcttctgcacatcccgaatggcgcttcgcatctcgatacgcagcttggcatccagattggacagcggctcatccatgagaagcacctggggatggatgacaatggccctggccagggccactctctgctgctggccgccggacaggcgctccggcagacggtcctgatattcgtcgatttttaccgccttcaggatttcatccacacgctccttcatgtgctcctttggcaccttgcggattttcaggccatattccacgttctggcggaccgtcagatgggggaagatggcatagctctggaacaccatgccgatgttccttttctgggccggaatatcgttgatgaccttgccgtcaaatttgatgctccccccttcgatactgttaaacccggcaatcatgcgcagcagagtggtcttgccgcatccggatggccccaggagggtgaagaattccccattttttataaaagcggacaagtccggtatgatagtcatgtccccatattttttcgccacattgtcgattccaattgaaacactcatacgtttcccctcaattcctctaaaatgaagggggctgacatattaagccacgcccccgatatatgtaccgttcacctgatctatggattggtttactctgtaaacagctccttgaactcatccagccattcagacttgtgtgccgccgtgtctgtctcgtcatcctggattaccttaatctgatccatgggagccatggcgtctcctgcctccacatccttgcggatggttcttctgtactgggtattgttcatgaattcctgtacatccttgcttgtgagccagtccacgaacttctgggcatttgattcattggggcagcccttgatgatgtatacgccgtcgcctcggaagataacaccttcactcatatagactgtcttaacaggcgcgcctgcgcccacatactgcgcggaaccctgctcgaaggtaagtcccacggtgtactctccgtccgcaacgcccttataaaccgcggaggaaccgcctaagagctttccgtccaactgtgcacagaactgttttacatagtcccatccattgtcaggattgccgccgcccattgcatagagcatgtttaccagatgctcgaaggaggaagaagacgcggccgggtccgcaaaggcaattctgccctttaattcaggattcagcaggtcctcatatccttccatcctgatatcgccaatcaggtccgtgttcaccatgataaccgatggaatggtatcaaagcgtgtcagattgccctctgtattcttgtattcatcatagaacgcgtcctcgttggatgttgtgtaatccgcaaaatactcgctcttgttctttacggttccgatggttcctgaccagaggatatccgcctggggattgtctgcttctgtctggattctctttaacgcgtcgccggtacccatggccaggcactcagcgtcaataccggtgtcctcctcaaacatggccagcatggaatcaatcatggactctgtaagggggctgtaaattatgagcttctcatccttggaagcagctcctccctcttccttcttcgctccgctgtcctcatcctttcctttctctgcaccggcctcagccttggtcgcctgggtatccgcgcctttatctgtggcggaacctgaaccgcctgaacagccagccaggctgacagccactgccgccgcgcataaaaccgggattaatcttctttttttcattacctttatcctcctttaaacttggttaatatggtttgaataccgaatcaatgggttcctgcctcccggctgccgttttaactgcctcgatttcacgggtgatcctggagaactcaccttttttcacatcgcctaagattaccaccatatccacttccccggctccgtccgccaggaccctccgggtttcgtaaacctttgtttccgtgatattatatcccagcggaaaaccaatgaccgtgcacacattcagcttgtccccataagcatttgatacccgcttaacatagccgggagggatacagaccgaagccgtgcggttttcaatggcttcctcacagagtgtctgtatctcatcccgggttgagactgcctttaacagcgtatggcccgcatggaccaaaatctcttcctttgtcatccccctgtcctttttgtctgcaatttcattatatcttctcattgtcgcctgaaccatccgaaatcctggcaaattatccaatattctgaacccattttatatttttctgtatattgtagataatttacacgttaaacggtccattgaatttttctgatggaatttactctgaaatgtgataggatatatacagaacctgattttattgcagtcaggcagcagctgacaaatccaggcagttcacaggcccggacagcaactcccactggcagaaatggaggcatctatgttcggaataaagaaaaagacagaagtgttcatgaccaacgacctggaattatacaccaccgtacatcaggccctgaaggccgcacagattccctgcgaagtaaagattgtcaataccggtacccagaacaggcggaccggcacacttatgggcagggtgggcgaacggcctgagctggaaatccagtactatatctatacgccccgggaatatgcggagagggcgaagtatgtgattgatgaatataggaagagtttgtcccggtaaggatgtctgaatattcatctctttcgaagcataatccatcattaaatacaatcgtttcacggaaaagctcagttactgctacataaaaaaagcgcggacaaatattcaatctgcgcttttaactattggactttattttccaaattattacaaactattttcaaaggccagcagccgttccacatcctccacaataccctggcagtcatccgctgtctccatgccgtactccactaccaggtcagcctgaggggtatattccctggcccatgtcataaagatttcaaaatccagggttccgtctccaatccgcctgtggctgtcgtgaactccgtcattattgtgaagatggtatgccagaatctgccccttgaggcgctccataacgccgcgcaggtcccagccattggcatgggcatggccgatgtcgatgagcaccgggtacttttctgtcccgcacagggagacaaactcattctcatctaacagcatattgttccggtccatgacccctgcattctccactgccaccggtattcccaagggacgaaacagttcctccactctgcggtaattcacgcaggaatccctgagcatcctctccttatccctgactacacagttgttgtgatgaaaaaccatatagcggctgttaagtttctctgaataatgaagggtctgctccaccagctccatggtatactcatactccggggttccctggggcgccgagtgctccgccttgtaataggggccgtgaaagctgatgagaacacggcttaaaatgtccgtgctctcctcaagaagaggggcaaatatctgctggtggaacatgggaaatacttccacccccacctgtcccctccatttttccacatagggcagaactctcttaaactcctccgccttatacatattggtactgatgagcaaagccattgtcgttctctcccttctttttggagacctttgggagtatatgcggctccttggcggccctcagctgttcaggatagcccagggatacctgggtggtcctgtcaaagagatggattctgtcaaaatccggctggatgtatacgttctctcccggagcagggatatcgccctcgctcacagcgataaactccatattgtccacctgcacgtatacgccgtaccggttgccgtaatcctccacgtacttgacggttccttccagggtattgtcctggtgcctgcgtaataaaaccatgtgctccggacggattcccaggaacaggcggccggactcgttgcgtgaggccaatccggaccacatgtccggcagccagatcacctgtcttccaatcaccagcgttcccttggtgtaggatgcctccacaatattcatggagggggagccgatgaattttgcggtaaatacattggccggacggttgtatacattggaaggggtgtcaagcatctgcattttcccctcgtgcatcagtgctatgcgctgtcccacggtcattgcctcaatttggtcatgggttacataaataagggtctggtggtacatctcatggattttcaccagctccttcctggcccgcagcctcagctgggcgtccaggttggaaaggggttcgtccaaaagaaaataatccgagcgcttcaccactgccctggccagcgcgaccctctggcgctggccgccggagaggtccttaggcctgcgatcctccagtcccttcaggtccagcatatccaggacctccgaaagtctggtctttatctccgccggatccatcttgtgggcctttaagccgtaaatgatattattttgcaccgtcatatgaggaaacagggcatagttctgaaataccatggacacattcctctccccgcagggaacatcgtttaccagacggccgtccatatagagatttcccccgctgagcttctccaggcccgcaatcatccgcagggtggtggatttgccgcagccggaaggtcccaacagaatcaggcgctctccttccctgatttccatattcaaatcctttacgattacatttttgtcataagcctttactacatggtcaaatactatgtttttcatttatttctccttatttgattccttcgaccgtgaattttcagacacgctctaacccttgatgcccgacatggcaaaggtatttatgatgtagcgctggaacaggatatacaatgccagcggaatcatcatggtcatgacggaaacagccattgctatggtaaattccgtccctccctccgcgcttatgtacatctgcagggccagggacagggtgtaattctccttgcttttcagtataagaaccggccacacgtactcgttccaggaattgatgaaaaagataattcccgtggaaatgatggagggccgaactaacgggacgatgatatccctcataattttcagattcttcacattctccatcctggcagcctcgataagagctctggggattccccgcatggactggcgcagcagaaagattcccagcacatcggccagctggggcagggccacgccccatatcttgtcgctgagtccgattttggaaatcatcagatagttgggaatcatggtaacggtaaatggtatgaacatagtggccagcatgataaaatacaggattcccttgcccccgaaatcaaaatatacaaaggaatatgccgcaaacaggctggtaacggtcttaaaaatggttacagtggcagcaatcaaaaaggtattcatggtaatccttaaaaagggcagcttgctgaatacatggatgtaattctgcaccgtgggtcttgccgggataatctgaaacaccgtattgaaggcatcctgcatggtcttaaaggaattggacacagcaaaaacaatgggcatcaggagaaggaacacggcgcacagaagaagcaggtgccatcccggctgcatttctttaattttcataatatacccccttttccacaaaccggaattccatcagcagcagtacaatgaacagcaccatggtaatcactgacacggctgacgaggtgccggtgcggtacagggtaaatgcctcgtgataggacatgtatatcaggttggagctggcatagtttggaccgccctgggtcaccaccttgatgggtgtaaacacatactgaagtccctgtacaatggtggtgataaacacgtagattccggtagccgagctcatggggaccaccatgtcgcggaatattttccacagtggaatgttatccagcctggccgcctcaatgacctctgtggataccccggacacacctgccagtatgatgataaaattatagccgaacaccttccaggaggtgattacgctcagcaccgcaatgacccagccctctgtcttggaccagaagggaagggccaggccaaagtactttaacacaagggccaccgggccggaaatgggattcagaatccagatgtacaggatggaacccaccaccagagagatgacgctgggaaggaaaaatacagctttataaaatccctgtcccctcttaatcaccgctgacaggatgaaggaaaggatgtagggcagaacaaaattcagtaccagcagcacaaggatatacaccactgtattgcctgcaatcttccaggaattcggatccttaaaaatggccgcatagttagccagccccacaaactttttcaccggtttcaccatattccactcaaaaaaactgagatataccgtataaaacaaaggataaaacatgaataccgcaaacactgccagggatggcacaagaaacaaatatcccagcaatgtctgccttttttcttcctgattcaatctgattttacctccataaaggggcaggtacccccatatactccggggatacccgctccaatttattgtaagtgcctccaaccggttactgtactgccaacagctggttgatggcatcctgtgttgccttcatgccctgctctgccgtcacctgtccgcccagaatctggtccctcatatccaggagcatctgctctgcctgaagacccgcgtctcccgggaacgctgtccacggaaccactccgtccatctgctcgatggccgcgttcatcatcttgttctcagccaggaatgtcttaagtccgttctcagccccggccacatcctttctgggaggcacataaccggtgccctctgtccaggctgccatggactccacgctgtagaggaacttctcaaattcccatgccgccttcacctggtcgtcgccctgggccgtaatggccaggaagcatccgcctgccggaaccatgcgctccttgtcattccacagaggggattttacggttgcagcgtcaaactgcgctcccttctgtacggaagcccttctggcaatggtggtgtaaagcatggcgcagttgccgtcgataaagctctggcagccttcctcccaggagatatgtaaagcggtctggtccttcaccatatcagccatcagctgcatggcttcaattccatcctccgtagcaaaggcggcctcttttttgccttctgcgttggtggtcagcatcttagccccgctgctttcaatcagtccctgctgagcccagaaatctgcgggctcctgcatataaaatccgtactttccggtcttttccttaacggtctttgcaaactcgctgacctcctgccaggtagttgggccgtcttccggaagtcctgcctctcttaagatatccttgttgatgtagagaaccggattactcaaagaatacgggatgcccacctgtgaaccctcgctgtttacagccagctcaaggacattgggcaggaatttgtcctgaaggaaaccggcttcctccttgtcaaacttgtcaatggcttcctgaggagacacataggaaaagttattggagaaatagtctaagaacgcccagccaatctgcaccagagccggagaattgccggctgccgcttctgcctgaaggttctgcatcagccccttatacatgtccggattgtactttgccactacctggatatgatcgttgctttcgttaaactgcttaaccagctcgtctaccaccaatcctccctgtgtttccgcgttgcagtgccagtattcgattactgtttttcctccggaggagctgtttccttccgcctttgtttctgtattggtttctgtgttggcctttgccccgcttcctgtctggtttaccgccgccacgctggtctgggcattggatgcgcccgtattatcctggactccgcttcccgccgcagccgcaccgcagccggatagtacagccattgaagctgccatggccaatgccatcaaagattttacacttcttctcattactccatttcctcctaatcattccgtggtatgttcttatcttaaagattgaatgtaaattccggaagatgaaatctgtaaaatctttgcaagaaattgggaaaaaaaataaagcacggacccaatcctttgtccgtgctttaatccgctccatccttctacagtgtgactccctgcttaaagatagccaaatcatgaaagccagcttcctctgactttacctttttccctgaagccaccctgagaacatattggaacaattccatggccacctggtcctttgtctttgtctccaccatttcgccggcgttaaagtcaatccagccggccttgtatccggccagctttgaattggaggaaatcttcatggcggggaccagggtagcgaagggtgttcccctgcctgtggtaaacaggacaatctgggcgccggacaccgccagggccgtggcagctaccaggtcattgcccggagcggacagcaggttaagccccttctccctgacacgctcaccgtattccagcacaccgcacacaggcgaggagccggacttctgggtgcagccaagaaacttgtcctccagggtggagatgcctccctttatattgcccggggagggattttcgtagatagtctggttgtggctggtgaaatattccttgaaaccattgattaacttcacggtcctgcgaaatgtctcctcatcccggcaccggttcatcagaatggtttcagcgccaaacatctccggcacctcggtcagaatcgtggtccctcctttggatatgagtatatcggaaaacgctcccaccgccggcgttgggatgatggatgaatccctgttgatttttataaactcctgcatatgactcttcctccgggtctgcacattgtggtactgcgcatattattataccccttcatatcatcggattccgcacatcatttatccctggccgcatttactccgtttcactcagaaccgcgtcatatgccttggacatgcccgctgtctcaatcaattcataccacttcttcacatccccgagaagggggcttaaatcctgtccccaataatcttccctctttaaaatatcttccaccggggctgtcttcatgaaatccatgatttcctggctgtcattggcatcatcggtgcggtaaaacgctatgagggctgccagcgaaaaggtaagtccctgtgggcaggaaccaaacatatccctgtactccagtatggtgggcagcacccttgcacggaatttggacacggagttaagcgcaatggagaggagcatatgcttaataaagggattggagaaccgctccagcactgcctctccgaatttccggttatcttccgtatcgccaatggccggtatgatttccccgaatatacacttgcgtaaaagggcggacaccttttcatccttcaggcactctcccactgtcttaagaccatataaatgggctcccagcaccatggaagtatgggctccgttcaggatgcgcaccttcctctttttatacggatccacattgtcggtccagaccacatgaaagccggccttttgcagcggaagctcatcctcatggcttccctggatgacccacaggtggaatatctcagccgtatccatcatattgtcctgttcaccaatcctccggcaaagctcctcatgttcatccctgggaaatccggtgacaatacggtccaccagtgtggagcaaaaatcattttcctgtacaagccatgtcttgaattcctctcccagcccccacagatccgcgtaacgcagacagcatttttccagctcctccccgttgtggtcaatcagctcacaggaaagaataatgaatcccttgagccccagacggaaccgcttatataaaagctgggtcagtttgcccgggaaggacctggccggcgcatccgtaaattggttggaatccacgtactcgattcccgcttccgtggtatttgacacaataaagcggaaatcgggattctccgccagcttcatataggactcaaaattctcatagggattcacgcacctggatatgatgtcaatatgagtatgctcatccaccacctgtccattatcaatacctctgaggaacaggttgtactcacatccctgctgctccagcacactgcacattcctttttcaatgggctggactatgaccacagagccgtcaaacagccctttgtcctgcagcttttggaaaaaataatccgcgaagcctctgaggaatccgccttcgccaaattggattactgtttcttttctcattttattttcctcttttctccactcaattttcagtaaaatctataaccacctttaacatatctccaggattatgtgcaaaatcatagaatgctttagccccgtcttcaaacttatatacgtttgtaatgatattctcaatgggcgtctctccgcttttaaccaagtcaattaattctacgaaatccttttttaaagcattccttgaaccaaatacattaagttcctttttctgtagtaatgtaaaattaaaatccagattcttctttcccacaccaatgacaactaccttgccgccaaagcacgctgcatctatacaattctggaaggtagagggaagtcccactgcctcaatcgctgtatcaaacccatttcctcctgtgatgtcatttactgctttttcaaaattctccggagagtcgttcagaattgtaccatccacgccaaatgctttggccatctctaactttccctcagaaacatccgatatataaacaagcgcgccttttgctttcgcagcaacagcagcaagcaccccaatggttcctgctccaattacaagcactttttctccggttcccacctctgcccggctgacgccatgataactgatacaaaacggttcaatcacggcgaggagcatagggtctatcccttttccatcatatacccgctccgagggcattgttatatattcctgaaatgcaccatcgcgctggcatcccatggtctggttatccatgcaggcatttacaattccatttttacaggaataacagtgtccgcaattgaagtaaggattacatgttacaatcattcccggacgcagaccctgttcgttatcctcatctgcctcaacgatttccgcggaaaattcatggccgggaatccttggataatcgaagtacgcaaaagtccccttgtatgaacccaggtcacttccgcaaatacccccgtatagcagttttaataatacctcgcccttctttctcacaggtttttctacatctataaattctacctgtccaggctcttttatatacatcgccttcatatttccctccatgctggattgatatttgtaattaaagcgggtaaacatcttttgcatttttgtacaatacctgttctagttccaaatctgaaaagatgtttccctcatataagtagcgccataaattctcatagttttccctggtcagaggactggggacatccgttccccatacaagtttctcagcccccacagtctgcctggcaagttttacaaatccctgtcctgtagggtacggatatgtctcaggcgccacattccacggcactgcagccagatcaaaccagacattgtgcagagctaaaatgcgcagtccttcttcaaggattttataatcacccaaaacaggtgccagaagatggcagaccaatatcttcattttaggatgtctttgcgctatctctgccactgcctccggctgaaaactgggcattccagggcttcctatatcgagaaccaatgttgccccggcctcggcaatcattgcgaaaacttcacgaaatacatctccgtcaattctgaaatcgccatgatagcccatgagtccgcctccggatgaagtctcaaatttgacaatcctaaatcccatttcatggataaaccggtgcagaagatatttggcctctttgcaaaatggatcacatgtagctgccggtacgaacagttccggataacgtctggctgattcaaggacatattcattttgaaatccgtaaaagcttccctgcaataacaccgcacgctcaacatgattctccctcaataatgcggctaatgtatccgctgtaaaagaccgttcccccaaccccggcggaatcatctctatctcgtcaccattcgcccatcgcgcccttccgcctccaatggggcgtaattcaccgcggggaccaaatccgcaaagttgctcaaacacatgtgtatgcgcatcaattagcttcattgccataaacccacctttctgttatatcggcttaaccgacccctccttgcggttaaagattctggccaatatacccgagcgtttcaaaccgctattcttataccgcccataagcatctgccgcaacagctacaataattacaatccctttaacaacactgtgatacgttgatggtacccctaacagacgtaaaccattgttaatcattccaaccaaaagagctccaaacatagctccctgcagtgacccttcacctcccataaggctggtgccgcctactacaatagcagtaagtacatcattctcgtatccctgcgccgcctttgcaattgcctgctgattcatactggccagcactatacctgctaaagccgcagtaaaacctgaaatagcatatgatacagtggttatccgtttagaagatacaccagaaagattgctggcctccttatttccgccaaccgcataaacctggcgtccaaaggtagtccggttaagcagccaaaagctgattaacgccacaatcaccaatatacaaaccgaaaaaggaataccaaacagtcttcctccgccaagaagtgtaaatgcagccggttccagacagctgataacctgatttccggtcagaagctgtgcaattccataaataatattttggctggcaagagtaatcaggaaaggcggaacattaaaatttgagacaatcgcgccatgagcaatacctgccatcacaccggcagcaagtccaaataaaatacctaatataactcctgtaaaactatagtccatcttgacaatagtcaatacaacacatgccccgctcattgctgcggttgctccaactgcaaggtcaatgccccccagcagaatggggtaaattgtaccgcataccatcacaccatatatggaaattgcaagcagaatacttttaaaatttcccagtgtcaaaaaaatacccggattcattaacgtgagcacaaacatgaccacaagaagaatcaacggtttctgaaagcgactggtcagagctttatagttcttatgactgctcatgtgttcttttcctccttttttgcagtatcaatgccggacgcagccattaatatatcctcctgcgtaatgacaccactatcaaactctttctggatatgacccttgcgaaataccagaatacgatgggatacccgcagcaattcctgcaaatccgaagaaaccaagagaatggatactccctgttcagcaagattatcaagaatcttgtatatttcatcctttgctccaatatcaatacctgctgtaggttcgtcaatcaaaaggacccgcagatcgcgtgccagccactttccaataactaccttctgctggtttcctcctgaaaggttgcccacaggaagctgcgaatcagccggcctgatatccagttttcctacagcatctataccgatctttttttcctctgccctattcacatttgatgctttactcaagaagtcatagtttggtacggcaatattgcgttcaattgataaaagtggtataaatccctgattacgcctatcttccggaaccaacccgaaaccttttgcaattgtctcagaaacatggcatggcagcttctttccctggaaaaggatctcccccccatcataggagtctgcaccaaatatgcagcgcagaacctcggtcctgcctgcaccgaccaagcctccaatacccagaatctctcctctgtgaagtgtaaaactaatatcggaaaatgtaccttttcggctaagtgaccgtacttcaagtaccgattccatttcgctgcggtgcagacatcgggaagcagttgcctcactgagctcctttccaatcatcattttgataacatctggaggattaatctgctctttttcaagaacagcaacttttctgccatcacgcaatacggttaagcggtcagctaaacggaatacctcctccaaccgatgtgaaatataaagaatggatacccctttttctctcagttgattgataattccaaataaagcctctgattctttacttgaaagtgaggccgtgggttcgtccataataatcagtgatgaatcctcagacagggccttcaaaatctccactgtctgccgttgtgcaatggaaagtgtctccacaattgcatctggctgaagattaaaatcataatactcgattaaatcacttacttttttcttcatttcgcgtattttgaggaatccgcaaccgcttttttccttgccaagcattacattctgcataacactcaatgtaggaatcaggctcagttcctgatagattacaccaatccccagcttctgtgcgtcactccgggaattaatctcacaagctttgcccgagaacgtaatggagcccccatcctttggataaacccctgtcaaaatcttaatcaacgtggattttcctgcaccattttcacccatcaaagcatgcacttctccgcaggcgacttccatatcaactttcttcagtacctgaacatctccaaaccttttttctatcgcattcatagaaagcaggatctttctctcactcatacagcagccttcctttcctcctccagggctttgcgacggaccagtttctcctccatatatttgttataaaccgagtcaaacataatcatagccacaataaccgcacccttgattatcaactggaccgctgtgggaagattatatttatagataccattggttaacaccatcataaacaaagttccaatcacggtaccaaagacatcaccccggcctccactaaaggcacatccacctactaccaccgctgcaataacatcaaattcaagaccaatgcctgtctcaggggtcgcggaacgaatcttacccattaaaaatattgctgaaatgctgcaacacaaaccggtcaaagtgaatacagtccgtttaatccttccaaagttaattccagacaattctgctgatttgcagttagcgcctactgcataggtatagacacccagcttagtccgtttaagtatgagctgccccgctattgcaataacaaagaaggcaatcgtaacaagatatactccgttaatgcttccacccagaagaagaaacgtccgattatcaattactttatttgaaatcatacctgtggcagtacgaatagcaaaaatcaaggccagacctctgaacaggaattgtgtggaaagagtcgctataaaatcgggtatgcgaagcaccgttaccagcaccccatttaagtaacctcccagagccccaactacaagagcaatcagaataatgacaccagacggaagattggtataataaagcagattggcgcagagcattgccacgaaacctaccagagcacctgttgataagtctatgcctgcagttatgattaccatggatacaccgactgcaatgattcctatagtggaacactcacgtaataaggtaaagatattgttagtggtaaaaaagtattcgctggtgagaccaaaaattaaaatcaatacagaaagcaagccgacagatataagccggcgaattgactcttgtcgcatagtagttcctccttttatcataaccggaatctgcctgaaatccatcgcctctccaaatatgacataaaccgttttttatctgagaggcttgccaggaagaaggggctgtcgggaaataggtagtcctaaacagggggctgtgggaaatagagtccgtctactctattttttcacagccccttccttggaaagattcctctggattaccagcggatatcagaaccgattgagcctactgtatcggaggttactacaaccggagccatcttaacgatgggtgtttttgtaaaagaggatgtatcggcttcagaaccaataaagtacattgcaagccttgctgctgttgcaccctgatcataacagtttgtataaatggtaccggccatttttcctttttcaatatattccagggctttagactcaccgtctgctccccaaatcaccatttctcccagacggcctgctgcttccgcagcctgggaagctccttctgccattgcatcattgtggcagaacacagcatcaattttgtcatatttagttaaaaagtcattcataactacattcgctttctcggtaagccattctccggtctgtgcatctataatttccacatccggatgcttagccatctcatccctaaaaccggcttcaagaatttccccacggcttgctccgggtgtagcctgaataatcacaacttttcctgtctctccaatagaagcagcaatattcttagctaccaatgccccggcttcataatcaaccatggcaactaacgccgcatgcggagtggaagcatccatgtttaatgttatgacaggaatacctgccgcctccgcctgttctaccgaagcagcaagagctgccgcatctgttgcctgtaatatgattgcatcgtaatgctggttgaccaaatccgacaatatctgaacctgtgtttcagcagaagccttaccatcaaagcgttggaatgtaacgttttcaaaaatggataattctttttccataccgtctccccaagcggcagctactgaatctccaattacgttaggtacaaaggcaattttaacatcatctgcatacggttctttgacattcgacttaactgcagccacctgagttccttctgaactagatgtgtttgatgttgtattctttgaatccgcaccatcaatttgtacattgccacaccccgacaaagccaatccagttaccatcagcgccgctaaaaaacccgcataaatctttctcattctaataactcctcctgtttttagtttttgcgtcttcatacaattgcagcagattctataggataaatgagtccagtgcatttgtcatgaagcatacattaatgtatacatcaattgatacaacaagtataataggcattatacataattgtcaatggttttttttgccttttctttaatatattgtatttttatatatatttcatattgtttcatattatttttgtactaaatgtacattttcaaaattttgcattatttatattctttcttatataattttatggtataatcaatcatgttttaatgtatacatcaatcaatacgttaggatttgtcaatattcacatcaatgcaattgatgcattatacaaactatgataaaatattctaatacatatcaaacgaggggggacaaagacgccatggctaaaaccaatctgaagaccctggcctacaaaaccataaaacaaaaaatcgtcacatgcgaatatgctcctggaatgtacctgaatgaggagatattgactgaagaacttaagataagccggacccccatacgtgatgccctaagcaggctggagcaggaaggccttatagaaatcaaatccaaaaaaggtattactgttacaagtctctccataaaagatgttaatatgattttcgagattcgtaagctgtatgagccttacattttaaaaaattacggttcctttctttccgaagacaaactccatgaattttattatatcttttcccacaaagatgccagcagcgaatgctttcagaacaataattatttttatgatctggattcttccttccaccagatgatcgttgatacatgttccaatatatatctgcgtcagaactatgccctaattcaaactcagagcgagcgtttccgcttcatgaccggaaacatctccaataaccgtctggaggacaccttcaaagagcatatctccattatcatcccctgccttgaaaaagactgggatactgcctcagagaaactgctgtatcatctggatgaatcgaaaaagtcaacctttcggttggtgtttgatagtattgatagtaataatattgggttctgattggttttggatgtaaatgaggcggaggggttagggtcatccgtccgtgagtgggatgggggcgggggagacggatgctggctgcggagcgggaatcactaaggccgcattatctcgatttcatcttgatatgcggccctctggctgagtattatctgcgtaagtgttaatctaagtagcttttgttctaagtaattattattctaagcaatctttattctaagcattttttattttagtcggaatatagctaagtggaaaaatccaagagaactaacccaagcggaataccccaggcaggcaaccactttcctattctccagtattatcagccagagataccttttctatcctatgcggtgaagagacagcggacgctctggaaatgtagtgggtgagagccgggaacgcagggcgggaggtggctttggagcagttcggagagacttaggcgcaaggggcgagaaaagccggggttgcgcagggcgctccacgcccggagcaaagcaaacatggagccgaactcatcaggagttcggcgtaatttttgcggtccccgggttttcctgacccttgggtcttagtctctcccactgcggaaacggtcacctcccggactgcgttcccggctctcacggacgcggctccccacgcgcgtccgcgtacccccttcccctcatcctaccccagcctatgtataaacagcccactccgaagcttcggctcaaaccaggtagacttaggcggcatgagaagccccgcgtccgccacagacaacaactcctctatggatgtggggaacatggaaaatgccacctccatatcctcaccaacccggcgctccagttccttaagaccccgtatcccgccgataaagtcaacgcgcttatcaaccctggggtcgccgattccaagcaccggtcccagaagctggtcctgaaggatagacacgtccagccccttcaccgggtcactgctcacaaactccggcttcaccttaagactgtaccatctgtcctttaagaacatgccgaatgtgcccttctcctcaggcccaaaggccccggttcctgccccgccacgttcctgcacctcaaagcgctccgaaacagcagccagaaactcttcctgtcccagtccgtttaaatccttcactacccggttgtagggcagtatcttaagttcctcgtccgggaacagtacggacaggaaatagttgaaaggttccttccccgtataatccgggttctcttcccttctcttaagccccaccttcacagcggaggcagccctgtgatgtccgtccgcaatataggtggccggtatggccgcaaatgcatcctccacggcccgcaccatatttctggcgccaatcatccacaccctgtggcggattgcgtcctctgacacgaaatcatacagaggcacctcctccttcacctgggccaccaaagccttaagctcctgattctgcctgtaggccaggaaaatagggcctgtgtgggcgttggtggtatccacgtggcggatgcggtccagttccttatcctccctggtattctcatgtttcttcaccacgccgtccacatagtcgtcaatggaacagcaggctacgataccagtctggctcctgccatccatggtgagttcatagagatagtaattttcctcagggtccgtcacatagaccccctcctcaatctgacaatcaagcagctccctggccttgtcatagacacggctgtcataggtgtccacgtcatccccaaactgagtctcagccctgtcaatgttcaggaaggaaaggtgattccccttaacggcctcacaggcttccttcctgttatacacatcatagggcagggccgctacccgggccgccttgtccgccgcgggcctgatacacataaatggttttactactgccatcgtttctctcctgtttatccagagtgtgtttgaaaattcattcccgccatctgtacgcctcacttcgcggcatatttggccccaattcagtcagcgtagcccactacgcctccttcatcgggaccaaatctcccacaaagtgtgacgcacagctggcagaaagcaattttcaaacacactctaaggttataatccgtccatggtagagcgcggttacttaaccacccgcaccctcagcacgcctttaatggccctgagcttccggatggtggaatcctctgccttgtgctccaaatccagcagcgtataggcatacttatccctgctcttattggtcatgtcggaaatattcatgccctgttcagccaatatagccgtaatctgtccaatcatgttgggaatgttcatatgaagcacggccacgcggctctctgtctggcatatgcccatgtcgcaggacggaaaattgacggagttcttgatattgccattctccaggtaatctgtcagctccttcaccgccatcaccgcgcagttgtcctcggactcctttgtggaagcgcccagatggggaagcaggataaccctctccatgtttgcaacctttggattgggaaaatcgctgacatagtagcgcacctttccggcatccagagctgccgccatatcatcgtcattgaccagggtatccctggagaagttgaggattaccaccccgtccttcatgatagccagtttttccttgttaatcattcctctggtggaatccataagcggcacatggatggtgatataatcacatttctggaaaatgatgtccgcgttggtgatatgctttacgttcctggacagtctccaggccgcattaatggaaatatatgggtcatacccgtatacctccattcccagatgggtggctgcgttggcaacctcagcgccgatggctcccaggccgataacacccagcttcttgcccttaatctcgcagcctgcaaatgccttcttgctcttctctgtgtccttggtgatgttgtcgtcctccgcattggccttgcaccactcaataccgcccacgatatcccgggaagccatgagcatacccgcaatcaccagctcctttacgccgttggcattggctcccggcgtattgaatacaacgatgcccttctgcgcgcaggaatccagcggaatgttattgacaccggctcccgcccggcccacagccagcaggttttccggaagttccatatcgtgcatggaagcgcttcgcaccaggacggcgtcagcgtccgccacgttgtctgtcatctcatatccggccggaaacagctccgtgccgcacttcgcaatggggttcaagcaatgaatttttttcataataatccaactctcctctatatgtccaaagacttttatttcctgtgcttcttctcgaagtcagccatgaattccaccagtttctcaacaccctccgcaggcattgcattgtaaatgctggcacgcatgccgcccacggttctgtgtcccttcagattctcaaagcccgctgcctttgactccttcacaaacagggcgtccagttcctcatcacctgtcacgaacggcacgttcatcagtgagcggtccttcttaaccacagtacccttaaataactggcttgcatccaggaaatcatagaggatctcagccttcttttcattgtattccttcatggctgccaatccgcctctggccttcagccacttaaacacctttccgcacatgtatataccgtatgtaggcggggtattgtacagtgactctgcgtccgcatgggtcttatagcggagcatggtaggtgtcccgggcagcacatcctctgtcaccaggtcctccctcacaatgacaatgacggttccggccggtcccacgttcttctgggcgcctgcaaaaatcaggccgtactttgtcacatccacgggctcggacagaaagcatgaggactggtcagctaccagaagctttccctttgtgtcgggaagggtccagtacttggtgccgtaaatggtgttgttctcacagatgtacacatagtccgcgtcctcggatacaggcaggtcggagcagtccggaatatagctgaaggtcttgtcagcgctggatgcaatggcattggcctttccataaatggagccttcctgaaaggccttcttagcccactgtccggtaaggatgtaatccgccaccttgttcttcatcaggttcatgggcaccatggcaaactgctgggacgcgcccccctgaaggaacagcaccttatagttatccggaatatgtaaaagatcccgcaggtctgattcagcttccttgatgatggtgtcataagccttagatcgatgactcatctccatcactgacattcctgttcccctgtaatccagcatctctgctgcggcttccttcaggacgtcctccggcaaaacggccggtccggctgaaaaattgtaaactctgctcatcttgttctcctcctttaaatggttgtacttgctgcacatatcctctttaatatatatatacagaggactcctccatatgcggaacccggcacaatacaatgccataccgcatacagagaagtcgcctgactgtatactccatcgtatatctgtcccacctggcccagagcgtgtctgaaaattgctttctgatacgctctagcatgcattctgttgctttatcgtgctaatccgataacgcagccaagatattaaagactactatacactgtttttaattaattttcaagtccgtatcgtcaaaagcatccgcaatgggcgctcccggcgataccatggggaataccttatcatcgcagctgatctgacagtcaatgaccacaggaatgtttaaggagatggcttcgcggagcaccggctccagctcctccttctgcgtcacacggtaagccttggctcccatggcctctgctatcttcacaaaatccaccgaatcattcagtatggtctgggaataacgcttgccgtagaacagggtctgccactggcgtaccatgcccagcacatgattgtttacaatgacctccaccacagggatattataccgggtggccgtggcgatctcgttcatgttcatgcggaagcagccgtcgcctgcaatgttgataaccgtcttatccctgcatcccatcttcgcgccgatggcagcgcccaggccgtatcccatggttcccagtcctcccgaagtaagaagggtgcggggctggcggtactggtagtactgagccgcccacatctggtgctgccccacctcagtgacaatgacagcgtccccgcccgtcacctcgttgatggtctgtacgataaatggacctgtgagcacgttcttatcatagcgcagcgggtacatatccttcatacgctcaatatgggcaatccactcgtcgtgattcaccgggtccagcctggcattgagcttgcgaaggatgaccttcacgtcgccgatgatgctggcgtccaccttgatattcttgttaatctccgccggatcaatatccagctggagaatctttgcgttctttgcaaatttagacgcgttgccggtcacacggtcgctgaacctggcccccaccacaatcagcaggtcggcctcggttatgccgaagttggaggtcttggtaccgtgcatgcccaccatgcctgtgtacagctcgtcagccccgtcaaaagcgccctttcccatcaggctgtccgccaccggcgcctgaatcttatgggcaaatgccctcagctcgtcggacgcgttggacagcacagcgccgccgcccacaaagataaacggttttgccgccttgcggatcatctccacggcccggtccatatcctgctctgtaatggtatcgctctggcgcacgacttcctccggaacctgcttctcatattcacagagcgcggccgtcacatccttggtgatatccaccagcacagggccgggacgtcctgtctgcgctatggtaaacgccctgcggatgaccgttgccagacggcttacatcctttacaatgaaattatactttgtaatgggcatggtcacgcccgtaatgtcgatttcctggaaactgtccttgcccagcaggctgttggtcacgttgcaggtgatggccaccaccggcacggaatccatataagcggtagcgatgcctgtcaccagattggtagcacccgggccggatgtggccagacacacgcccaccttgccggtggcccttgcgtagccgtcggctgcatgggaagccccctgctcgtgagatgtcaggatatgggtgatttcatcccggtgctggtacaatgcatcatatatattcaggatagcgccgcccggataaccaaatacggtgtccacaccctgttccttcaaacacgcaactacaatctctgcccccgtcaatttgctcatatctgcactccttttctccatgttatttcatgatgcgcggcccttaccgctgccgccagacggcccggcaatgcccgcaggccccggaacctactttacctgcagcacagctcccctctcggcggaggtaaccagggacgcgtatctggccagataacccgtggtgacctgcggtgtacgcggctgccacctggccttcctggccgccatctcctcgtcagataccagcacgttcagcttatggttgtcaatatcaatggagataatatccccttcctccaccagggcaatggggccgcccactgctgcctccggtgaggcatggccgatggaagcgcctctggaagcgccggagaaacgtccgtctgtaatcagggccaccgtggaccccagtcccataccggcaatggcagaagtaggattgagcatctctctcatgcccgggcctcccttaggtccttcgtaacggatgaccaccacatctccggccacaatcctgccgcccttgatggcatcaatggcatcctcctcgcagtcaaataccctggccggtccctcatgctttaacatttcaggcgcaacagcggagcgtttcaccactgcggagtcgggggccagattgccctttaatatggcaatgccgccggtctggctgtatgggttctccaccggacggataacctccgggttcttgttgacacaatcctttatgttttcccccacggtcctgcccgtgacagtcatgcagtccagattcaaaagtcccttcttgctgatttccttcattaccgcatagattcccccggcctcgttcaaatcctctatgtaggtgggacctgccggcgccagatggcacaggttgggagtccttgcgctgatttcgttggcaatatccacgttcagctccacgcccgcctcatgggcaatggcaggaaggtgaagcatgctgttggtggagcatcccagcgccatatccatagtcagggcgttcatgaatgcctcttttgtcatgatatcccttgggcgtatgttcttctcgtacatctccatcaccttcatgccggcatgtttggccagcttgatgcgctcggagtaaacagccgggatcgtgccgtttcccctgagtcccatgcccaggacctcggtcaggcagttcatgctgttagccgtatacataccggaacaggaaccgcaggtaggacacgccttattttcaaactccttcacatcctcctcggacatattgcctgccgcgtaagcgcccactgcctcaaacatactggaaaggctggttttatgccccttcacatgaccggccagcatggggccgccgctgacaaacaccgtgggcacattaatcctggccgccgccatcagaagtccgggaacattcttatcacagttgggaaccattaccagcgcgtcgaactgatgggccagcgccatacactccgtggaatccgcaatcaaatccctggtcaccagggaatacttcatgccgatatgtcccatggcaataccgtcgcagacagcaatggccgggaacaccaccggggtgccgccggccatggcaacgcccagcttcacggcatccacaatcttatccaggttcatatggcccggaactatctcattataggaactaacaatacccaccagaggctttctcatctcttcctctgtcataccaagagcattaaacagggacctgtggggcgcctgctgcatacctgtcttaactgcatcacttttcatgtcgtatcccctttcatctaatccggacaggaatccgtccggtcttcatcatccaatccgttgcgcaatcaaatcacccattttacaggtgcctaccctgacgcatccctccgacataatgtccccggtgcggtatccttcggtcagaacagcctgtacagcattctcgatggcgtccgcctcccggtccaaatcaaaggaatagcgcagcagcatggctgctgagagaatggtggcaatgggattggccatatcctttcccgctatatcgggagcagagccgtggctgggctcatagaggccgaatttgctctcattcatgctggccgaggacagcattccgatagagccggtaatcatgctggcttcatccgaaaggatgtccccaaacatattctccgtgagaatcacgtcaaactgaccgggattcatgaccagctgcatggcacaattgtccaccagcatgtgggacagctccacttccgggtaatccccggcaacttcctccaccaccttcctccacagtctggaggaatcaaggacattggccttatccacgctggttactttcttcctgcgcttcatggcaatgtcaaaggccttaacggcaatccttctgatttccttttcattatatgcaagtgtgtccacggctgtcatgacgccgtccacttcccttgtatacctgtccccaaaataaagaccgccggtaagctccctcataatcaccatatcaaagccgtccccgatgatctcctttttcagagggcatgcctcagccaattccttataaagataagccggcctgatgttagcaaagagccccagtcccttgcggatagccaaaagtcccgcttccggcctgagattgggagccacatcataccaccgtgagtttcccacatctccgcccacggcccccagaagcaccgcatcgctctttccggctgtctccagggcttcctctgtaagcggaaccccataggcgtcaatggagcatccccccatcagaatctcggtataatcaaacgaatggccgtacacccttcccacctggtccagcaccttcctggcctctctcacaatctccggtccaatcccatcacctggaatcacagtcacattataatccataatgcatatctcccctatcttctattctttatagttatatctatccacaataatacgatttctttcaatcatatatcatttgaaaaggtatttcaacctttccggcagaatttcgccatagtgaaatatacaagtttggaattattatcatgactgaaagttatgcctctcttaccagacaatactgtctcaacgcaaaatgcttttccatcacgccaaaaaccttaaatccaaaatgctcatacaggggcacattatccggattatgggtttccagcgatatcatgagcttgtgctggtcagcataacggatgacctctcccaacagcagggccgccaggccgtggtgctgcatctccggccggacagccaggtagataatgtgtatccgttctgtctggtgaagctgggccgtccatctggagttgaggtaatccttgcccagcatgaacttccacagggtcttaagactgggatcctccttaatcaggaactcatcggtcctgagagaagcccatgcctctgccagataataggtcagcgggttatatggctcggtttcgtcggaaacaaccagcagggaattcatctccgggctgtctgagtatatctcgcaggtctcatagaattctgtcaggtcacaggcaaacagctccggcaagagccttttccttatctcctcatccgggatcagtttgcagtataatgggtcgtgttcaaaacacccggtcagcagtttctccaatctgggcaggtcctcctccttgacccggtataattgtcggctttccatctctcatttattcctcctgtatcttactctcatctgtatctaaatccttttttatgttcaaagcccattgcccggcctgacggattgcctccagaagtttgccggcggatgccatcatgtaccggatatcatcctcatagcagcaaagctggttttccctcgccctgacaaggacctcatattcttcctgggtatccgggttttcttctcccgccttggctttcagcctctcaaccagtccaaacaggttctggtgatggacaatccttccagccccccatttaagccggtcggcaggctggttcaggacgtattccgtaaaataggtatagacctcctcctcaaacaaaaacgcgtagcggttgttgtctatggtatagaccgcctccagagccccggtcaggtcatgattttcaagacaggcaatggccctgtccatggcccttacattttcctggaccgcctgctggggaaagagcacatcgtcgtgccagctcagcctgacaaaataatcctgttcctttttaaagattcgcagaagttcccggttaaacggccggcaccccgctgccagtttaacggctttctcttcctcgccgcggtccagaaaccgtccgtatatcctgtttatctcccttatttttccataaagggcttctcctgcttcgattcccttgtccagaaccacacgcagccccggcaggtcggctcctgccccgcggcaggcgctgctgtcaatactggcctctgctccctcaaacagtcttgcaaaattcatgggcactgcggctgtcctgtcaaaagccaggacaaggccggcgtacatctcatggtggaagcggtacaccggttcctggtaaaagttttcattgtcatactgggaatggtaatgggtctccatgaattcccctgcgctgaaatcattgaccatggacggaatccctccgatggccatggaaaaatcatccgaccaagtctgtatggggctcagcacttccactccctccggatatggctggcaggtaaaaaaaccggctggcaaaccggttataaattcccccaggaaatccgcgtactcatacacgcaccgcacagcatccttcctgccatgggcatgggcaggcagttcaaagttcaggtccgcaatcacctttcccgcccagtcaggcctggccgtaaacacctgctcatatgcgccggcggaccagtcgtatttggaattcaccacgccccactcctccgcagccatggcgcagaacacaagtgtctttctgggcttatatcctgaccgaagcacggctctggctatgcccagcatcatggccaccgcggcattgtcgtcctggaatccgctgaaataggagtcgtaatgggccgacagcagaatcattccttcttctgtccccggtatggttcctatgatattatacgtctcctgatccttaagcaccgtggatgaggcgtccagacgcacccgcacctgattttcctcccccatggccgccttcagcacaccagcgtccgcccgggacatggaaaaggctggggcgtcagcgggccctgctatgtcctgggcgttaagggccgtgtcgcttatctccccatacccctgctcctggacagcaatcagggcagccgcccctttgagccgggcctggtatacgggaaaattgatccaccactcatctctctggttgatatcaatgagaaccagctttccggccacatccgcctggctgtaatctgccgccgtcccctttcccaggtataccaggctgaattcccggaatccgccggtatgaaagtcggtctggtaagcgcccaattgaaactcgtgctccctgccccggctgtccgtaaaaagcatgaccgccttctcaaactcccagctgtccacggatattctgtccttatgtacgtccgcaagccccagggactccatttcccggaccagcatcccgcctgtctcaagctccgcccttgacccggcagttctgtatcccagcacaggattggtacggtactgttccatccgtttggccaagtcataggaatatcctgtgtctgtttccccgcagattttctttctccactcttcctcattcatgacacatcacctcaaaaatagctgtaggagtacattcctatactcctacagcagactatcttccatgttcagttgtgttactggtttatctttgcaccgtcttcacctacccagaaggaatccggcgtcagacagttggtcagcatctcgccgttgtcggagcagtagtattctttaccgtcccactgtacccatccggtcaccatatatccctgtgcgtcaaagaaataccacttaccgcctatctgctgccagctgttggccggatagctgccgtccgcattgcggtaccaccatctgccgttctccggggtctgtgcccattctccgtttcctcccgtggggttctccctgaaccgggccgccttttcctccggtatgtaggtgctgggagattccgcccagtctcctttttccttggcgtcgaatttgcttacgggcctcactctgaccgtgtaggccgtatcgcccttctgcaggcgctcgcggcagttgcatgtattggtacccactgtcatgacagcgcccactgccttgtcgtccctgtacacacgcacctcatagctgcccgctgccggtatggcgtcccaggcggctatgccgtcttctgtgagaaccacattgttcaaagcatgaagggaggtattcagggcctggagctccacttccatcagcagggtggtgctggaatcctcccgcttggaattcttgaactctgctccgccttttatggtcaccttatcctttggaagggactggaaataataatcatcgttggctgtgagggtaatctggattctgggtatggtgtcctccctccattccacatcgtcattcaggatttcatagccgtccacagagtacttgttgctgctggtctcaatctctatgagctcgtctccgaaatccgtatccggctttatctctgcttttatggtcaggtttatggacttaatgggtttgcggctggcgccgtatgcaggaaacaccatcagagcagccagtactcctgccgcagccatcattaatctccgcttcatgtgcagcatattatgattcctccttttccgttcctggtataaccctactttatccagttttgcctgctgtgtcaatatacatttccttaagattctctggcttaagattctctggctgaaaattctccttcggcatccggaacaccagataggagacccaggcaccatgtccaatcagccttgggtcaagggtccgatggccgttggctatcctcctgatgaaaaaacaggccgtttaattcccagtttccttgcgtatcaatggtgacgcccaggataccggctgcctcctttcttgtatacaccgcctggccccagcgaaaaactccaatgccttcgactggctaaagccagaacaaaaaccagcctgttccggctggtttcataccaatttttctaacccaggctcagcgccttaaatctcgctgatataataatacacaatgcatatataatcctcgggcttctggaaatccagcttcagggccaggcttgcgtggttctccctgaattggtcccataacaccttctgggcggcgtatgacttattgagatctcgccactttccgtctggaaaaatggcattgaccgcaccgacgcaccggtttacaatctgcagaaatccattcatatccaatatattaagttttatcacaatccaacacctcccggaatatgcagcccctttcatgaccgtgggaaaaaggcgctatcccttattcctactatcattatagtgtatcatattccctgaagatatcgaattactgccatcttgtgtcactattctgccacttcagccgatactctttagggctgcatcccatgcagcttcggaacaccttgccaaagtagctgctgcttcccaggccgcacgtctggcatatgctggtaatgggttcgtttccctcagacagcatccagcacgcccgctgtaaacggcagctggtcacatactctaccggagtcatgttcagacagtcccgaaacgcccggaagcactcccgctcactgatgaatgcggatgctgcaatctccttcaccgacagcttatccccgcagtgcttgtggatgaaggccagcattatttttatcttctgacttgaccggctgttgtatttggagcctttctccatggtctccgccatggcaagaaggctgcaccatatctcagacagagccgcccgcaaacgtatttcatagccatagccgccctctgatatccgaaaagactgccgaagggcttccaaaacaggtacgtgggacggctgatccggatatagcccgattatctccacatgggaagcggtcataaggggcgagacgtatttccggtcaatgatgctgccgctctgtccgctgatcagcagcgggttaaaaatatgaaggagggaggcaactgccccgtccccgtcctttgccctggacatatgaagtacatttgaattcacaaagccccctgagccagccgtaaaagcagtctttccctgaggcgtttcatattccaggccgccctgctccaagtaaaacagctccgcttgtttaagctctaccttacggattatcttcatatcagcctcctgttccaggacctcatttatgggtgtctatgctctccaggaatatccggacctcccgatattcccgtcccatcagttccttcgcattgcagttatttaccaaacctatactccacggattaatcaggcgctcctgacagataggaggtcacctgtggtattgtctccagctttttatgaaggagctttaaaaaaagggagacggtctccgtctgcttgcacgtttttttcagataatatataatccggtccggcggcggcgaggacaggtagtgaatcgagacatggctgccaacgattttatccgccacggacgcagggacaatagcccaggtatctttccagagcagggcatgttccagcaaatccatctgatccagcgatacttcgaattccggcctggagcggaaccagtaatcatgccatgcatcgtactcagggttccacggaagcaggatttcctgactgggtttcagcatagcaggagaaaccgagtcaggataattgcaactgttgtttgcaacgaagaccattggctcaaaaaaggcgggaatcgtctccacattcttataatacatatggtccgaaataaaagcgatgtcaatcagcccactgtctatatactgataggcttcataggaatggtagttgtgaaagcagatgctcacttgaggatactgctgtgagaattgttcaaaaacatccggcagaatataactgctcacgcttcccacagaggacagatttaggattctggggctgttaagccgtttgatttcctgggcttcctgccatacgccaagccatttgtgggcgacagcaatgaatgcttctccctgctttgtcaggacaatattccgctttcccctgtttcgttcaaataacggatatcccagttctgcttctaagactttgattctccggctgagtgccggctgggtcacatacaaattctgcgcggcacaggatatggagccggccttcagtatctcaaaaaatgcttcaatttccagatgagtcatggttctttccctcatattataaagtttgatttatatattatcgcaaaatatggcattttacaactatttttctttgcggtaaactgttatgtggaggtaacaacgatgaatctgactgatgacttaacaaacggcattatctggaaacagttgactgccctggccctgcctttgatatggggaaatatcctgcagcagatgtataacaccattgattcctttgtagtggggcattatatcggagaaaccgcctttgcagccgcgggcgttgcaggcagtgtcatgaacttgtctctttttgtcataagcgggtgctgtaacgggattgcgattatcatagcggaattgtatggacaaaagaactgggatttattaaggaaagaaagctttctatcgcttgcattcgggggcggctttacgatcatgctgagtatgtgcgggatgctggccttgcagcctttactcagagacatacagacaccggcagaggttgcggggtttgtacaggagtatctgaggattatctatttggggctgcctgcggtatttctttataactggtgtgcggccgtactgcgcggggcaggcgatacgggagcatccctttggattctcttgcttgctatggggttaaacaccattcttgacttcctctttgtcctttcctttggcttggggatggccggcactgcgtatgctaccgtggtttcgcagttgttcgctgcttttatatgcctgggatatatgaaaaaacagactccgaaactgctgtttcatgcgagagatgtctctttccattttccattgtttatgagaacaatcatgttgggaacgatctctgcgctccatcagtcaagcctctatatcgggaaactgctggtacagggagccgtaaataccggcggaaccggaatgatatccgcctacaccgccacggcgcggatcgaagggtttgccaattccttcggagacagcggctgtacggcaatttcaatcttcacggcacaaaaccgcggagcccacaaaagagtgaggataaggcagggatttttgtgtggattacggatgatggcgggcctggggctggtattgtccataactatgtttttgacatcaggacctgctgtgatcttgttgatgggggcggcatctggtccggttttaaaccatgccaggtcttatatgaacgtgatatccgtcttttatgtcctctgcttccttggcaattcctttgtgggcttttatcgcgggcttggcatggtacagattccggtctttggtaccatcctgcatatttcgatccgcgtaattctgtcctatgtgttgatcaggcattgggggctggcggcggttgcttttgctaccggagccggatgggcagcggtggtgctgttccagtggatactgtaccggagagttaccaccgagccggaagcttgacaattcgctgcaccgtattcgcttcatccagccagactagcagcttgttagattctgagatgatgcggaaagaggagagttcattcataccgtaggatatgacgggacagtctttgggaacctggtaaacggtacctgatgaagagaccaggcaccagctttcatcttcctgccgctcaaaggcatctgtgaggatataatccggggcgctgacaccttctggcatttggctgatgataatctcggccgtggtctggggaggcaggctttcggccaccgtagtccggatatcggcataaatcacatccccggccttgatatcagacagctctgcccgaaagccgctctccccgtttacgaaacgggtgtcatagacggaagtgtgtaaaagaatctctccgcaataagtttcctcagactggctttctaccaggattttctcatcttctacttcttttacgattgcccggatgcgcatggtttccgtctgctccgcttctatgccgggaccgtatgcttcttcagcgcgggtttcggaaaccagaagaaccgaagactgtgccatggcaatccccgagtttaagatggacataatccctgtgcagcagaaaataaaacccaactttctcttaaacgtgtttcctggcgggaaccaatcaatacttcgtttattcttcatgacagtctcctttgtgagtgatttctttttcctgaacagtttcaataaggcaaatctctgcacccatgaaaaaccggggcgcggtagctatctggtagctgacgcatcccggctcttcataaagaaaccctaacatccacttgacttaattatctttcgaacttcacgaattcttcgaataacagcagtttcactttgttcataatgtctttgaagtgtactagttctttgctcttcgtgactgttggtttttcctttcttttttctaaaaaaacactcatccactttgttgccatacccaacatcaaatatataatgaataatctcatgaatatacgcaaatttatgtttttttagttcttttctcagtctaattagaccataataattgctgtcatcaattggaatgagttctgcctcgttatcatcagccatatttgtaacatattcaacttttagccctaatttctcggacaaatcctcatcatcagcacttaattttaacaaatataacttactatttcttagagtattttccatctcttccatttctgcaacagtaaagtctttttttctccaaagcataacttcacccctattcaatatgcttagactagccatgggctaatcaaaaccgccctttttactcgattatatatttcaaaagtcaaaaaagaccacaaacaaacagtaaaacaggggcaacataaggaagtatcgtattattatttccaacgctgagggttgcaaaaaaaaattgcaaggaaatcaaatatcagtcgaataacaagctttgcattttggggagagtgtccattatatcttccatatgtatcatacgcaccagccaacgaaatagatataaacggaaatgtataactccaaaacgtataaccatctgtaaatagtacaaaaaaactgaaacagcaggaataattaccaaagcaacaaagcccgctaatgcatctctatagtttctaaatatatttgtttcttctgctaaccaatagtttctaattacccgtttcagcatcttcaccatcgcacaacctttagtataactttatttttatcttttatccttgaaactacatcccacattgcattttacatataaaaataaacctgcaccaaatacgcaggtacctttctacttcaacaggatttacttgtatgcctattatcttccgcacccatattattatattgacattatatcatgtactctgcagtccgtcaaacctttggatacgaacgggtagcgtcaatttactttcgggttacagttcacaggacaatgtcatttagttaactttttgtaaaagaaagaatgtttttttaaaatagagatctgacgttccaaacggatagattgaagagaaggatatagggattatttatcagaagtagttttgtaaatattttaccgcaaggcaaacaagcagatttacatctgcttcaaaaaagggtattatagatattgatgaaactgttacttatgctgctcgatatataaaatatcgaggttttcggaagtgtgccgtttggagtcgtggatactgtcgatcattccgtatcggaatcagctcttttgtcagcagggacatcacatctatggagtctttctctgtgttcggacggagaaagactctacaaatatgagcagccatactgaaatttactttgtattcatatttcgtgtttcccttttctataattgcatgattgattagtgtttctgttatgttgtaagcgattaactttgcccaaatttcctgtttgatatattctggtttgtaggcatggaagttactcaatccgaccgtatatttcagcttacggaaagacccctcaatggcccatctggcatagtatagaagttttatttgttccgacgggaattcatctgaaggcagattagtgacgatgcattcataagaatcatccgatatcggaaaccgtacgattctaaaagataaatcgtaggtatccaaggaaccatatgcaacgtaatcaaacgatgcagccgcatccacaaagcgtttgtaataaccttctttaatcgatatcttctttttatgactgcgaaccagagttacatttacctgaatatcaaaggagtctgcatctggaaactcaaaatttccaacaagtcctttggaatggatatctttggtgcgaaataaaaaatactggcctttttccttcacatgtgccatgttgttgtaagaacaatagcccctgtcaccgataaaaacatcttttgtaccagtcagtaaatcgtggcggtcgaccatttcacagaaagcactaaattcatctttctgatggatcggctggatcagcgcatcggaataagtgtgcttctgtaagtcgtaaaaagcattcagatgcatactgtaaaagccctttattgaatgtccttcagagacatgatactcttctggggcgaaagcaggtttactgaaaaaggtaaaggtggagccatctgcagcaagaaagcggtagcgtagctttttttggtcataaaaagaagcaaaatggttaaaatgccgaaatacagcttccagggcatccgggctaagctttgcgcgttgctggttgagtgccgaagcagttggcgactgtggatccatgtcgaagaagtccagcaattcattttttgtgctggaggagccttgggaaacaaggaaagtgataagcttatcggcggggaacttcctgttccttgtcagatcggtgtccgaataggtaaattcggagattacggatgaaacaagatggacggaatgggaaaagcattgtttaattttttgatggaacattgtgtgtacctccttgaattagaatgaatttatgattctaatccaagggccgctctcgctacctattaaagtcaatcagtagcgagagcggccgcacattttgtggtgtatgtcaactgtttttatgaaaaaagggaaaaatatggttagacacccttcattaagaatctaaccataatattgcaaagcgttaactaaatgacattggttcacaggacatgtattctgttggaaaacagggcgccgcgggcggagcgtcagcgcgatgctgcgctggataaagcaacggaacaacgccatcatctatacgaagctgaaacggaactcgaagaagaaaaaggaaagaatctgcggttaatgacccagttctgtaaggattccgaaaattcttccctgccgttggaaattataaaagcctataagaagttacaagaaataaaaaaatgccccaaacccgcatgaatactggattcttacggtttttagggcatttatctttcactccgaacaattacttcgcgtaatccgtaactcttgattcacgaatcacatttaccttgatctgtcccggatattccagctcgtcctcaatccgtttggaaacatctcttgccagcaatatcatatcgtcatcgctgatctgttccggaactaccatgatacgaacctctcggcctgcctgaatggcaaaagacttgtccactcccttaaaggaattggttatatcttctaattgtttcaatctgtttgtatatgtctccagagtctcacgccttgcaccgggtcttgcagcagatatggtatcagctgcctgcacaatgcaggaaatgaggctggtaggttcaacgtcgccatgatgggattccaccgcattcagcactgtagcagattccttatatttcttacacaggtctgcacctagctgaacatgggtgccttccatgtcatggtcaacggatttaccaatgtcatgtaataaaccggcacgtttggctaaacgtacatccactccaagttctgacgccaaaagtcctgacagctgggacacctcaatagaatgctttaatgcattctggccatagctggtcctgaacttcatcttaccaagtaacttaactaattccggatgaattccgtggatgccaacttcaagacaggctgcctcgccctcttccctcatgttgttctccacttctttctgtgccttctctaccatctcctcgattctggccggatgaatacgtccgtccacaatcaaacgctccaacgcaattctagcaacttctctacgtattggatcaaatccggacaatactactgcttccggggtatcgtcgataatcagttccacaccggtaagggtctcaagggtacgaatgttgcggccctctcgtccgatgatgcggcctttcatctcgtcgttaggaagctgtacaacagaaaccgttgtctcagccacatggtctgcggcgcaccgctgaatggcagtcaccactaaatccctggccttcttgtcagcttcttcctttgccttgttttcaagttccttaattaatttagctgtgtcatgttttacatcttcttcaacagattttaaaagatattcttttgcctgttcggaggttagaccggatatccgttccagttcctgtatcccctgctcatactgggcttccacctctgcagtacgcttactgagaatgttttccctcctgaccagatccgcctccttcttttccagggcatctgcctttttttcaacgttttcttccttgcttaatacacgtttttcataacgttgaagttccgctcttctttccttggtttccttctctaactcatttttcgtctttaaagattcttccttggcttccaggagagcttctcgcttctttgtctctgcggtttttaatgcttcatctattatttcccttgatttttcttctgcacttcctaccttgctgtcatactgcttcctctcgtaattgcgtgcagcaaaccaagtaataatagccacaactatcataacgataatcatcatagggaccattatctgtgacacaggagcacctccttatttaattttcattgtacgaactacaacatattaattttatacttttttcagaattatgtcaagtatcttccccttattttcccgcagagacagacaatatagacaaattacaacagggcctaatcctggttttcagcggttttaatctctctcaataccctgtttatcacttcaaaggagtatcccttcctccctaaaaaggccgccagacggcctttttcctggtaggatgcctcctgttttcccctgagccgcctggccagagcctgcctggccgattcctcctcgtccacaggcgactggtccagcgcctcctctatgaaagacgaatccacgcccttttgctgcatctcatatgccatctggcggcggctctttttccctgcataggagcgcacataactctgggcataggcattgtcgtccaggaaatggtattccttcagaaaatttacagcatattccactgcctctttggggtatcctgccttcccaagtttttccttcatccacttctctgtttttcctgagtcctttaataaatgaagggcatactcctttgaccttggccgcagtatatctctgaggatttcctcatataccccttcttccagctccctgccgtcctctatcctgtaccgttccacctcacccctgtataaaacaaaggcaaagccttcctccaggaagactttgctctttctcttatctacagggatgacggctgtgaccatcataccagttcaggggcatccgcagcaggttcccctgtttcagtttccgcctgttcggctgctgtcttgaaggcttcggctgcctccatggcttcctctgccccgggcagttcatactttgcccttaccttggcctccacctcggcgcagatggccgggttatcagacaggtactgcttggaattctcacgtccctggccaatcttggcgccgttataagcgaaccatgcgccgctcttctcaatgatgttctccttaacagccaggtccaggatatcgccttccttggaaatgcccttgccaaacatgatatcaaactcagcttccttaaaaggaggcgcaatcttgttcttcaccacctttaccctgacacggtttcccgtgacctctccgccctgctttaaggtctctatcctgcggacatcaagccgcacggatgcgtagaacttcagagcacgtccgccggtggtggtctccgggttgccaaacatgacaccaaccttctcacgcagctggttgatgaagatgacaatacagttggacttgctgatgacagcggtcagctttctcagagcctgtgacataagcctggcctgaaggcccacatgggaatctcccatctcgccgtcaatctcagccttgggaaccagggctgccacggagtccacaatcacgatatccacagcgccggatcgcaccatggtctcggtaatctccagggcctgctcgccgttatccggctgggagatgtacagattatctatatccactcctatgttcctggcatatacaggatccagggcatgctccgcatcaatgaagcctgcaatgcctccacgcttctgtacctctgctaccatgtgcagggcgaccgtggtcttgccggaagactcgggtccatatacctctacgatcctgcccttgggaactccgcccaatcccagtgcaatgtccaggctgatggaaccggtggggactgtctcaatattcatgttggccctggaatcccccagcttcatgacggatccttttccgtatgccttctcaatctgggtcagggcagcgtctaacgccttcaacttctcgtctttattcatatcgcggttaattacattactcttctcttctctggccatagtatcctccaatgacttccatgcgaacaaatgttctctaatagttacaataatagtatagttccccaaaaatgtcaacctctattttcccgccacgcccctttttcacgccgttttcatatgaccgccatggtgctctcttatgccacggacggatggctccatagtacttccatactgctttcataccgctgccatattacacccaaaacgttttcccgtctgtcatacaatgtgaattccgggcgaaccgcccccttacaggtgcctgtgcacgcacccctaacgcctgcgcacaaaacgcagtgccaaagccatcacggcaagaaatgccgtggaagtagtatcagaatatcatagaattacgctgattgcaaggatttccgccgggacttcccgggcgcgaagtgcctgccggacgccggcttaccgccctcctgacagcatataataaacattgggtacgaaccgtctcatgattccgccaatcatggcgctgacagccgtcatgaggacgggcatcaggatgaatacagccagggcaatgaccgcgctcccttggaaggcagccgcggctgccttgttgataagccttacccaggcaaaatgaatggcatacaggaaaaagttatgcttcatccactccctggcagccggaaggtccgctgccttcacagccaggacagcaccgcagactccccacagcctccagcagacgatgcaaagcgggcgctcccacagcaggcctccgatgcggcccaggtacaaaagaaggcccatggccagcaaaagaatggcgcctgccgccatattcttcccggcaccggatctttcctctattccccttccccaggtatccctgtgaaggctcacccaggcagcggcacagaaataaaacagagcgtccagattaagaagaggcatggcccagttcttccaaagcccaaaagccatgattcccagggcagcggcgcctgtgacatttccccgcatcaccgtgtaaaccaggggcgccagggccaccagtataatcagctggaacagataccagaacaccggattataggaatagaacacaagtgcgtcaaagagccggggcccgttaaagggtatgggcgtctttcccaccaccccggacaggccgggcaggcgtgtggccgccacataccccatatagtaaaggaaattccacaagagatagggaagaaccaggcttcttaacctggaacgccactttggaataagcttctcccagcaaaaaccgcgaaaaaacagataggaggacaccatgaaaaatcccggcaccgctatctgccccagtctgtcccccagtatacgctctatccctgccaccttaaaggctgcctccggggtccctataaacagttccccattaaaggagtgcacccacaccaccagcaggctgaacaggaatgtaagccaataaaccttgtcgcggaactgcttttcttccatataatattcccccctgtcccataacaaatgccagatatccaaaaaggccgcctccatgacctgcctcaagcgccgcagcataccccggcaggcagatataggaaaacggccttctgtcctttacattgcgttcctgttaactgcggtactgagccagcagccggttgatccgcttagtaggcgtcagcaaatcgctcagggatgcgtcatgattaaggttgtcgataatgagggcgatatacttgctcatatccacattaatgtagtagggtctctcaagaagatccggagtctgatataccaggttcgtggtcagtatccggtcaatgattcccttatcataatactcgtcaaactttgtaagtccccctgtaaacagaccaaaggtagcgcacacaaaaaccttcctggccttcctgcgcttcagctccttggccacatccatgacactctcaccagaggaaatcatgtcgtcgatgatgagcacgtccttaccctccacgctggctcccaggaactcatgggccacgatgggattgcggccgcccacgattttcgtgtaatcgcggcgtttatagaacatccccatgtccagccccagcatattggcaaaatacacggctcttcccgtgccgccctcatccgggctgatgaccatcatatggctgctgtcaatctgcaggtctgtctcattctttaaaagatattttaagaactggtagatgggctgaactgtctcaaatccccgtaagggaatggcattctgaaccctgggatcgtgggcatcaaaggtaatgatattctccactcccatgttcaccagttccttgagcgccagggcgcagtccagggattctctcccggaacgcctgtgctggcggctctcatataagaaaggcatgattacattaatcctgtgggccttgcctgccgctgccgcaatcacacgcttcaaatcctggaaatggtcgtccggtgacatatgattagtcataccgaacagggaataggtcaggctgtaattgcatacatctaccatgatatacaagtcgtcgccccttattgactctgtcacaagtcccttgccctctcccgtgccaaacctgggtgttacggcattgatgatataggaatccctctgatatccggaaaatgctatggtagacttgtgttcactttccctctcccgtctccagtccaccagataggcatccaccttattgcccagttccgtacagctctttaacggaatcagtcccaacggacccacgggaatggtttcaatgattttctcctcatataacatggttaacatcctcctgttttttgccggaggcctctctgcccggaccggcatatacttttataccatcattctccatgattcgtcaaggcccttgtgccccggaaatgccttaattatacgttacttttttaacagtctgatatctcctccatataatgggataatcctgtatccgctcatgatcctggaggtaacacggtccgtataggaatccctgagccgggccagagtcaggttcgtggatatgatggtggaacggctcatgttcatccgctcattgatacagtagaacagccgggaggaagtaaagctgttgtttaactccgttcccaggtcatcaatgatgagaaggtcacagtccagaatgaaccggtacatgtccttcatgtcctccgcattatcataatcaaacttattcctggaaaatacatcaaagagatcgctggctgtcagataaatgactgaatggaaatcatccatcagttccctggcaatacagttggtgaggaacgtctttccaacgcccgtgcttcctgtaaacaggaggttatcgtgtttcttatcaaaaacccggacaaactccttacaccccgccactacccggcgcatgtaggccgcattggtaatacccagttggggaagtatctccgtatcatcgtagtactcataactcagagccttaaaattctcccgttccagcacatcctccagattggactgggcatgaagcagcttcatctgggcctgaagaaaacaatggcacttacggccgtctacaagccccgtatccctgcagtccggacagcggtaatgtagctccaggtaatcgtcaggatagcctgccgccctgatgataagggccttctgctcccgcagatccctgaggtcctccttcagcctgtccaggacacctttatccccttccagcagctttttggcgcacgccacggaacgctctgcgatttccgcttccaactgttttaccaccggcagcctggcataaatctctttacgcctttcctccagtttgtggtggttctcgatctgctgccttccatactccctcatgattgcgtcgtactgggaattgctcagtgccatggttcactctccttatgtgtattagggctgctgccccacccactcctttacctgctttaaaaccagtgcatcataatccgtatccctctgtttaaaattatggaactgattggatgaattctttctggtccctgatccctgcctggcggatgagacgccggagtcatacttctgcagcctcttctccctggcttcaccgctctcctccctggcagccgtgcgctttgcgtccaggtcctttatatcagtcaggccccggatgccggctttctgccagtctgacaaaatcttgtccgcatactggaagctggggttatggatggccgtaatggtcctgttacacgcttccaataccacttccctggaaaatccatagtccctgaaccacttgtccatcagcttctgctccggtgcggccggtttcctgctgttgatgccaaatgccttcataaccgcaaaggaatcacggctgtaggaagcgctgtaatccttggcctccagcgctgtcctgattcccttctcatgccagctcatggccacggtctccatgtaacgcaccgatatgtggccgttctgcacgcagtattccaccagatactctaaaagctcactgctcatggataatccctcatacagataggcaaatacctggcagtccctgggggtaaataccttgttcatgtacttctgggcaatatagagaagctgggaaaactcctcgtcctgagccagacggtttacctgctccgtggaatacaccggaatacagccgtcctcctgacccgcggtttccgtgcgctcccggactcctgcctgctcccggatgcctgtcagcccgcggacatctgcccgcccggctgtcccgtttttcctctgaaacgcatcaacctccaaatctgggaccgctgcctgttccctgtcctgctcacgcgtaaaggtacggcccccggactccggacggaccggttcaccctgaacccgctgttcctgttcagagtcagccagcacacccgccttcttccaataggagagggctctgcgcacatctgattccgtatggtttagggcatccgcaatcaactctatggtgatatcctccccctgatggcggagcacatagaggtacaccttcacatattcaccgttggcagcagccatatatgtatcaatgaattcattggccacagccgtgaccggaacactccatctatccttcatatttccacccatccctacaccactccttgcttcattctatcataacatatccactaccaaaagaaaataggcgcggttttgcacactctttgttgtggataatgtggataatgtggaaaaatggtggacataactgtccctgttcttcataaaactccatttttaccgtataaatccaagattttttaaatcgtgcgacatttttttatgttaatcaaaaaatccacatagtttctttacataaaatgttgaaaactatgtggataatgtggataactattgtcctaacagcttttcccctacttttacaatgtctccggcccccatagttatcaacaaatcgccgttcatacaattttccaaaataaatgtctcaatctcatcaaaggacggaatatagtgggccttcgtgcccagcttctcaatccggtccgccacgtcccgggaactgacccccagggtatctgtctcccgggctgcatagatatcagccagaatcacttcatccgcggcggacagagcctccgcaaactggtccaggaatgccctggtcctggtataagtatggggctggaacacgcaccacagcttcctgtgaggataattccgggccgccgccagggttgcctttatctcctgtgggtgatgggcatagtcgtcaataaccgtaacacctgccacctctccctttttctcaaaccgtctgtccgtgccagtgaattttcccagccccgacataatggcgtcaaatcccactcccagctccagtgcgatggcaatggctgccagagaattatatacattgtgctctcctgtgacgcccagagtgatgcggctcactgcctctccctggattaccaggtcataggagggcctggcaaacccgtcatatgctatgttccgggccgtgtaggtgctggaaaggtcctttccgaaggtaaccactctgcaattgaggcccttggtgatttcctccaccttctcaattccgctgtttaccaccagaagtcctttggcgggaagcttgtcggcaaacagacggaaggaatggcgtatgtcctcaatatccttaaagaagtccagatggtcctcctcaacattcagtataacctccatggtgggataaaaggacaggaaactgttggtatattcacatgcctctgtcacaaacaaatcaggaccgcccacacggatgttgcctcctatgtcctttagaatacctcccacagagatagtgggatccaagtcccctgccaggaggatatccgtgagcatggatgtggtggtagtcttaccatgggttcctgaaatggctatggcttctttgtaattgcgcatcagctcccccaaaagctctgccctggaaagcatgggcagcccctgatccctggctgccctgaactccggattatcttcatggatagctgccgtatacaccaccacgctgattcccggctccctctcaatattggccgccctctgcccgtaatatacccgtgctcccttcttctcaagatgctccgtcagggccgtctcatgggaatcggagccggatatggaaaatccctcatccaaaaggatttctgccaggccgctcatgctgatgcctccgattccgataaagtgtacatgttctggtttattaaaatctatctgatacataatcaataatccttccctgtgcctgtcatacattttcctgcacaaaaatatctcttccttattatatcaaaaaaaaatcgaaaagctatataaaaaatggagaaataccggatctccggcattcctccttaacagacctgatataggatatgtgctttggccgcggcttgagcctgctcacccgctttccaaaacgtttttgcgtattaaattaaggagaggcgccgaatcccggtcctctcccaattgtttcatatttcttgtctcctgacagcgactatgccgcctgctgcctgaaaaccaggtttttataccgctcaagtgtaatcagcagcgtattgcccagcacgccgattgcgagaatctctccgattccaactgtcaccatggccataagaatcatatcctcagaaccataggcatatcgtaacacccatggaatgataatggtgttggccataattggaggaatgcacacgcaccacttgtgctttctcagataccatgaaccggctgcgccaataagcgtggccaggcttccgaataccacgtccaggggcatggccccgcagagcaggttggaaagcaggcagcccacaaatagtccgggcacggctgccggcgtaaagaacggcagtatgcaaagcgcctccgcgattctgaactggaccgggccgaagctgatgggcgcgaataccatggtaagcgccacatagatggctgcaatcatggccccctgggccagtccgtacagtttcctgttgttttgtctcatattctgttgtctcctttagttttgttttaggtgtggaaggtctcgaacacaccagtcgtttgttgcagattgtcccggaaatgctgataatgacagggaatctgcggccttattgcaggggatagtgtagcatattttgggcgggaatgcaagccgtacccacaatttacccacaatcaaatatccgcatcaaaaaaaggccagttccccggcccttaaaacgcttttgctatcggctccatttaatcataatctcctttcctggtatgtggccccggcagaggctctatgtaattgccgttactcccctctgccggatactttgttttctcagccctatacgcttacttcactgtgaatctcatggtctgggactggcccatgtatttctggtagagtttcggatggtcggcggcaaatgcccttgcattaaacttattgctgataacagccttgaatctaaccatccagtcacccacctctgtttcctcctgtcccctggcctgcaactccttcttgatgtcctcctgcaggagttccatctgcttttcaatggctttcttttgggcctccaggaccttaaggtcattgaccttcttaagtaatgttctctctgacatagtgtgctctcctttacagcccctaccagtcttgcgtgtctattgcttgtggctcacaggtacgactggtaagtttgtgggggattgtctgccccggctgcttttgttttctgttccttgctatgtatatagtatatatctattagcacaaatagcttattggcatgttttatatatttgcgcaaatatatttgtgaaatttatatatttacgcaagtagataacaatgatacaatatggatataatgaaataagtgtctttgtcttttgtcgcccactggaaggaggaatataaacacatggcagaggaaagcaaaataagcaaagcccaacaaaaagcagtaaataaatatataagtaacaattatgatagaattaacctcactgtaccaaaagggaaaaaaactgacatatcaaaacacgctgaaatacatggtgaaagcttaaatggttttattaatagagccattacacaaactatcgaatctgacaatacctcacaggaaggagcgtaaccctatgccattaccaaaagaaagagtctataccattgacgatatttacaacttgccgaatggagaacgggcagaactgattgacggtcagatttattacatggcaccaccgaacactacccaccaaagaatatctacctttctacacggaaccattttcaattatatcaacagtaaaaacggcccctgtgaagtattccatgcaccatttgccgtgttccttcaggcagaggatgaaaagaataatgcaaactacctggagccggatatatccgtaatttgcgacaaagacaaattggataataaaggctgccacggtgcaccggattggacgattgagattgtttcctcttccagccgacaaatggactattacaaaaagctggctctttatcaaggggcgggggtacgggaatattggattatagacccagccagggaggttgttatggtgtatgacttggctaacgaaacaccacccaccatttaccgatttaccgattctgttaaagtcaacatatatgaggacttttccattgactttagccaatttagactttgataccatccacattgcagcagagccgccctcgccctgctgctttttatccctctgcctttctgttgacccaataaacctctgtctcatgctgtcgtgtttcacgtcacccttaagggtgttccctgttttggggtatactgtgctatccatgccgcaccgggcaaaagcagcattatcttagagccccagtgcgtcccgtcccccattctatgggatccggacagtacaaagctgttcaagggccgctaaaggccctgtccaggcccgcatgaacactgctttatataccgtgttcatgcgggcctgattttttctaatcttctgcctaactaccgctgatcttctgccgaattcctctactctatcgtccacttcagcaaatgctttttcagcagctcaaatatctgcattacgattaccagtacgattaccataaaaacaaaaccaacccacgtattggcgaaaatgcctaactccgcatacttcttcacgaaatatcccatgccctgacctgccccgtacatctcagcaaaaaccagcataacaaaggaactgcgcagggaattgacaaatcccgccagaatggatgggcttgccgccggaaggatgacctttatcagtctcttaaacccccgtaattccagggtggcggccttgtccagatatcgtttgtcgattgtcatgatacctgtaatggtggcaaaaagggttgcccacataatgttatagacaatcagaaaaacggacgcagaaaacaggcttggagccatgagaagtacaaagggggacaagagaatagatggtattacgctaaaagcgtaaatgaccggatacaggacttcccttacccttgtattcatccccatgattgttccgaggaacagggcaataagcagcgaaattgtcactgacggtatcagcagcttaaaggatgccagcatattgcctgccatcatgccgcggcttgagataaatgcctgtttaatcgcgtctgctgatggaaacagatatggattcaccagtttattttccgtcacataaacatacagcagcaccagccctgagaatatgcagaatgtaatccaatattttttaataaatgcccctgccttattcatgtccctgtctccttaaccgctcctcttatttgtcgttctcttcaaagaaggttttcatattctggtagaactcaggcgcttccccgccgtatgcctctgccgcttctccaagggcttcctcatataacttcgtattgatatggtcatcaatattgatctcttttgccttttcatctaagaatcctgttttgtcaagtatatcccacgcccgctttacaaaatttttaagggggtcaacacttacaaaatagtgctcgtcatccaacatataagcagccacatattcttccgtggccttgatttttgcggcatgtaattttacggcctcctctttattgctctcataataagactgtgcccgtaacaatgcgcggataacggcttttactgtattgggattatcatttacccattgggtctggccttccatcctgcagcaggaataattctccatgatttcactctgatagcttacgatgtcgatttccccatttttcaccatctcctgaacggccaggttctgtcctgtacccataagcgcatattctacatccccgcggattacggctgccagggcgtcattgtaatcggaataaatttcccagtccacggcctcaaggggattatcatagccaaggtccatcactgcgcccgtaaacgcaaagtagcttggattcaccgccacctttttgccgataaaggattcgattccgttccactcagcaccggctttcgccacaaccggcatacagccttctaccatgtggcctccaaagattgtcaggtccactccggacgcaatctgctgcagagggttgcttgttcctgcattcgatacaacatccaccttgcccgtagccagcagcgtcattgcgtcggcattggcattggcctcaacgtactcaattgtgattccctcgtctttcagatatcccttttcctctgcaattgtcagaagcacattaccgcttgttccgcagttccattttaccacgctctgctccggcgcgtttccaccggaagccttttcatccgatgctgcctgttcctgtgtattctccccaggtgtttcttttgatgcggcctcactttccgcggtctcctttgacacgctttggcctgctgatgtctcctctgtttttttgccggcattgttctctgccgtgccggcgcaggccgccagactgactgtcatagccgctgccagaagcactgtaaaaattctctttttcatgactttttccctttctgttaccgtatatttatggttataggacctgacagcagatcagctccctatccatcttctattcaatgtggtctgccacatccctgttaatctggcaaatcaatttggtgcgcatcctgagcatttccatgttctcaaactgtgtctccctggtggggcgtccgtcttccggaatcgcgcactcgtatataatgctgcttggcgattgtcccagcacgataatgcggttggcaaggagcattgcctcatctacatcatgggtcacaaaaaacacggttttctttgggttgtcctgtgcccacagcttgagcaccaggtcctgaagtctggcccgggtcaccgcgtccagcgctccaaacggctcgtccatcagcaggatgggcgggtccatgctgaatgcctgggcaatggcacacctctgcttcatgccgccggacaattcctttggcagcatcttatagacggattcctccagccccacttccagcagcatgtttatggcagtctgctttagctcctgctttgtccttcctggaaaacgctgttttaatgcaagcaggatattttcacccgctgtcatccacgggaacaaaccgtaatcctggaatacaacgccgcgctccagactggctccttccacctttttacctccgattaacaattctccggacgtgggttttaaaaggccggccagcaggcgcaaaagtgtgctttttccgcacccggattgtcccagaatacagacaaattctcccgcctgcacctctatatttatatcctttaaaattaatttcccgttgtcttcatacgaaaaagacaattgatttattttaatattttccatatccgcaagtgtcactctatcctttatcaaacgtgtttcagggccctgattatattttgcgccgccagttcaatattttccttgctggttgcaagattgacgcggataaatccgtcatatccgccttcaccaaaccagcttccataatccactgccaaaccgcatttgtcctggataacgtgtttcatgtcctccggctttatgtatctgcccaaatcaatccacatcagatacgttccttccagctcggaaatccacacatccgcaagcgcctccaaaagcgcgtttctcatatagcggtaattggcctctatgatatccagtacctgctcaagccagtcccttcccttttcataggcgctttgtaccgcaatataaccaaatgcattcccgccattaatccgcagccgttttaaatactggtcatacctgtcccgcagtccctgatccggaatgaccaggatggaattctggcaggctgccaggttaaatgtcttggtccctgccgtaagtgtgaccagcatatcatcgtatgtccctgtggtggcagctacaacatgctcatggcctttcatgatgatatcctgatgaatttcatcggagataacatagacatgatgcttcttacatatatccagcgccctttgtatctccccggacctccatacccttcccacaggattatgaggggagcacagtataaacagctttacgtcatgttccatgattttctcttcaaaatccttatagtccatcacatacccattttccgtacgtacaaggggactttccacaggctgtctgttattattaaggattgcgtcgcggaatggataatacacaggaggcataataataactccctcctgttccctggtcagtatatgcatcagccagttgacggcaggaacaactccgggagcaaaacgcatccactctcttttcacctgataattgtgatatgtttcctcccaccggataaatgcatctgcgtatgcatgaggcgtattataatatccgaacacgccgaaatcagcgtattcctttatagcgtccttcacacattccggaacctcaaaatccatatcagccacccacaaaggcagcagattctcattgccgaatttctccccgcagttatcccacttcatggagtttgtattctttctttccttataaattatctgattcattctgatcctcttttgcattatcgaattattgtttgcgatatgcattcaatttagtttactaataaaaaaattgtttgtccaattggatttttctatgtaacggttcttacctgtaatgtcatttagccccggtatatccggcgtattctcatgtatcttcctgctgtaatccggcttgatgtaaaaaaaggacatgaaaaatgccggtacgtgaatccatatccacataccggcatctctttgctttattcgctttttttctttttgttaattatgttctccgcagctgtgtccgtgtccatggcagttatgctccccgccctcatggtgatggctgcacacggtatttggatcataaaccaggctgccgcttaacagcgcctccactgcctggtctgcatccccggatgcgcctggatacagttcaattccggcctggtccagcgctgtcctggcgccgcctccgattcctccgcaaatcagcacctctactcccaggtttttcaaaaacacagccagggcctcatggccgcttccgccggttcccactacctgagaggacaggattttcttatcctctgtgtcatataccttgaactcctctgtatggccaaaatgctggaatacctgtccgttttcatatgttacagcaatcttcattacaatctcctcctggtttgttattacagcggcgtctgcggcatccgagtttcccgcagttcttcccgcagcagtttcctccgtccgggcacagctggtagttgcctccccggatttccagccttttcccattgaccagacagtccgccagctttttcctggctgaattatacaccgcctggaccgtggttctggccacccccatctggtccgcgcactcttcctgggtgcagtccagccagtcaatgagccgtatggtctcatattcctccagcgtgagctccaccgcgctgtccatctcctggttcaaaggaccaaaggtgtctatggtgggcacggagcagattcttctggccttgtacggtcgcgccatatgccttctccttatccgctgtcttactttgtttttgacttatgtcaataattataaggctgtttatgacatatgtcaatatccattttgcctcccgtcctcattttacagtctcaattttgcagtcccgcttcccggtctcaactgaccgtcccaatataacagggccgtcccctgcctcatacaatgttttgtgcatgctgaaagcccttgtgcgaggaaatcggcatttcatccttacggaattgaaaatcatggcaccgccatgattttcacagagtggcgacttggtcggcactctggccgtcttatgaataagacggaaaaaagacctgtcccatattacccgtcagatgccccagtcccaggctggtaaccatggcctgttcgattcccgccatctgtccggaatccagatgtcctatgtattcctttaaacggttccggtctatggtgcgaatctgctctgccagtacggtggaatcctgctttaatccgctgcgcatcctgcggatacacacatgggtggggatggctgccttggtggatcggctggtgatggccgctacgattacggttgggctgtatttgttccctacatcattctggatgaccagaaccggccggactcctccctgctcagaccccactaccggcgacagatccgcataatataaatcccctctcaaaatggtctggtgtgcgtcctggttcatattcttgttctctctatacatatcattacctcgctgattcataaatggtgttttctaatggagagtatcaccatccctgaggtaattaatcatataagggacaaccttttttattatcctgcagaacgtatttttacacatgcctgacagctcacgttttctccacccacaaggcttctcataaaaacagcacatatgctgtcatcagtatgagccctgctcccagcatcataaatccatatcccatgctggaataaatcatgtgcagaagccttacatcctgggcctgcctgaaaaacctgctggattcccccggtaccaccacctgatttttttccggttttttcatgaacagggatagagggacttcgcataccccattgacacatctggccagcatggctcccaaaaagggcagcacggtaagaaccagagggcggtacacccggtcctccaggttcagccatgccggccatctgtccacatagatcctggtcccgtcctcccctgtctccataaggtatctgcggataagcagcacatacaccaggattcccatggaaatgctgatacaggcccctctgagattggcctctgaaaaatactccacctgatgcaggacatgcgccccccttaaaaacggacggctgatatctgccatccagtccataatccggtggggagccatccccataagcggaaggaaaagagcggaaccgcccagggcaaaacaggcagccgtgcccgcgtacttctttcccctgtcatccccgtcccgtcccaggggagccttttccagaaaaatggccgcaaacagctttatcatgtaggcggccgtaagaccgcccgccataaggaaggcccactccagtacctgaaagggcaggacattggcaccctgtctgcccagcatttccatatactccacaatactctcatggagcagcgtcttactcacatacccgttccaaagcggaatgccgcatatgccatatgcccccatggcaaagattagcatcaggaaaggcttgttccttccatatccccgaatctcattcagatccagcttgtgcaggttcatataaatacatcccgccgccatgaacagcaccagcttaatcatggaatgattcaccatatgcagcaccgttccgctcacagccagtccgttttcctcacccagcagacactgcatggaacaccccgtaagaatgaagccaatctgggacatggaggagcatgccagggtacgttttaaatcaatggaaaaaacggccagtattgctcccagcaccatggtcacggctcccggcgccaaaagcaccattccccagaccctgtcatgccggaacatggtcacggtaaccatcaggatgccgaacacccctgtcttggtcaggatgcctgacagaagcgcgctggcaggcgccggcgccacaggatgggcattgggaagccatacatgcagcggatacattcccgcctttgccccgaatccggcaagcagcagcgctcctgccagatacaggggccatgttccccccgtggccttcctgaactgttccagactatccatggaaagatttcctgttcctgccgcaatcatgaatatgccaaacagcgcgcacagtccccctatgaccgcaatggccagatatgtcctggcagcccttcccgctgccgctgtctcctcctgtatgaccatcacaaaggaggtaagacccattatctcaaaaaacaggaacagggtaaacaggctgtcggacagaaatacgcccattgttgccccgcaggttaaaagggaaaagaaacagtatctcccgctattgccgtggcaggcaaaatattccatggaaaacagagtggtcatcatccacatgaaggctgcgatggtactgtacagccacctgaatccgtccgccttcagccatatgcccatctcgcaaaatccggcccacgaaaaggccgccaaaccgcttccgggataaaggcagagcatgcccgtagcttccataaccatggcggccgacgcaaaaatatcccggttcctctctccctttttttccgcaaaaaggctgataaaggccgccagaaaaggccaggccacagcccacaacagccatacatttccttccattcccgctacctccttcattcttcctacaggcctcctgccgcaatccggttaaacacctgaatcagaggacctgaccacaggcccagaaccatgctcatggcagtaatggcaatcagaggaagcttcatattccagttggggtcacattgcgtattccaatggggatcttcccgcccctctgccgggaaccaggcggcccctataataagcaccatataaaacaaggtaaaaaaggcggatataatcagggataccactcccagcattcccagaccccctgcctctgcggcagctgaccccagcatgaatttgctcacaaaacccgcaaagagcggaacccccaccagccccagtccggccagggtaaaacaagtcatggtgaccggcatggcccttccgacgccgcgaagctcatacacatactcccgtccccccttgtacaggatagctcccgcgcagaagaacagggtaatcttcatcagggcgtgacataccatgtgggtcagacctgcggccagacccgcgggagtcataagcatgacccccatgaggatataagacagctggcttacggtggagtaggccagtctgcgtttcagatgctgggtgcaaagggccctgagggatccatagaggatggcagcgcagcagacgcacaggaccgccgcctgtacctttgtccctataagaaattctgccccaaagcaccagtacaccacccgcatcagggcaaacacgcctcccttcaccaccgccaccgcgtgcagaagggcagataccggagtgggggctaccgatgcggcgggaagccagctgtgaaacggaaccactgccgcctttaccccaaaaccaaagaaggccagaatgaatgcgccgtacagatgacgccgttcctcgtgggacagcccctgggcagtcacgccgccccaggtaaaatccagggtggttccatattcatgaaggctgatgatgctgacaaacaccatggcagcccctgccatggagagaagcaggtatttcttgcccgcatatatggccctggtatccatggcatgcatgaccagaggcagggtagccagggtcatgagttcatagaagaagtacagggtaatcaggctgtgtgacagtgccactcccgccaccacgccatatgtaatggaaaaatatccgaaaaacttattttcctttccctcgtgcttcatatactcaaaggaatacagtgtggtcaggggccaaaggactgcaatgagacaggcaaataccccggacaggccgtccagtcccagtgatatgttcatcttgccgccaaagcggtacagcaccagcggctgtttggggccgttcaccaccagggccccaatcacagccgaggcagccagaattccccccattaccagtatctcccttttcctgcgctcctttggacgcagtccaagcacagccgcaccagtcatcacgggaagaagcacaggcgccagcagataatatggattcacaatcatcccccctttcacaccatagcagaggcaatgcccctcagtaattcaaatacaggatttcccagagcgcccagcaccagcagggagatacccagcactgccaggggcacctttataaacacagatacagccgaggcgcccgcacaggacctgccggcctctgatttttccgttttcttccagtcctttcccggaaaaaatccctccacaataacaggaaacagatacccagccgtcagcagggcgctgacaataagaaccacaggccccagccatgtaaaaaggcctgcctctgtcctcatggcgcccacggccagatgccattttgccagaaaaccgcctgccggcggaattcccaccagtgacagggatgccagggcaaagcatatcatcacagccggcatccgccttcccatccctttcatctcctttatcctgacgcatcccgtcttacaaatcacggcccccgcgcagaggaacagggcgttctttgccagggcatggaacaccatttggagcagggagccgtaaagcccttccatggacagcaggaatatgccgaacagcacataggacacctggctgaaggaggagcaggccagacgcctcttcagtttcttttccttataagccagcatggaaccggtaaatatggtcagcacggccatggacaaaagggcatgctgcacccacgttccgcgcaggaatgtgggaccggccataccgtacaccacccggatgaccgccaccactcccgcctttgtaatcaggcccgataacacagcgctggcaggcgcaggcgcaaccggatgcgcgatgggcagccacggatgaaggggcataagacctgccttgcaggaaaatccggctgccatacagaaaacagacagcagaagaatctgaggcctgtcctgcgccgttcccacagcctccaccaaaaccccgcccgccttaaaatccgttccacaggcatacaggcggaagaaaaagtagcctcccagggcaatggatgcgcccagcatggaataggccagatataccattccggcgcggagcgcttccctcttcccggaatgaaacaccagaggaacgctgaaaaatgtcatcatctcaaaaaacaggtacagggtaacaaaatttcctgcataggcaactcctgtcagggctcccagggacataataaggcatccgaaaaagcgcgcttcttccctctcatgttccatatattcaaaggcgaagaaaaccaccagcacccatataagggatgccagaccggaaaacagggccccgattccgtccagccgaaggcacagctccatgcccggaccgatgttccacaggagcagccgcatccccaggcagttcaggatgacgagccatgaacagattgcctctgacagagacaggaccgcagcggctgtccgcattttattttggtccggattccatatccacagggccgcaccggaaatcacgggaaacagcaccggcgccagcatccacatttctctcatgtcctatgttctctccttttcatatattcccctgctgccagggtcacccaaaattggcaagccctgtctctatcatcctgaccacagggccgtagtaggtcccaatcagcacatttccggccataaagcaggccatggctgccgtaaaatgaaagtcccttacaggctctcccgcctcaggcacaacagcgttctccagtcctgccgcctcatagtccgctttctccggcccgctctctgaaaacacaatgatgatgagaggtatgtaatacatggcattgaggactgtactcacggccagggcccccagcaccagaacagcccggttcaagtcatggaacgaggccattgcaaaggaaatcttagaaatgaaacccgaaaaaaagggaatccctatcatggccatgctccctaccaccagccctgctccggctgccggattccgccttgcgcttcccctcagggccgctatctccttctggtggccgcagcagtccatgaggccgccagcagctgtaaacagcatgggttttgtcacggcgtggacaatcatgtgcagcactgcggccgccagccctgccctggttcccatgccgattcccatgaagatatatccaatctgggcaatggatgaataggcaatgacccgcttgaccatatgctgctgcagtgccctggccgaaccaatgaccatggccaggattccgaacacaaaaagcagatcatttattcgcagccggataatcaaatccattcccaaaatccgcatatagaccttgagaagcaggataatatatcccttcagaaccagccccgacaaaacagagctggatgcggctgtggcattggcatgggctcccggcagccaggagctgaagggatacagggcgctttttaccgccagcccggaggtcatcatcaccagagccatcttaaggggaaataaatcctttccggaagacgccaaatccctgaccttccctgccatgggttccataagcagatggcctgtctggcagtataaaagggcaatggagataaggataaggccgcttcccaccaggctcatgataagatagcgtatggccgccgccacagtctcgccgctttcctttgcgcacacaatggcgcaggctgaaatggtattgatttctatgaacacataagcggtaaaaaggtcattggtgtagacaagggccagaagggaactgaacagaaggttcatcataacataatacagaccggcccgctccgaaggtatgtcgtgttccagagaccgtttattggcagccaccgtaaggaacattacaagggaaaagaccaggctcatgagggcctccagagcgccggccctgacctcattgccccagggcgccggaaaatggcccatcatgaagcaaaaacaggtaccgtccgacgtatatcccagaagcaggccggacatcactgccacggctcccaccaaaaccatgtggagaaccctggcccggttcccgccccccagaaggggcgtcacgattccccctgccatcatgatgaatatactgaaaaatggaatgttctcaaccagcctcaccgtctgtctcctcctgtccttcatacagcatgccgtccaaatccagggtcttgtaatagtggtggaatctctgtatcagtgaaaagagaaaggctgacacactgacagacaccacgatacccgtcagcaccagaccgccgggaaggggattgatgaatccttccacggctgtccttccatctacaatcggcgcccttccaccggctatgtaccccttggccgccaagaacaggtacacggacatatccatgaggttcagcccgatggcctttttaatcagatttttctggagcagcagcatggtaaacccaatggaaaacagaatcatggccgctgtctcgtagtaattggtcacaagggcctgcatcatcacacctccccttcccggaacagggaataaaagcaatacatggtccctgccaccaccagccccacacagatattcagaggcagtatcagccccgcgctcaagatgttccccggcttccccaaaggtatgcccgactccaggtggttggctcccataaaaaaggaatagccttttgagagggcgtataccatcagcgcgctgctgctcaccacggtaaaggttttaaagctgaaaaaacgatgaatccgccggtacccaaatgcattggcatatagaatcagacctgcccccataaccgtccctcctgagaacccgcctccgggggacagatgaccgttgagcaccacatacaagccaaacatgagaataaaggggaccagcagcctggccacctgttccagtatgatatccctttcctcatccctttcgcattcccttccccctccctggtctgccctcccgccggacccgctcccggatttacggcgcatgagggctatgacgctgacggctgacaggaataagaccacagactcgccaaaggtatcaaaggcccggtaatccaatatgatgcctgcaaccgtattcacagcccctgtctcggaaagcccgtcttccagataacgtcccgccacctcattgttggcgggattgtccgcggacccaaaggccggcagatgggataccatcatgagaagaaccgccatgcccgccagacagactacctgtgcaacagcccggtagatactgccgaatacacgcagggcatgctcctgcgtgtattccgtaaaccgccggcccatattccgtttaacactttcctttttggcctgccccgcagcacgggcaccttccgccgctccatgggcaccttcctcatcatcccagtcctgtccgttctccacccagtccacaaatacgcgcagaccgcgcttacctatgtcctcactcactgtcttccccccttaacccgttgaccttatacagtgtaatgaaaagaagaattcccgtaacccctgcgcccacggccgcctctgtgacagccaggtccggggactgcagaatcacccatatgatgctcatgataaggctgttggccataaacagaatggccgccaccagcaggtttctgcaaaggaatacgcttaaggagcaggccatcagaaacagcagcaggatgatctcaaccaccttcatattcagacaccccgcattccttgccaaggtccggattgctcccggcctccgccctggccaccatatgcgaggcagccgggttgccaatccagataaacagaagaatcaatccgattttcgccgattccatattccacccgttggagatcataaggcccgccagtatgagcatgcttcccagggtgtcacatttggcagccacatgaatccgattcagcgcatattcaaaccggaatatgccaaaggttgccacgcagagtacaaacactcccagtatgataaaaattcctcctatcaccagacccatcacagcaacgcctccttttcctcattttccttttctgccgtaccgctccctcccattcccttttcacggctcatccgcaggcccagaagctttgtcagcaccacaaaggacaggaaactgataagggcatatataaggcagatatccaccagatagtcctcatggaatacttttataagcagggcaatcatgagcacggtcttggtccctatcatgttgatggcaatgagcctgtcggagaagcgcggtcccagcacggcccgcagaaggcagaataccatattgatgctgagtatgacgactgacagaatcaggacacctgtaaacatcccttccgccgctgcccccatctttgcccccatagcccttcctcctttacgttatctcctctatccgcgccagctgtcttgccacatgccagtccttgagcccttccgccatctcagcggtcagtgcgtggacccacaacacatcatccttcacatccaccgtgatggtgcccggtgtcagggtgatggcattagccagggccgccctggctccggcgctctttaagtccgtcttaacaggcaccagacagggcgtgatctccatgtgaggagacagcacaatgcggatgatggccacatttgccttcaccacctcccataccaccatggccaggaataccaggacatgccccagccgtttcagcagaagcaggtctttggacagccggcagtccagggccagatacccgaatccgtataccagacctgccaccgggactcccaatgtcagaatctcagccgtgactctgccgtttaaaagaatccacagaagatacagcaatacatacattttcttttcatcccccttggcttcccaaaccgcaaaggactgccgcctgttatagcagcagcccattcctctcatccgggagtaccggtcagcgttttacaaaatatccctctttcatgattacgtccatgttctcaacagcgattgcacggatattctctaacgggttgccgttaatgactaacaggtcagcactcttgccctctgtcagggagccggtcacattatcaaccttcagcatctcggcgcctgtcttggtagctgccacaatggtatccatctcgctgatgcctgccttttccacaaaggaatacatttctccgatggctgttgttccgtatggcgtaagactggagcagaaggagtcggaaccaatggtaagaccgatgccttttgcctttgccttccttaaattagcgtatacgcggttcagctctttctccgctacggtattgccaggatactggtcatgtacctccgggatgtatggcggagcataagtcttaaaccactcatttaagaactggatggtaggacagaaatagatacccttctccgccatgatgtccaggcactcgtcatttaaggtctggccgtggataatgagatgcacccctgccctggcggaatccagggcgccgccgtagccctctgcatgggaccaaaccgggattcctaccatgctgcactcatccaccactgcctgaatctcttccagtgtgtaatgctggtctagcttctgatcccagcgccatatgccgccgcctgtggaccagattttgattgcatcgggattctggcggagtcttcttctcactgccttgcgcagatcccatggtccgtccacacgctcagcccatggatgggattcgtcattgtagtagctgggaagcttgtgggaatcgccgtgtccgcaggtacggcagaagccaagtccggttgccactaccctggggcccttcatgacaccggcctccaccatattgcggatttggataccggaacgggaaatctctccaaccgttgtcaggccgttctccagacactcgtgggcctgctgtaccgccaccactgtcttctgaaccacatcctccagcacccagtcgctgtcatcgtctgtcaggtttcctgaaaaatgcagatgggagtcaataagccccggcataatggtctttcctgcaatatccacaacctcgtagtcaggtccgatttccctgtccgcaccggcatatgtaatcttgtcatcctctgtcagaaccaggctgttcgccactggctccgcgccggttccgtcaatcagtaaaccgcttttaaaagctaccttcttcattgaaaaatcctcctttatttgatatatgttgatgtatgattttataaccgttattttgcagcggccgccgccttattatttccctttgccctggtgacagcgctaaggcccagtccgatgaccagccaggcaaccacgatggcccactctaccggcttaagggctgcggggctgaaaggaaccaccataagcccgatgatgatggtacctgccagacacgccatgcagatgcctgcttttccgccgggaaccttgtatggccttggaaggccaggctccgtatagcgcatcttaaggcaggcaaagcttaccatggtgcaggagaagatgaatgccagcgcagacacattggtcagggataccagcatgttctttcccaggaaaggtcccataatggtcaggactgccagtaccgtgttggccatcttgggagccccgcttttttcatccagaaccgcgaagctgtccggaagctgtcctttacgtcccatggccagcataatgcggctggtagctccgtagaaggagttcatggggcccatagggcctaatgtggcgattaccagcattgccacatacagaaacatgctgatgctcttaaggcaggccagggccggaaccgtgctttttataaaatcagtccacggtataatggtgccgaaggaataaatacaaatcatgtagaaaccgcctgccgccaggagtgccatactgatgaccttgccgaacctattccagtccaggccctccgccgcttcctcggcctgctgcggtatggtatcaaaccccgcgtagaagaacggcgtcattaccagcaccgagataatgcctgcaaacatgttgttcgcactggtcaccgtggacggtccttccacctgtgtaaaggagggaaggatgttggatggtccgccttttacgaaggaaattgccattgccagaagcatgcccgccaacagagcctttgtcaggaatgcctgcagctttgcggccgcgctggctccccggaagttaaggagaaccacatagaccgcgaatcccagcgctatgacggtggggaacaggtacacgtccgcccccatgatggtatagagcttgaccgccctgagaatcgggaacagtcccccgaacatatcggatactaatgtggagatggcgattgcctcccagggacagaggataccgtttcccagagccaggaaccatcccgttatgtatgagacattccgcccgtaggtcctgtccacatattcaataattcctccggagatagggatggccgctgtcagctccccgaacacggctccaatggggagcaggaacacggctccaatggcaaatgctatcatggccgctatgggtccgcctccaatcaccatccagtcacctaccagaagcacccagccagtaccgatgatggccccgaatccaatggtgaagaaattccatatggacagggtctttttcattccgcctgcatcatttccacttggtccagacataagatctgtttccccctttttcttgtttttcatattgtttctcaactcatatcctcattttacacaaggaaaaaaataacgcaatactttgtgcacaatcgataattccagtgtaataattggtcaaaaatgtatttttcgtccaaaaatcctatttacaataccgctgaaagaattgtataatcgttatgcatttaactaatttcaggggagaatggtcatgttcagaattgtactttgcgatgacagtcccgcggacctgatggtgctgcgcggacatctggaacaattaaaagaaaaacggcctgtggatatcatatcctatacagacggcctggacctgcttaaggattataaacaaaaagggttctgcgacatcctggtgcttgacatgcgcatgaaaaccatgggcggcatcgaggtggcaaagcatatccgccggctggacgacgaggttcccatcctcattgtgacagccaccgtggattacgcggtggagggctacaaggtgggcgccttccgctatatcgtaaagccggtggagggcagtgactttctgtctgccgtggaggagctgttggacaggcagcagaagaaacaggcatccatcttctccttccccagcatgagcggcaccaccaagcttatgaccgaccatatctattatctggaatcggatttaaggaccatccgtgtggttgcaaaggaaggcacatttacctttacaggcaccatcagttccctggaggaacagctccgtacggacggcttcatccgtattcacaaaagctttcttgtcaacgtaagccatatttataatattttcaaggattccgtaaccatggacaacaaggaagtgcttcccatgagcaagcacaagcgcaaggaagtgaaccaggaattcttaagctatatggaggcaaacctatgatgagcgtcattcagcatgcctgggtcagctttgtgctgtccgtggccgagaccctgattctttattggctgtgcagcaacttccttcaccggaacccgcgccccgtatcccaatacacggtgggcatcctgatctattttatattccagtgggtaacctactggttcaatgcgcctctgttcagcatgtgcgtcttttactgtgccttcacaatgctggtaagctgcattttcttcacggattccctcaggaccaaggtactggttgcttatctgttcgttgttctcaactatgcctgcaagctgctgtccgcagtgctggtgcgttttctgcacaacgagccccttccctccgaacccaacttcctgattcagagccctttggcccagatgacggcctgcgtcctttttttcttctttaccctgctattcatcctgtgcagaaacatgaggaagagcaacaaagacaacctttacaatgccatttccttcctggtgccctccgtgattctgttcatcaccatccagattttccacatgaggaacagcgtatcccacttttacctggagatatcgggaatccttttctgctcctccatgttcctgttttatctggtggacgactacgccatcatcaacgaggagagccagaaaaatatgattgcggacaagctcctgaccatgcagtcctcctactatcagaaggtggaggactcccagagggaaatcacctccctgcgccacgatttaaaaaaacacctccattccctggtggtgtttttaaaagcaggccagtatgtggaggcccttacatatattgaacaaatctatgaatccgccaacggcatgaaggtgcctctcaccggcggaaacagcatggtaaacatcctggtaaacaatgcgcagcagcaggccgctgcctgcagcgttcccctgacagccaatatcatggtgcctcccgaacttccggttgataacgtggacctgtgcatcatcctgggcaatcttctggacaatgccctggaggcatgctgccgtatggtcaagggtgcagaccggtttatccacacggaaatccgctgccaaaaggcattcctcatcatcagcatctccaattcatacaacggccagctgcgcatggaaggcaaccggtacgaaagcataaagattggggaacagtactgcggcatagggctctccaatgtttccacggtcatccataaatataacggcgacatgaaaatcagccacaacaacgatgtattcacggtatccgtcatgctgccgctggtgcgcaggtgagaacagacacagggacgcgcctttctttgggccggctcattccttcactgcagttccctgcaaatcatcctgtacgtatccgcgtatatacttcccttattccatataaaggcaaagtcatgctccatctggaagtctctcagttccagttccctgaacaccccttccttgatcccctcctccaccgcagtccggtacaggaaggtaattcccgcatccttttccagcagctggagaatgacatgcatgctgccgatttccgtaatgtgggcaaaatcagacagacggatattcttgatatccagattcttctccaggatatccctggttcccgacccaggctcccgtatgagcagatgttcctccaaaagatcccttagccggaccggcttcctggcaaagacatggccggcggcacatacagggatgaagggctctgttctgaaaaccatggaatcaaaatccacatcatcataatatccctcaaccagggcaaactgaatctccccggaaaccagcttgtgcagaagctcgtccgtgttattgatgacaacgctgatacggtcctccggatggctgtggatgtagcgggccaggggtgcggatatcactgactctccgatggtcctggtggtcccgaaccgcaggctcagtccccttcctcccccctctaacatctgttttcgcagaaatacctcgtcattcttaagggtgatggctgcgtggagcagccgttctcctgccggagacaggtgtatcctctttccctctgccaggaacagtttgacctgatacatgttctccagataccgtatatgctgcgacacagcgggctgcgtgatgtgcagcgcctccgcggcccttgtataattcatgtactcacagacagcaagaaatgtgtaaaccctgaaatccagcacctgatttcctcctttaattccgtcatttattttgtttctgattctgccactggttccgctttttgttctgcctttgttttctttatcataacacattattattaaaatataaatatatataattttactttatgctttccataagttaccatataaaccgtgtgctgcgttttacacccggcactctgtctaatatcaagctacgggaatatgaggaggaaaaagaaatggcatcattacaaaagaaatggaaaggattggcattctgcctgctgctggccgtcccttcccggttcctggggaaaatgttccccatcataggcggcgcagtcatcgccatcattgccggcatggtcatcgccgtattcatgaaaaataaagacggcctggaggacggcatcaagtttacctcaaaaaaagtacttcagtgggcggtcattcttctgggcttcgggatgaacttaaatgtggtactggagacgggaaagcagtctctgcccattattgtatgcaccatcaccacctctctggtgattgcctttgcgctccataagcttatgcatatcccatccaacatctccaccctggtgggagtgggctcctccatctgcggcggttccgccatcgcagccacggcgcctgtaatcaacgcggatgacgatgaggttgcccaggccatatccgtgattttcttctttaacgtactggcagccatcctgttccccaccttcggcaaggttctgggatttgacactgcatccggcaatgcctttggcgtctttgccggaacagccatcaacgacacatcatccgtcaccgcagccgcagccacctgggacagcatgtggaacctgggggcggccacactggacaaagcagtcacggtaaagctgaccaggaccctggccattattcccatcactctgtgtctggccttcatccggaccaggaaggaggaaaaggaagatcaggccagcggacagtccgtaagctttaaggatatctttccgtttttcattctctacttcatcggggcctcggtcatcaccaccattgccatgggagcagggattcctgcctcagtctttgcgcccattaaggagttgagcaagttcttcatcatcctggccatggcagctatcggactgaacacggacctggtcaagctcatccgcaccggcggcaagcccatgctcatgggcgcctgctgctgggtgggaatcaccgcagtgagcctgggactccagagcgcgctgggaatctggtaatacatatcaatctgaaggggcttccctgcctatgccctggtccgccatggccagcaggcgaatccgcatgtaatggcatgaattggcagagatgatattgttgcagtaccccttgttgacccccacataaaatatggattgaaagtacatatcctccgccgtggtgccgcaatagtcagccaggaccttcatggcctttctggcggattccacgttgccgtaggagaaatgttcatggacataaagataatggccgtgacgatacacaaaagcgccatggtgattctgggcttatcgccgcccagctcaaccaccttacgaatcagggtggctgctataccggtgtccgccagcacctggatgaaggttttgccttccatggccgatgtggacgaaaatgcgtttcccaccactgccagggcagcgggaatgaagggaatgaatcctcgaacgcgttccggatatattacagcacattattctccctgcgccccttttccagggccctcaatgtactgtcatggagcacttccttcttatactggtcctgggacagatagtaggaatagaggatgtccgtcaggaggagaatggggaactgaggtgaaatcacatttccatggttcaaatggagcagcgagggaagaagcaccacctcatcgcagaaggcatcaaagtcaggcctgttcctggctgtgagcatcacggtcctggccccccgcttgtgggcttcctccagaaggtataacacctcctccttttcaccgctgatactgacgccaaagacaaggcagttctcgtcctggaacacgccgcgcatacgcatcatgtcgctgtgctccatggatgtgatgtccaggccgatccgcataaagcgcagctccatctccctggcagccaggcctgagcttcctgttccgcagacaaacacgcggcccgccttggccatataccggcacacccgctcaacctgcttttcatttaccaggttatacgtcttattcagaagttcctggtaggcattgagcactgttctggtgttgcctgtcatggaatcctgcttaaccacaaaattttcctcatactggtaaataaattccctgtatcccctgaatccgcatttctttgcaaaccgcgacagggatgcctccgacacaaacagccttccggccactgacttggctgagaaatccatctgttccctgttatagataaaaaaatccgcaatactgcgctccaccgttgtaaaattcacataattggattctatgacgggtatcactgatttcagatattccataatacctcctcccggttaagaccacgggccgctttaaacaaatgccggtcagctttgggcctttccctgtctctccagaaaatgatagtaggccccccgcatccccgcgtcattctggtgcttcgcaaaggccagctctgtcttttcatatatgctggataccagataccgtgcaagagccttttccagtctgggccgcaggtactcctcctgagccatgattcctcctcccagcaccactatctggggattcagcacatagcatatattggaaatgcctttgcccagacaatcgcacatctggtcaatggcttccctgcatatgggatccccttccccggccagctggaagatgcggtagccattccactcatcctcaggctccccctttgcagccgccacccgttttaccagtatgctggcagcccccagggtctggaaatcgcttccgtccatatgcatgtatcccacctcacaggcgcttccactccatccgtggtacaccctgccgccgatgatgatacagccgccgataccggttccaaccgtaaggcacagggctgactgagcgcctgccgctgccccggacacagcctccgccaggccggcgcagttcacatcattttccacctcgcagggaagtccgaattcctcctccatgccggccttgatttttgttcccgcatactccggaatcagaggggcggaatagaatatctcccccttctccacatccaccatgccggcagtggatacacagataccctccgccttccaatacttcagataatccgccgcaatccccaggacctttttaagcagggcgggaccgcccttaaaggcctcggtgggcaccttatcctttgcaagaaatttcccattttcatccagcactccgtgcttgatttccgttcctccgatatcaatgcaaatatactgtttcatcgtgacaccgctcctttaaaccttcttttcatcctgtcctgcctcttgttctgacattttccttccgctgacctgccgcaaaaggcaaacctgcccggggcgcaaaacggatgctccgtcccgcgctccagggtctttggtttgcctctgtctccgggtttatatgcttttaatggtcaatccgcaccttaaatatggccttcttgattttctcagattcgtcaacggccacggctgtgcggtgcccgtcctccgggtagcaaatcaggaaatcgcctgcccggagtactacatggctgttggacccgccgtccatgggaaggaagtcgtccttctccacaaattccttctgctccatattctcaataaagtttaaatcaatctgctcctggccgtcaagcattaaatgcacatccaggtaattcctgtgggcttcccagaaacggttctccggccgggtagtctcatactccaccacattgacaaacagtctctcgccgtcaatgggatggctgcccttttcataggataccaaatcgtgttcctttgcataggcaaagcattcctttaaatcctcaggaagaaaggcatatgtcttttcctgtgtgatgtttccaaatatcatgattacctcctgtcagcgaatcattaattgtggtaaatcgtagcgtcctttaccggcttggatgtatccccatccagctttcttgtaatcatgctcaccggaattcccactaccagggaaatggcgatggagatgatggaataggaccagatggatacagagcccgcgggagtcatgtacttgatgcagaccatggtaacggctgccacaaagaatgccacgtaagcgccctttgcatttgccacctttgtgaatgtacccagggcaaatgtgccgcccaacacgcctaacaccagtcccatgaaaccgttgaaccactcatatgctgacttgatttcgccgtttgccagtaccatggacaccaggatggccacaacgcccactcccagggatacgtactgcgcgattcttgtctgaagggcaaagctcatcttctttctggagagacgctcctggatatccagggtccagctggttgctactgagttaaggccggtggacagagtggactgggatgccgcatagatggctgccagaagcagtcctgtgatacctaccggaagctgataagcaatataggaggcgaaaatctggtcctgctgtgctgccggcggaagtgcattctggctgtaaaatacatacaggcctgtaccgatgaggtaaaatacggttgcgatgaagatggacagcgcgccgttggtcagcatcatcttgttcagtttcttcatgtctgtggtggtggtgaaacgctgcacaatatcctggctggatacataggaggaacaggtgttaagaccggctcccacaatcagcaggaatacgctgtccttcagtatattgggattgaaaatcggctgatcagatgccaggaacttacctccggccatggactggaagatggctccgaatccgccgttgataccgcctgccagataaaacagggcaaaggtaacgcctaccagaagaacgctgccctggatgaagtctgtccagagaacggatttcagtccgcctgtataggaataaatgatggcaattacgcccatggcaataatcagtatgtttacattgatgcccgtcaggctggccagaaccatggacggaagatacatgatgatggacatgcggcccacctggtatatgatgaacatgacagcgcccaggacacgcaggcctttgcttccgaaacggatttcaagatagtggtaggctgtgtcgatgtccagcttgctgtagattggcaggaagaacttaatggtaatggggatggccacaatcattcctaactgtgcgaaccacataatccatgtccctgcataggaatttcctgccagtgacaggaaggaaataggacttaataatgttgcgaatatggaaacggaagtaacccaccacggaatggtgccgtctcccttaaagaactcttttcccttcatctcctttttggagaagtagagtccggcaaataatacagccgcaagataaacaaccaggataatcaaatcaattgtagtaaaaccctgcataaatcaatctcccttctttgctatacggaaaacccgggaaacatcctccctttcccaaacgccctccggtcccgcgccggccctttctccctccagaaaggaccggggaccattcacttttacctccggtaccgcacactgcttagcagtatgccgcaaccgcttccttcaccatgcgggccgcttcctgtgcaatggcaaggtcggattcaatcagctgcggcagcggctccctgactccgcccaggtccagagactcattgatgcgcagcatctctttaatcataccgtacatgttgccgtgtccggaacacatcttgtagataatgtcgttggcagcgtactgtaccctcatggcttcttccatctttcctgccttcaccagttcatccatcttgaggaacagttcgggcatcacgccgtaggttccgccgataccggcctcagcgccgatgacgcggccgctgataaactgctcgtccggaccattgaagatgatgtagtcatccccgcctgccagcttgaacatctggatgtcctgtacaggcatggaggaattcttcacgccgatgacccttggattcttcctcatctcggcaaacaggctctgtgtcagggccacgcctgccagctgcggaatgttatagataataaaatccgtgttgggagctgcctggctcatggcgttccagtaagcggcaattgcatactcaggcagatggaagtagatgggcggaatggatgcgatggcgtcaacgccaaggctctccgcatgtttagccagctctacgctgtccttggtattattgcagcccacatgtgcgataaccgtcagcctgcccttggcagccgccattacattctccagtgtaatcttgcggtcttccaggctctggtagatgcactctcctgaagatccgttcacataaacgcccttaacgccttttctgatgtggtactcagtcagagcccttaccctctccgggctcacatttccctccgcgtcgtagcatgcgtaaaatgcaggaataacacctttgtacttttctaagtttgccataatcttacttctcctttcaatgacctgttcggtcccctttattatgaaatggttaacatgtttgtactaatccagcgcctgtgcaaaggactttgtaatcagctggggcctggtgataatggaaccaaccaccacgctgaaagcccccagttcaatgaccctctttgccttttccggcgtgttgatgttcccttcggcaatgacgcggtgtttcaccgttgccacaatccggcggataatttcaaaatcattggattcaattttaaggtttctgctctgatccgtatatcctaccagcgtggttccgataaagtcaaacccaagctggtctgcgtgaagggcttcctccacagtagaacagtctgccatcagcagctgtcccggatagcttttccggatttccctgtaaaattcatccagggtcctgccgcccggcctcaggtcgccggtggcgtccagggcaatgatctccggtttaacctccatcagctcgttgatttccttcatggtaggcgtgatgtataccttgctgtcctcatagtcacgtttcacgatgccgatgacaggcaggtcaacctgggtctggatttcagcgatatcctccttggtattggcgcggatgccatatgctccgccctccttggcagccaatgccatccggcccatgataaaggccgaatgaagcggctcatggggcagggcctggcaggatacaatcagcttacccttcaggctctctatcttttcgttcatatgagttcctccttgttatgagtacttagcagccttgttccggccgctcatctcttgtagctaaagtatagcaggtttgattttaatttcaatagggttttgtagttcagaaagttctttcatcttttttaaatcaggccgccataatacacaagtttttggcaggtgatttgtgtattatgtacaataaaacgttccttgtttctttaacatttcctgattatctgcaaaaaaagacaccaatcattggcaaccaccggattggcgtctaactttaccttttttcttttacaggttttccaaaaactcaattgcttcctggactgttgtgaatgtttttccgcactgataaagccactggctgcgtacatcattatcctccagcgttggaataccatccacagtccgcaaaatccatgctccattctgaaccgctgtgtccatgtgccctgcaatctccgctgtcgcggcagaatccccctttacatatgccggacaatgtttccgcagtctttgcaaggtttgcataatgttctgattcgtcttccagcttcccgcctggtcgtggtccacatcaaagaaaaaccagatttcatctgttacctctattttattccggtacctggcttcctttttaaattttctttctgcttcggaaaataatccctttaccggcttcattataaccgccacatctgaaaacctttctttcagacactttccatattcaatctcactctctccctcgcaaaaaatgtaaatcagtggtttgatttttttccccatcattccacctccacggtatccacctccggcacggccccgaaaaaatatccatccgcccatcttttttgatgcctctgtgcagagacgatgtttttaattcccccaccctcagattcatttccgctgtgtcagaggaatctttcagggcagcagcaaattcctttaatgcccttagaattccctcaggaatattttcaaaaagcagctctgactgcgacagttcctcattgctcacttcaaaagtcatatcctctattcccacatctgcctgctttgcataggaaacaattgcctgcagcatattggaatcctctgcatactccaaaatctgctttggtatatccccataatcctttgaaaaagaaacagattcccgaaaccacttcatggctgatatacagggctgataattcatcacacaggcaatggcaaagaacaattggttttttgactgatttctgcccggatttcccttcccgctgccggacagggcaggaaatggtttttagaatggacatctttgactttttatagtaatctttttacctttccaggcttcaaaaaaagcggttaggggaaagcagaatctatctctgatttcctctaatccgcttatagcgcacggtacaatgtttatttacatagaatacacattctaaaatcttttaattttctttgacggcgtcttctcaaactccgtctccctgacaatcaggctgtagattcgcttatagaccggcatatccttattaaacccgtcaatcaattcctgaagcgtcccccggatatccttaatatgctttttctttgcgtactcgtaatccgggaaaacttccgcctctattattttatctttttcccgcaccagtatttccttcaccagttccgagcggctcagctcgttctccagctcctccggagacacattctcgccgttggccaggataatcaggttcttgcggcggcctgtgatatagacaaatttgtcctcatccacataccctaagtctccggtcttaagccatccgtcctccagggtctcggccgtccgctcaggcatcttgtaataaccctgcatgacgctggatccccttacccagatttcctcatccaccaccttggcctcacagttgggaagaagttttccaacggaacccttcttattctcccattccaggttggtgctgataaccggcgagcactccgtcataccgtagccctgaaggatggtgatgccgtattctttgaaacggtctacgtagtccggatccaggtaggctccgccgctgcatatgattcgcaggttgcccccaaaagcggcctttgccaccattttcttgggtatcaggcttccggcatcctttaactttccgtatatggactcaatgacaaggggcaccagcagcacgatctccggcttgaacagcttcatattgcgctgtacatgcataatggaatcattgatgcagataatcattcctatataaagtccctttataatgtccatggtcaggcagtaaacatggttgatgggaagcagggtcatggacacggttcccgcaggtatcttcatgtccagacagaccgcattgtccgtcaggttcctgtggctcagcatgactcccttgctctttccggtggtgcctgaggtaaagagtatggtgcagagctggctgccggatagctctgtctcatatgtaccggtattttcagctatcagacgggacaatgagagcacatcccctgctgtctcctgcgcctgcatggataccacatgcctgatgccagggcatttctcacggacagcgcctgccacgtcagagcgcagttcatcgtataccagcatttccacatccgccctgtttaagagttcacagatggcttctgcaggaagctgtgcgtcgataggtactgccacgctgccgctgttcacgattccaaaataggcggtaatccactggtagctggtggtgcctatgaccgcgatatgcttccccttcattccaagggcctccacggcacggcttacggccatggaatccaggttcacctcattgtatgatttatcaatgatttccttctttaccttgtaccggaatgctgtctgttctccataagcctctgcgccgtgccgtattacatcccttaatgtctctgctgccatatcttcctcctgccttttcggcctactctgcctgcagggactgaatataatccactgcatccttcacggtctttacattgaccacctcccgttcctctacctccacgtcgaatttctcctcaatctcccctaccatgctcatgaagtcataggaattgaagcccaggtcctcaataaacctggaattctccttaatggtctccggcgccacatccacatactcacagatgatttcctttaattcctcaaacatatccttgtaatcctcctcttttttacaccatctctaagatttcccctaccgtgcgctccgggtcttccacgccccggaatatgattctgcacaggtagtaataaatatactccagcctctccggcgtcaccacgccggtctgatactcaaaaccaaaatccaggccattgtcctctgccctgtggctcacggtcaggtacaaggtgtgagcagccacgccgttggaatagcgggcagtcttatacttgatgtcacccagtttgtccagaccagggccgtcgtacttcatggccaagggctgataggtaaggcttaagggctcataggtctggccgtccttcagcttatagtaatcatgcctgtagttgaaatactccgtcgggctgtaatccgcatggcggaaatactggttctgggcatcccttatcttgagaaggccctccatgaaggtgtcctccctgggcacaatggtcctgaacgggaaacaatgaatcctgcttccgccgcagcgcttctccgacagggtggcccgcctggaaatggtagtggtaatggaaacgtcgtcctggtcattttccttctgcagataggtccgaaggcccattaagagaaggcaggtcatggaaataccgtatttctcacaaaaatccagcaggcggccggaagaatccccttccagatggaagttggtgatattggcctccacattatcggatgtgttggtggctgccctcagcttcgggttgcgggtggcctttctctcatctgacagcttctttggaccgtagatgtccgtgaagatgggttcggaggaagcaatcagttcctgaaaaaactgcctgtctttttcacaggccctgcttccggcctcgtaggccaggtccttttccaactgcttgatataggaagacatttcctttggatggtccacctcgtcataaagtttgctggcgtacagttcaatcacatcccggaaaaacagaatcagggactgagcatccatggtcatatggtccacacagatataaagaccctggtacccatccggcatcttgatcattacaatgtggtgcatgggggaatcataccgctcaaagggaacctctgtccactcccgaagcttcccctccgcgtcctcctccttccagccggtgaagtcaaagtgttcaatttcctttgtctcctccttcaccacatactgatagacgttgccctccttgtcatgggtaaagcgcaggcgcatggtatcacagcgggcaatggcctcccggatgcagtctttaagcacgtcccagtccaggtccacctgaatggtcaggctggaaccgatgttcagcacctgcttcttagggcagtatttcaggcagtaaaagtgaagcttctgcgctgatgtcagcgggtataccttgtagcctttccttgtcttcatactttgttctcctcttttccaaaaaaccgggcaatcagttcctcaatcgcatgttcataacggtccgtctccttatagtacgcctctgcatggctggctcccggtatgactaacagctccttaggcgacgcgcaggcctcgtacagctcatacaccatggaacagggcacaaaggtgtccctgtccccatggataaacaggatgggaatacgggccttctttacctcttccctggcattgcattcatccaggccgtatccagcctcactcctggccatacggtccgcaatctgcatcacgggaaaagccggcatatggtacatactcctgagcacatggctgaacacttcccaggcagaggtaaaggcacagtctgacacggcagctctgacctgctttggaagattcaggcccgtggacatcagcacggtggccgctcccatggaaatgccgtggagcatcagctcgcagtcctctcccagacgctccaccatatactccatccactgcctggcgtcattgcggtccagacagccaaagccgatataggtgccctcgcttttgccgtgggccctctcatccaccgccatcaggctgaagccctgactcagataaaatttagcaatggatgtgtaatcgttgagtccttcgctggtatagccgtggaagcacaccaccgccttcccggaaccttcacagcaaaaaaacgtgccgtggagcctgagcccgtcccgggatgttatgtacacctcttcctgaggctgtcctgccagccattccctgctggcgcggatacccggaatataagcgtcccagtccgtgcctgccatcttccgggtcctgtcgcgctttgcatttccccggaccacggtccggtgaaagaaataccgcgctataccgtattctcccgctgctcccgctgccgccaatcccagtatccatcccttgattcccatatacttcactcctttgccatgggctgcccggtttcccggcgccgcacatgcgcctgcctgaacaaaacttctgcctacattctgcctacacaaacttctgcaacatcagagccttttccagacttccctcaaccttcagttttcccgttgtaaatgcaaagaccgctttttcatccgccgcgcagacggatataatatatgattggtaaaccctggactggtaaaaccgccagcccggaatactcccttttacagcgccctcctccagggaaaatgttatgtcccccagcggaaaggccagccccctgccaatggccttgacaaagctctccttaagcgtccacagccggaaaaaccgttcctgccgcgctgcctcagaccttccttccagcacaaagccgcgctctgattcggaacacacgcgcctcatcaggccctccttaaacgggcgaatacgctccgtatccacgcccagcgcacggtccgccacagcgcagaccaccagcccccttgtatggctgatattaaattccacgtcctctgcacccttaagacatggttttgagccggtctcctgctccacctcccaggtccgtccatactccttcatcagaccgaagttcagcaggctcctgcccagtatatgttcccgctcccggttataaagactgccgccgggttcatatgtagccagataaatcatgacgtttcctcccggactctattctcccgcttttcgaccagtggtcgaatcagaatcaaactaaacataacacgttttcgaccgccagtcaagtctggcgttttcatttatattctgctatacttggatgtattctaaagaaaaaaccgaggattttttatgcaaagccataataaaaaggagatgatactggatgccatgcaggaacttatgggttcagccaatgtccaggctatttccgtcagtgatattgcccaaaaagccggtatcgggaaaggaagtatctattactatttttcttccaagaacgatatcatagacgcagtgattgagagaaactactcccgtgtcctggacgaaggcagggagctggccgcctcctcccacctggatgcctttcagaaactggaaatcatataccacgcctgcctggactcctccatggaactgagacgccgggaagagatgcgcaccttcaacgaacagcgggaaagcgccttcatacaccagaaattctcccgcatcatcatcaccaagctgaaccccatcctggctgacatcatccgtcagggagtgcgggaaggcagcatccagtgcagcttcccggaagagacagctcaaatcgtgctgactgttcttaccatcaccctggataaccacctgattccttctgacgacgtacaaatcggccggattctgtctgcctttaccgagatgcaggaaaaaggcatgggaatcccctcccacaccctccagttcctgatgcgtaaaacctgacgcacccaacaagggacgccgtacccgttttatctggtacagcgtccctttccttctttttattcaacagtaatcttatcgcagcaggtcagcgctttctctgaaaattcatttcccagtccaggcagttccggaaccttatatgttccatttacaggctggtaatcatagatgcacagctccctgttatggggaagcagggcgtttctgtggtgttcatggataatgaagttgggtatcacacactccagctgcagggcggcggctgtggaaagtgggcccgcacatacatgagcctgtacggatatgtcatatacatgagccatatcacagattttctttccctcagtgataccgccgcagttacccagatctggctgtataacctgcacggacatgttctcaaaatactgcgcgtactgccatctggagtataccctctctccatgggatatggggatattgatgtggtccgcgatgaattttgcggttttgggacttggtgtgttaggctcctcgaaatagaatatattatacttctccactgcccttgccagctgaaccgccccgttggcatcgggaacggaatggttctccatgatgatgtccacatccggtcccaccgcttcacgcacagccgccacacgttcttctaccaggcctacataatactgctttaagatacccgtggtctccgtaatcttatcaaacctcctgccatccttcctgtcaaaggtaaaaaagtcaatcttaatggcgtcgtatccttcctccactgctttcctggcatttgccgcatattcctccgtatcctttgcttcctcccagtggtcgctccagccgaactggagctggcttgcgtagcagcgcaggttgtcctgcttcttgccgcctaacagcttgtataccggcacgttgaaaaacttgccccgtatatcccagagcgcaaagtcaatggcactgattccggcaaacaccacaggaccgccgttctgtccccagaaggtgtttttgtagagagtatcccagacaacctcattgtccagagggtccatgccgatgataagtgccgccaggtcacgtatcatgccaaaggcagccggagcagctatgccgtaggccagcgcggcctcgccgtctccgtagattccctcgtccgtataaacacggcacagaatcggtctccatgaaggattaggtgtctttacctgcatgacgtctacttttgtaattttcatttcgtacctccttaaattcattatattttcacattaacaggttccttttttacaggccgaacacatggctcagcaagacgtagtagcctatgagcagcaccgcgaacacaaagatgaccggcaggtttttccgaatcagcgctcccatacccaccccaaaatattcggacacaattgcaaggcatacatgggttggggatatctgcatggccgcataagtcattcccatcagcagcaggaacagggccagaccggcttggggctccgccgcaaaggccagaggcatgcacagtacaataatggcctgggagccgctaataatggtcccgaaaaagaaaatcatggcaaataccaggaaacccggcacaggcagtctctcaaacgcccccggaagggattcaatgacgcctgtggacgccatgatgtccttaaatatcatgatacagatcgtgcttgtaactatctttgactccactgccgacaaaaacattggctttaattcgctaaaggtaaatttatttatgaacacagataggacaatggaacaggcaaccgccgcatacacaggcatacctgccccgataataaggccgattgccaaagcaatgctccacaggctcctgcaaagactgcggatatcccctctcttatccatactgggcggcatccccgtatcctttggtatttttctcaggcagaacaggtatcccagataagccagaagaaacaccagcggcagcattccgaccagaaaggatgacacgctcaccctgcccccggtcaggcttatggcaatgataatggaagtatatgtaggcagaaagctctccggaatatgccggaaataggatgtaacaaatgtcttttcctccggagacaggtacggccccacgctattttccacaatatccccgcagatgatcacggctccggctgacggaagaaggccgataaaaaccggcgccagggaagcatttatcctccggttgttgaatatcccgttaagcgatgcctgagccaaattgagaaaatcccgtttttccagcattctctgtaaaaaagtaatgagataaaataccagcaggacagacagggttccccggcccgtcacggataacagggctgtattaaaggcttcggcgggcgctattccaaaaagaatacagacagctgccgccgcccccagtatgccctgatacagaggacgtttcagccacagcatgaccaccagcacaccaaatactatcatcagctttagaatatccatcaggctccctctaatcttcccagattgtggtactcaccgtgacttccgggcttctggcgcgcagcaggcccaggacgcagcatacagcaatggcagcaatgctcacaatggctatgatcggggtcagggcaaaagcggagtttaccagtatggcgcactggcctaccagccccacggcgcataccagataatatacgcggtccgccacatgccacctggaccgcttccaggcgtccggatactttttcggcatctgaaaatatgcgtaataacacatgagatacatacatgaattaaggagcatgatattgttggtaatggtcttcacattgaaccccagcaacaggggaaccagccccagcagatagttcagcgtcatgattttccaggccacaccccttttattttctttcccaaaggatttgggaagccacccgtccttacaggacgccatgatgggaagacagtttgccggcatggtggaattcatcgttgtcagcagcgccatgatgggaccgccgattataaacgcgatgaacaggacctttggaagcgccacacgggccaccagggtcagcggctggtccatgacctcttccatgggaaggacgcagcttcccgccgccgccacgccacagtacaaaatcaccagagtgggaacggacagaatcagggcccatggaatatcccgctggggattcctggccacggaaccgtagttcatagtcatggaataacctgtggttgaatatacaaaaagaaaactggccgtccacaaaccggcaatgccgtttgtaaggaaattctgatgggtgatatcaaacaccgggtggttataatacatcaggccaaagacaatgaacatgagcaaggccgcaatcaatacccatgtcatgtatttctgtattttagccatcatatcaattccgcacagattcaccacatagaaaaacgtcaggaacgccaccccgcagaccgtggtgttgacctgcggaaacaaagactggacatacacccccaggctcaccgcaaacaatgagatgctcaaaagttttgtaagctgcgcaaatgcgtacattcccgctaacgtcttgttggtcagcgctccaatgagggagtaatagccgcctcccagccgaagtgtgccgcagataaaaacaagcgggaatacggtaaaaaatcccagaacaatggccagcagatacgccagccatgcagaatacccggttgcagtaatggccggccccaccagcgtaataacaccggccccaattacctgaccaatagacagacaatacagttcaaccagtccaagcgtgccttttggaatctcttttttctctccgttcatacgctcctccattacaatatgctgttgtttcgtggcagcatctccaacaggctcaagaagtcccctttctccccattgccatatggagactgacggacggcagttcaggcagaacggttttccaggatagtctccgcaaacaggaagtccgcattatactccggcagaagcaggtcacaagtcctcctgaactcccagtatgtaaagtccttgccgccctccagtttatcctgtacagccgcctcacttatgcccagaaagtccgcgtattcccttagagaaatacaccttctgtccagggctttcctaagatttataaacatcctgccgcctcctcttacccctaagggtaattcataaatcaaatatatacccttagtcgtaatttgtcaagctatttttacgttcaagggtaacctttttcttgtctaaccaacctttacatgttaaaatattccaggaatggaggtgatacatttgggttttctggaaaaactaaactatcttatggaacagaaccatttaaataaaagtacgctgtccaaagcctgcgatatcccctataccaccattgacggatggtacaaaaagggatacgaggggcttaagctgacaacgctgcgcaagctatccgcttattttggtgttcctctggacttctgggccaatgaccacaccccggcctgcacaaggtctgccataaaacagagcataattgtgcggctggacaaaatgagtgacgaacaggccaaagccgtcctggcattcataaaatatatggaggaataatcagcctccaatagataattttattatatgggcgtttcgccaatatatcaagggttttttatgaacatatgccgtttcgccaatattctgttttaaatttccgggaaagtctgtttaatttcatactttccctattcttttttttcatttcggcttataatatcaatgtttaccggactggcaaaacttaccaacccatggatgtcacgccttttccagggcaggcatatgtacatctcacgatatgctttggcctgcgcagattttaggtacaaagaggacaagagaggatagagaggactatgaaagatacactgaaacaggccgtacggaaaatcctgctggtgatccgcgacataggagtcagccttctgggcatcaccggctggctgttccacgcccttctggccgtaatgacaaccggattcatagtgggagccatcctgtgcctgctgatttacgccaaggtcaagccggacctggatgagtgccgcgaactggcctatgacaagctggcgcagatggaacgcacggatttttccaagctgtccgacaccgcgatttacgacagggacggccgccagataggacttatcaatgccggacactaccagtatgtgggcattaccggcatcagcatgaacattcagaacgcatatattgctcaggaggacaggcgctttaagagccatacgggcgttgactggattgccactttccgcgccggactggctcttgtgaagcacaggggacaggtcacccagggagggagcaccatcacccagcaggtcattaagaatacatacctgacccaggaacagaccttcacccgtaagattgtggaaatcctgctggcccctgagattgaaaaaaagtactccaaagcggacattatggagttttactgcaataccaatttttatggccaccagtgctacggcgtggaggctgccagccgctactatttcggcaagcatgcagctgaccttaccgtggaggaagcggctgtcctggtaggcatcagcaacagtccttcggcttacgatccggtagcccatccaaaagcatcccttgaaaaacgcaacgacgtattaaagagcatgaatgaaataggcgaactgtccgatgaggattacgagaaggcactgtcaaaaccccttaccgtggtcaaacaggaatccgagggctcggacgagaactatcagagcagctacgccatccactgcgcggccctggagcttttaaagaaagacggcttccagttccgctacacctttgaggacaaggatgactacaattcctatatggaacgctatacagcggcctacacggaaaaatccgacttaatccgcgccggcggcttcaagatatacacctccctggacagccgtctccaggacatgcttcaggctgacatagaccaggggctgtcctcctacactgagttacaggacaatggaaagtacgccctccagggcgcaggtgttattgtggacaaccagtctaactacgtggtggccattgtgggaggcaggggaagcgtggatcagttcaatcgggcctatttaagcgccaggcagccgggcagtaccatcaagcccctcattgactacggtcctgcctttgacaccggagagtattcgcccacgcgcatggtggacgaccacaaatgggaggacgggccttccaatagcggcggcaattaccacggcagcgtaacggtccgggaagccttaaaccgcagcctgaacacggtggcttggcagattctggaggacatcggcgtgaactacgggctcagctatctgggtgaaatggagttccagaaacttacatacgtggacaacggcgtgccctccctgagcatcggaggctttaccaacggcgtccgtgtggtggacatggctaagggctacagcaccctggccaattacggtgtttacaatgaccgcacctgtatcacccaaatcatccatgaacacgacggcgatctgaccaaggatctgccgcctgcagccaaacaggtctaccgtgacgattccgcctttatgctcaccgatatcctgaaaggcaccatgacctccccctacgggacgggacgcgggctggagctggataacggcatgcccgctgcgggcaagacaggaaccaccaacagcagcaaggacacctggttctgcggctacacccgctactataccacggctgtatgggtgggatacgatatcccccgcaaaatgcccggcatatacgggagcacatatgcagggaaaatatggaaaaatatcatgaaccagatacacgagggtctggagccctgggactgggagcagccggagagcgtggaattaaggacggaccccaggacgggaaccgaggattacttcagcaccaccgctgaactgcgcgcgcagcagagcctgcacgacaaggagcaggcaaagctgaccgcacagctggaacaggatatccgtgaattcaccacaagggaaatcagttccgtggaggatacctacgcggtcaggagccaataccaggatatcacctcccgcctgccgcttctggacgacggggagctgagggccagcatgctggaacaggtggaaaaccggtacgattactttacgggaatcatcagccagatgggcgataccattgccctttatgaaaagcagaaggccatcgacgatgccagggccagggaagcagcccaaaagcaggctgaggagaaccggaaacaggctgagaaggatgccaaaaagaacgaattcctgcaggccctggaggctgtggaggaactggaataccagcagaaaaacgctcaggagctggtgcaggatgccatcagcaggctttccctggtggcaggcgacccggatcagcaggctctgtccgaccggcttcaggcagccatcacgcggatttccggcctgcccacagaggaccagtggaacgcgtcccaggccgagagcagggcggccgaggaagctgccatgaagcaggccgagcagcaggtacaggtgcagcagaaccagctccgttcctccctaaacagcgagaaattaaagtggaacaacatggaatattacggaccaggaggcagaccggataatgaaaactgatttacataaaaaaacaggacatacaggcgccccgcgtctgaagctgggcaaaaatgtccgcgaggaatccgggaaggataatgccaatccctactgtatgcctcccaggcgctggttcctcacattcatgtgcatgaacatccccatcgcgggatgggtttacctgctctgtctggcctttggaaaaaaggagaaccagctgcgggactttgccaaggcttatctgatttataagctggtattcctggcagcggctttgatcatcctgggagttctggtatacatcggactggaccttgcagacaagctgctggcatatatggaaatgctgtaggtttacctgtctgataaaggaaaaacaaaaaggttctttctgaatctttggataacccaaagagcagaaagaaccttttttcaatacagctgccagccgctatacggtttcagccatcctgagaagcgcaagctcctccttaagggctgcaatctcagcttcgtaagcttctatcttgcggtccttttcctccagaatcttcttctgttcctccactatgcgctcaatcatattgcggtccatcattccctcaatgatgtccctcagcgcatccaccgtgtctcccggagtctttccctcctcatcaatggtgatgtccgcgtatttctcataataaggcacacgctcattgtaaaggtcccgaagggtaaatcccggttttagggccacgcccctgtccaccacattgccaatgcgcttttccatctcttcatagctcatcttcagatagaccacttcgctgatttccttcaggtgctccatggccttctcaccatatatgacgcttccgccgggagcaatgacagaaagagccacatccagttcggcattgattctctcctccactttaaggaatccgtccatgccctcctgtgcaataatttcctttagaagcctgccctccttttcctgtatcacgatatccacgtccacaaaggaaaatcccagcctcttggccagcagtaccccaatggtgctcttgcccgacgacggcatgcctatcatggtaatgttcggtttcacgcttttttcctccttgaagtcctgttcttatcattctgccttttaaccggtttcttcaccgaatacccaaagcttcccagcttctttcccagctcaaaatactctccgtgggaatagctcacaagtccggacatattgaggttaaactttcccctgccgtccatataccggttgtcaatggtcactcccatcaccttggcaatgaacatatcatggcttcccagctccttcacttccaccaccttgcactcaatgttcaccgggctttcctcaacccccggcgccttcacatacctggatgcctgcggggtcagccttgtctccttaaacttatccacgtccctgccggatttgacgccgcagtaatccgtggcccggaccagccgcttattcaccagattaatgacaaattctcctgtgtccctgatgatgctgtgggagaaacgctccttgcgcacggatatggacaccatggcgggatccgagcaaatggtgcctgcccaggccactgtaatgatgtcgggtgtctctccctccctgccgcagctgaccataacagccggcaccggatagagcatgttgcctggtttccagtattcctttgacatatcttaatcctcctgcccataccgggcctctgttctaatcctgctccgccagcatcagctccggaatcagctgttttttacgggataccactcccggcaggctcagcaccggttccggcttttccgcggcttcctccatatccaggtgaaacgccttggctgccagctgcaccgcgccctgtccataacaaatcaggtccgtggattccttcagtatgttggtcagcatgaaaaataccatatccaggctgttgctctccttggccttttccatatatcccagcatcttctccttcagggtatccagctctatatcatttaacgacgtaatctgtcccacgccaatcagcgccttgcctacagaaaacttcttaaaatcctggtagaaaatctcctcgtcggacttatcctttaaattacttcccgccccgaacatttccatggcgtacttctctatatccaggccggctatggctgccagggacctggcagccatctcatccaccggtgtgcaggtgggggaccggaacaacagggtatccgacacaatggcgctgcacagcagcccggcaatcttcggctcaatctccaccttattttccaggtacatctggtaaataatggtggccgtacagcccaggggctggttgcggaagaacacaggagccatggtctggaccgttcccaacctgtgatggtcgatgatttccatgatttcagcgctctcgatacctgccacggcctggctcttctcgttgtggtccaccagaattacctgcttgcccctggcgcccaacagattccggcgtgaaatcattcccagataccttccctccttgtccagtatagggaaatcccggtgcctcttgctggccatgacctcccggatttcatccgtataatcatcgctgttaaaggtaatcagatgctccctggtcatgaaatagctgatgggcatgctctggttaatgagacgggccgccgtatatgtgtcgtaggtggtggcaatgaccgtgcatcccctgtcctgggcaatcttcttgatggtcatggacacgcctgcgccctcacacacaatgatgcagtcagctcccatctcaatggcacagagctgggactcataacggttgcccagtatgaccaggtcgtggggttcaatgtaaaattccatcaggtccggattggcggctgcaatcagcacctttcccttgtcaaaataggcgtccgcatttcccaccacaatatcggcttccagtgtttcaatgatattggaatactgggtatgggccttggacaggatgctgctgtcataaatattcatataggtctttgtaatatcgcccaccgtgataagcccttccagggtaccgtcgggcctgacggaaggaatggtcaccacattgttttcctgcatgatgttccatgccctttttaaggaaatgttatccgcaactcccctggtcttgcggatttcaatgtcctttacctgggtcctcacatcctccaccagcttaggctcctccatgccgaagtagtccaggacaaacctggtctccccattcacatggcctgccctggccggaatatacgcatcccctgtaatggcccgttttaggttggcataacagatagccgaacagatggaatccgtatcaggattcctgtggccgatgaccgttgtctttctttttaattcctgctccattttctctccttcgattctgcatctatggtaatatataatgtttcataatctgtttacaacaaattcacacttcgttcacatttattttttatactattttcataagaacaaattgcttacacaaatgataaatagtaaaattgcacatagatttttcataattaccccggttgttatacaatcggggtctcctcattttataaggctttttcgggtttaaaactccggctctatctttatactgtatacaagatacgtcccgccatttcagtatatcagaccgtatttcttttttcaacaacaacctaaaagggacggcccttccgccagcatggcgggagctgtcccttttaaaagcttatgcagcatcaaagctcatatacctgatcacatgtaaaatccggaagcgtggcgccgctgtctgccttcttcgtcttcttcccactgtcatccgtatagtaaacttccctgtcctcaaccaaatagacataatccccatcgctcttataggccttctcattggtctgtaccttacctgatccgttgaccagataatatttgccatccaccttatagacctcgtaccgggagtccccgtccgctgtcaccagcagcccgttgtagtacaggaatccatccttttctccgctgaagccagctcccttgttagagccggaagtgttgaaatagaaggtgcagcgcttgccgtcgtcgtcaacaatgcctgtattcctgccggtgagcatcctgccgtcagaccccttctctccgaaataccccaccatcacacgtccgccggatacaatcttaaccagaccgttctttctgcatccatactggttcacaaaataattctcgccgtccacccggaccgtggctgcattcatggtggagatgcctgtcttaaggtatgcgggagtgccgttgttctcaaagtaataccactccttatccccttcctttggaagctcctcgtcccccttcttggagatggctgccccgtcgtcggaatcaccaggatgttcagagagctgcttccactgtccctttgcaatggctccgtcgtccttaccgcccaaatacacgaaacggctgatgcctgtggcatcgtcgctgtccactttctccttcaccgcatgccagcccgtcagcatggctccgttctggtcaaaataatatttttctccgtgaatggtctcctggtcataattaccggatagagagcgcttggccttgccgttattctggaagaaaaaccaccgggaattctcatctgccttcttatattccctggagatgtccccaatctcaggaagattatcctcgtcaaattccaggcatacccagccccgtttcatggccccgtcgtccttgccgcccaggtagtagatattatcgccctcgtagaaccagcctgtgcgcatcttaccgtcgctgtcaaagttgtatcggccgtctcctacatttttccagccttcctctgtcttgccgttcttgcccaggaaataccagccttcttccttcaggccgtccttgccgtctgtgtggacccaggaattcttcaccatgactcccttgtcatccacatagtatgtattctctatccaggtgctcttctcaatctccccgtcgctgcccaggaagtatgattttccgtcccgtatcctccattcattggtcacatagtttcccttgctgtccacgaacttaaggactccgtcttctgtcttccatccggactccgcaccaaaagcagtgccggcagtcatcacccccatcagcagtcctatggcccatcctgtcaatatcctttgtctggtcatatcctccacctccttatagtatcattttatcagaaaatgaaaggaaataacaggatgagaaaggggaaaaattgtgtaagaattacttaattttatctatccaggcaaataatctcacagtttacagctcatactcgtaattgcatgaaaagcttggaagggtctctccgctgaccttcgtggtggcggcgctcatgctggaagccggtgtcttaagataggccggtgtgccgtcactctcaaaataataccaatagctctcaccttcctgaggggcgtcgtctgaatcagacccggttatctcatccttgtcatcactgtcccctggatgctctgacagctgcatccactggcttttagccatgaacccctcgtcgtccacggtcatggttgcataatcaccgtcgccggccttcttagcctttccattggtctggaaataaaaccatttcacatcttcccctgctgaagaataggccggagatatatccccctcctccggcacctcgtcctcgtcaaaggccaggcaccgccagcccgtcttcatggccccgtcgtcctcgtctcccagataatatgattcctccttggaagttttccactcatttgcagcataactgccgttggaattcacatatttccatgttccgaactcacttgtccaccctgcggccagggctgtccctgccgcggcagcgtttaacagcaggcaaagtccccatcctgtcagcattttctccggtttcttcatatcctacctccttttgctgccattttaccagaaggacggtgaaaatttcatgaacagccggtggaaaaaatgtgaaatcagtgctaaaatgtatgttgcgaatactctgaaatatccgtttagaaaggagtcaccgatatgtcagaaacagccatcacaatccgtatggcggaggaagcagacgccgaagcccttctggccatatacgcaccctatgtggaaaaaacagccatcacctttgaatataaggtgcccactgtccgggaatttaaaaaccgcatcgcctccaccctgaaacggtacccttatctggctgccgaccgggacggacgcatcctgggatatgcctatgcatctgaatttaaggaacgggctgcctatgactgggctgtggagacctccgtctatgtgtccgaagacgcgcggcgcaccggcgcgggctccattctctatgaggcattggaaaactatctgaaacggcagaatgttatcaacgtcaatgcctgcattgcctaccccaatccgggcagcattgccttccacgaaaaacacggctaccgcatcgtgggccatttcaccaaatgcggctataaactgggccagtggtgggatatggtgtggatggaaaaaatgctggggccccacccgcaacagccggaaccttttataccggcaggcagactctagagcctggcttgaaaattccggtccttcgctacgccctcagccgcccatatatcccggccagccgcctgcaccgtttcacggtttcctcattcaaatcttccccgctcatcctccaccgccagttcttccccagggtagacggctcgttgattctggcagacgtgcctaatcccagataatcctgtaccggtatcaccgccaggtcagccacgcttcccagcgctgcccggactaaatcccagtggagctctccctccggtgtgtacccggctcctatgtactccctgacaaacttcctgccatgttcatccagtgacgcgtaccagccctccgcggtatcattgtcatgagtgcctgtgtacaccacgcagttggtcccgtatttgtggggcagatagtcactgtcctcaccggcgtcaaaggcaaactccagcaccttcattccgggaaatcccgtatccttcaaaagctgtctcacagtaggcgtaaggaaccccaaatcctctgcaatgataggcagcctgtccccgccgaaatatgcctgcatctgccggaaaatttcgattcccggccccttttcccaatggccgaactcagccgtggggtcgccgtagggtatggcgtaatactcatcaaatccccggaagtggtccacccgcaccaaatcatacatgcaaaaacagtactccattctccgcatccaccagacaaatcctgttttcctgtggtattcccagttatacagagggtttccccacagctggcctgtggctgaaaatccgtcaggcggacagccagccacggcccccggcatattattctcatcaaactggaacaattcaggccgagaccagctgtcggcgctgtcaaatgccacataaatgggaatatcccctataatccggataccctgctcatgggcataccccttaagggccttccactgttcctcaaatttaatctgctggaattcataaaacccaatctcatccgtcagcatggccctgtatgcctccagcgcctccggttttctcagacggattccttcgtcccacagattccagctgcatgaatcaaaatggctctttaccgccatatagaaacaatactccctggtctcatcccccagtttccggcctgccagttcatggaccagctccggggtccggccctccttccagcgctcataggccttcctcaaaagcggaaatctgccgtcgtatattttcttataatcaatatccctctcatcacttccaaaatccatgtccagacactcctcccttgtgagaagtccctcctctgtcagcttttccaggtcaataaaataagggtttcccgcaaaagccgaaaaagactggtatggcgaatctccaaacccggtgggacccaaaggcagaatctgccagcagctctggcccgctgcctttagtgtatcaataaaatcatatgcttccttagaaaatgccccgatgccataccgcgaaggcaggctggcaaccggaagcagcataccgcattcccgcatagtgataatctcctttttgtccggttcacccaatcatttcactgccgcacgctcatgctgccgcgcaataacactgccgcaattccgcaatctgacaggccccggaaaataccgattcattttatcacactttcacagcccctacaagtaattccccccattcttgcggtattcccccggcgtcttcccgtactttctccggaacagccggttaaaataggatatattatcaaacccgcatctctgggccaccgccgtcaccggatccggggtggtgagcagcattcccgctgccttttccaggcggaattcattgagatactgtatgaacggcacacccatatactgtttaaaatacttcatgaaatgggaattactgtaaaagcacagttccgccccgtcctccacggttatcttctcaccgtagtgttcctccatatactccagcagccgtttcatcctctccctggactttcgcggctgtccggcagcccccggtccccaaatccccgcaatcaggcccagaaaccaaaacagggttccctttacccccatctggtaggcataacccttttttccgcacagctggtccattttcctgatacattccataaaagccccgtaatccggcagaccttccgtaatatgaagaggcttacctatgccgccctctgtcatgggccgtaaaaaattataggtgcagagatcggattcatccgtcatgagcatggaaggaaggaaaatgatattttcatactccattgcctcaaaaccgcactggctgatgccatgaagctgtcccggaaacaccaccacggcctcccccgccccggcttcatagggctccatatccaccgtcaccataccccgcccctttttcacagcgatgatctccatatcctcatgccagtgaaccggaacctggctgaaatcagcaggaatggagcaggggtaaatgttaaaggggaaatccttgcccgcatgctctttcatctcatggtatccatatttatcacgcatgccgtcccgcatctacagaccaccttttatcatatttttgatagtattgtactatatcatcacataattatgcaagattttctttttgcatgccattataatacagacaaacgtacaatcatgccgttaccggcacaccttacggaggaatgtaaatcatgaatcaaaaccaattggaacaaatgctgacagatgcctgcaaaaaagatatttcaagctgcactgacaaagaactgtacacgggccttctctgcctggtaaataaactgtccaaaggccgggaatccgcccagggcaaaaagaaattgtactatatttccgccgaattccttataggaaagctgctatccaataatatgataaaccttggaatctgcagccaggtgaaatccattctggcaagccacggcaaagacctctgtgtcctggaggagctggagcctgagccttccctgggcaacggcggactgggcaggctggcggcctgtttcctggattccatagccaccctggggctgaacggggacggaatcgggctgaactaccattttggcctgttcaagcagttatttaaagataatctccagaatgaggagcccaacccatggatggaaaacacctcctggctgaacagaaccaatgtcacctaccagattccataccggaactttacactcacctcacggatgtatgacatcaaagtcacaggctatggcaaccgcaccaacaaactgcatctctttgatgtggagaccgtggatgaatcccttgtggaggatggaatatcctttgacaagacggatatcagcaagaatcttaccctgttcctctatccggatgacagcgacagggcaggccagatactgcgcatttaccagcagtatttcatggtcagcaacgctgcccgtctcatactgtccgaggcagcggcaaaaggttccaccctttacgacctgccagactatgcggtcatccaaatcaacgacacccatcccaccatggtcattcccgagctgattcgtcttctcaccacagagcacggcatggaaatggatgacgccatccaggtggttacgcggacctgcgcttataccaaccacactatcctggcggaagccctggagacctggcccatggactacttcaaggaggcggttccccagctgattcccattatggaggtgctggacgacaaggtcaggaggaaatttgacgatccgtccgtatatatcattgacaagggcgaccgggtgcacatggcccatattgacatccactatggcttcagtgtcaacggcgtggctgcccttcatacagacatactgaagaagaatgagctgaacaacttttacaggctttatccggagaaattcaacaataagacaaacggcatcaccttccgccggtggctgcttcactgcaatccccagctggctgattatatatcagcactcataggcgatggcttcaagaaggatgcatttgaacttaagaagctggatgacagtacattcacagccaacatgaagatcctgcaccgcctcttagccatcaaggacagtaagaagcaggagctggcagactaccttaaggaaacccaggacattgacattgaccccaaatccatttttgacatacaggtaaaacgtcttcacgaatataagcgccagcagatgaacgccctgtacctgatacacaaatacctggaaatcaaacggggcagcaggccgaccactcccatcaccgccatcttcggagccaaggcagcgcctgcatatactattgcaaaggacatcatccatatgatactgtgcctccgtcaggttattgacagcgacccggatgtaaggccctggctgaatgtggtcatggtaaataattacaatgtgagcctggctgaaaagctgattcctgcctgtgatatctcagaacagatatccctggcctccaaggaagccagcggcaccagcaacatgaaattcatgctgaacggagccgtgaccctgggtacggacgacggagccaatgtggaaatccacgagctggcaggcgacgacaacatctatatctttggtgaatccagcgaaaccgtcatccggcggtacgcagaaggcagctactgctcccgctcctactatgaggcggaccctgaccttaaggaagccgttgatttcatcatcagtcccgccatggcggccgctggttccagagaacacctggagcgcctgtacaacgagcttctgaacaaggactggttcatgaccttccccgactttaaggattactgccggaccagagaacaggctcttagcgactacgaaaaccgcacggcctgggccaggaaaatgttaatcaacatcagcaaggccggttacttctcctctgaccgtaccattgaggagtacaaccgggatatatggaagttagatacaggtctggcaccataatttgtaataaaatcggaaggattttcataaaattttcaaagtcttatgctatcttatgtgttatactattacaatggtataatgaaacatcaaaaaggagcatagtcatgaaaaaactgattacggccacggcgcttttcctggcacttgccacagcgtccggggccgtcccctataatgcggcggataacgcgttctctgcctatgcggtaggccctggcctcaacaacctgtctgtcaaggacggcaaggcctcgtaccagtgggcccttaaaaatgacggccaggcgcaaaaaatagtccaggaactgaatatcgattccctggaccctgcctatgtgcacaggaacaaaagaggaaaggtagacgccatagttcttcccccgttggagccagccaatatcctgaccagcaccattgatgccgttcccggaatcgacatcaatatccagccggcatggcaggcctattcccagatagggccaaagcgccctctgaccgtggcggtcatagacacgggcgtggacatctcccatccggatttacagggctccatatgggtcaatgaggacgagattcccggagacggcattgacaatgacggcaacggattcgtggacgatgtaaacggctggaacttttacagcaataccaaccagatatacgaaggcccggaggacgtccacggcacccatgcggcaggcaccattgcggcctccaaggataacggcggtatcgtgggaatagcagacaacaattatgtaaaaatcatgcctgtaaaagccctgggaggagaggacgggaagggttccccggaaaatgtaattgccgccattaaatatgcggaggccaacggcgcccagatatgtaatttaagctttggatcccggaactgtacagaagaattcaaggcagcgatccgcgactccgggatgctctttattgtagccgcgggcaacggggatgacaacgcaatcggctacaacatagacgcctcccccatttaccctgcctcccttccctttgacaacgtgataaccgtagccaacctgatgtttgacggcacgctggacgcgagctccaattacggtgccgccagtgtggatatcgctgctcccggcatcttcatcctgggcatcactcctgacaatggctatgccttcatgagcggcacctccatggccgcccccatggtcaccggtgtggcagccatgctctatacctccaggccggaattaagcctgccggatatcaaaaacgtaatcctggcctcggcccgcaagacggacagtctgaacggcaaggtattatgcggcggaatggtggatgccaacggggctatgcattggggccggcaataatcaagagcaaggcggacagaacccaaaaaggcagcctccacatctgcaactgatgcggagactgccttcttctgtttcatttataacttcttcttacatcccaaccgcggttattccacgcaattaaacaggataagccttgctgtccttgtcggccgcgctgctgtcaaccttagtctgctgggcagccctgtactcgaagaaatccttggccactgccgggaacagcgcatagctgagaacatcctcatcctgctgcttccactgtgcgcattccttctcaaactgaggaagctgcggagcaatcaggtcggcgggacggcaggtaatcggtgtctcgtcgccgataatctttttctgcacttccggattaaagggcttaactgtctggccgaattcgccaagcatgattttcttggattcctttggaaccatcttatagcgctcgcccataataacgttcataacagcctgtgtacccacaatctgggatgacggggtaactaacggaggctcaccgaagtccttgcgcactctcggaatctcctccagaacttcgcggtacttgtcttcctgtccggcctcttttaactggcttaccaggttggaaagcatgccgcccggcacctgatactgaagggtcttgatattaacgcccagaaccttcgggttcagaaggccgctcttaagggcctgctcacgtatgggctggaaatggtctgcaatctcagccagcagtgactggtcatagccagtgtcatagggggtgccgcggaaggtctccaccataacctcagtggccggctggctggttcccagagccagaggtgacatggcgcagtcgatgatttcgcatcctgcctctactgcctttaagtaggtcatggaagcaacacctgatgtgtagtgggtatgcaggtcgataggaaggcttgtcccttccttcagcgcctgtaccagctctaatgccgcatatggagtcagcaggcctgccatatccttgatacacagggagtcagcgcccatgtcctcaattctcctggcaatatccttccagtaatccagtgtataggcatcgcccaaagtatagcacagcgcaatctgagcatgtcctttttctttgttggtagccttcacagctgtctccaggttgcggatatcattcagacagtcaaagatacggatgatatcaataccgttggaaatggacttctgtacaaaatactccactacatcgtctgcatagtggttatatcccaggatgttctgtccgcggaacagcatctgcagcttggtattcttaaatccgtctctcagtttcctcagtctctcccatggatcttccttcaggaaacggagacaggaatcaaaggtagctccgccccagcactcaaccgcatggtagcctaccttgtccatcttatcgataatgggcagcatctgctctgtggacattctggttgcgagcaaagactggtgggcgtcacgaaggacggtttccacaatcttcactggcctcttttctatctctgccatagttataatcctcctcgttatgagcatttggcgccgtctttaaggcgcttgtgcgatacatgccgcccgcgcccggcaggtgctttcacaggccgggcgaaacggctgtcattgtcaatatattatgccattataccccaaatattgccatgaaggtaccggccgcaacagcggtgccgataacgcctgcaacgtttggtcccattgcgtgcatcagcaggaagttggtcgggtctgcttctgctcccaccttctgggacacacgggccgccataggaactgcggacacgccggcagaaccgataagcggattgatctttcctcctgtaatcttgcagaggagcttgcctaaaagcacaccgccgacggtgccgaagataaatgcggtcaggcccagggcaacaatcttgatggtagttacatttaagaatgcctccgcgctggtggtggcgcctacggaagtacccagcaggataaccacaatgtacatcagggcattgcttgccgtgtcagccagctgcttcacaacgccgctctcacggaacaggttgcctaacatcagcattcccacaagaggtgccgtggacggcaggataaggcataccacgatggttacgatgatggggaacagaatcttctccagcttggatacaggacgaagctgttccatcttaatcttacgctccttctcagttgtcagaagcttcataaatggcggctggatgattggaaccagtgccatgtaggagtaagccgcaaccgcgataggtcccatgatctgggtctgtcccagcttactgcacaggaacagggatgtagggccgtccgcaccgccgataatggagatggccgcagactccttgcctgagaatcctaacaggatggcgaagaaataagcagagtagatacccagctgcgcggccgcacccataaggaagctgattgggtttgcgataagggggccaaagtccgtcatggctccaacgcccaggaagataagggagggcaaaatgctccactcatccagctggaagaagtaccacagaagcccgcctgttccgttggacgtctgttccggagaatacatgatatccggataaatattgaccagcagcataccgaatgcaatcggaatcagcagcaggggttcaaatccctttttgatagcaaggtataagaacaccagggccactacgatcattacatagttgcctgcttccagatggaaaaaggccatctggtccagcaggttgttaattatattgccaaaatccataatgttccctccataatgaatcccacattgctatgggctcatctctttaattagttcagagtagctaataccgtgccggattcaacggaatcgccggtggacgcattaatgctggcaatggttccgtcctgaggagccacgatgtcattttccatcttcatagcctccagaaccaggattacgtcgcccttcttcacagcctgtcctgccgccgccttaacagctactaccttgccaggcatgggtgcggatacgctgacagaacctgctgcgcctgccggtgctgcggccggagccggtgctgccgcgggggccgcgggggctgccggagctgcaactggggctgccggggctgccgcaatgccggatacagcgccttcttctacggttactgcatatgctttaccattaactgtgattgtataattcttcatgatttcaattcctcctgaatgaaaatagttatggaacgtttcccgtcctcttatctgcctttcgacctctgtacacggcggatggaacgaaccaccagtccgttagaagaagttccctcatatgctgcgatggctgccgaaatcactgccaccagctcggcgtcgcccatcaggtcttcgcctgccgcgggcgctggggctgccgccttaacaggcgtgggtgctgccggtgccggctctgcctttgctttctgtcctgtctcccacttgtggatgaacttaaagcaggcaatgagcaggctgatgaatataaggaccgcgaacacggtgccgataccgattactgcatatacggttgccgtttccaacagttgcccaacggtcttgttctcttcttcatttgaagcaagttcagtaaattccgcatctacaatctgctgggaaatcatattcagattcatgacatactgcatggaaccctcggtgaatgtaacaggcagtataacggtataggtaccatccgccatctgtaccacgcttgccttgtcaatgtcgatgcttctgacatctcccagttccttccttacattaatctgctcttcacagatggctgccataaccgcgttgccctgggcttccgacatgaccttctgcgcaatcagcccttccgtgctgacgcccagcgactggactgccgtcagcttggcatactctgccatcatatcatcaacaggagttccgtccgtggcaatccgggaagatgtcacagcttcatcctgttttgctgagcaggccgacaggctcaacaggcaggcggccatcagaactgctgctgccactcgtttcattaatcgtctcatatacctgtcacctctctttaaaccgtgccatgcttcttagacggacggtcctctctctttgtgaacagcatttcaaaggccgcgattaccctctgacgggtctcccctgcctttattatgtcatctacatatcctctcttcgctgctgccacagcgctggactgaagtgcagtgtactctgctgtcttttcattgatgagtgcggcggcatcaccggatgcggcgatttcctttgcatacataatcttaactgcctcggatggattcatcataccaatgacagcgtcaggccatgcatataccacatcagcgccaatagacttgctgcccatggtcaggtatgcgcttccgaatgcttccttaacaattacagttaccttgggaacgctggcattggcataggcataggtaagacgcgccgcagcctttgcaatccttctctcgctgcacatcttggccttgtagccctttacattcaccagtgtaagtacaggaatattgaatgcgtcgcagaaattgataaaatcagctgccttgtcacagcctttgccggacagggcaggctcaaatgtttccttcttctccccgttctcatagatttccgtacggttagccacacatccgatggttgtcccgttcaggcggatgaaaccggtcaccatggaaggctcataatccttcttaacctccatgaagaagctgttatcggatatcagtgtcagagccagagccgtgtcaccggtgcatccctcgatattatcgcagatacggtttaagtcatcctgacactcttcgtatgacatatcgtcctcattgttggctggaaggatggaaaccagggcgcgaatctgggcgataatggaatcctcgtctcctgtgaaatcaaccagaccggattccctgctctggaaatctgcactggaggtatcacacttctctttataattgccgtcaatggcgttaggtgaattaacaaacagtttgccggacttttcttccatgaaggtgaaatctgtgatgccggcagatactgccatgccgccgccgcaggttccaaagattgctgttatctgaggaatcacgccggaagccatggtctggcttaagtacagcttgccgaagccgtccagggcatcggtcgcctcctgaagacgcagacctgcacagtctaccaaaccgattacaggtgctcccatcttcattgccatggaatagatgttgcagattttctttgcatgcatttcgcccatggagccgcctaatacagacgcatcctggctgtatacatacaccaggcatccgccgatggtaccgtagccggtaaccacaccgtcagcgggggtctcctgctcagtcatgttaaagtcagtgcttctggccgttatataggctccgacttcaacaaaactgttctcatcaagcagggctgctatgcggctgcttgctgaagtttgtgctgaattactcattttccagtcctccatcattcataagtttaacaatatctaagcaacggaaatccccttctcaggcccgtcgcaaaaaaaagcagaaatattgccacatacaattataataataaatttgtcaaatagcaagctcttttcctcgaaaagggtgaaaatattaacgaattttaagattcgtaaatacgaaaagagctgtggctttcacaaaatatgtgaacagccccaactcttttttgttacaaacctattattcatttaacccatggaaaaaaatttgtcatgaatgacctgtacggccttctccgcatccttttcgtccaccagtacggatatcttaatctcgctggtggatatcatgttgatattgatgttggcatcatagagggcctcaaacagggttgccgccacgccgggatggttcatcatgccggctcccaccacggaaaccttggcaatatggctgttggtctccagacggccaaagccaatggactcctgatgctcccttaacagcacggaagccgcctccagatcggactgggcaacggtaaagcagatgtccttgccctcctcgtggccgattccctgtaatatgatgtccacgttaatatgattctgggccagcagggagaacaccttaaaggacgtgccaatctcattgggcaccccaatcagggcaatcctagcgatatttacattcttagccacactgctgatatatgatttctccatgcgttttgcaacctccttcacctttgtacctggatgccctgtaaagcttgagagcacctccagctttacattatatttctttgccatctccacggaacggttgtggagcacctgcgcccccagggtagccagctccagcatctcattgtaagtgacctcatccagcttccttgcgtccttcacgattctggggtcagccgtgtacaccccgtccacatccgtgtatatctggcacagatccgcccgaagggaggcagccagcgcaactgcggacgtatcggatccgcctctgccaagggtggtgatgtcgtcatagcggttgattccctggaatcccgtgacaatcacgattttcttctgattcagctctgtctcgatccgctccgtatccaccttcttgattctggcattcctggacacggtattggtaaccattcccgcctgccatcccgtcagggaaataaccgggtatcccagcgcctcgattgccatggcgcagagggccacagacatctgctctccggtggacagcagcatatccatctcccggttggaagcaaggggattgatctcatttgccttctcaatcagctcgtcggtggtatccccctgggcagacagcaccgccactacctggtttccggccttatatgtatccgtgatgatttcagccacatggcgcagccgggcggcgtcagccacagaggttcctccgaatttctgtacaattaagcccatatgtcattcctttcgtccatacattgtatcccgccaaaaagcggcggccccagaggccgccgccagcaagcgcttatatttaattattttacacgctggattttgtttgtcaaccgaatccggccttaactgttatttctccagattcttccacttaaagttgggaaccacatccgaccacttgctgatgccgatgattggctttgcaaattcagtggcctccagggtggcgttcttcttgtcaatatcccggaatacctgccatatcttcttgcgcttggtagccacaatcaggttgggctggttcatgtcgcactcccacaggccgaacttcagtccgtcctttgcctcggacggcgcgtctacctgacggctgaccgtgtaggcatcaatgtacggattgctgtccaccaggtaataggagtaggcgtaggctgccgcctgaatctccggaatattgcctctggtaggactgtaggacgtgaagccctgctccgtaaggatgatgtgtcgcacattgcccgcaggcgccctcagggtatcctgcacaaagtaatccgtcagcacgttcaggttggcaaaattgatgaccggtgaattaaaatcatttgtgaacagccctgtggactgcgggtcatcccagaattccggctctgtcatagggcatggatatggatgataggccaggccccagtccatctgtccctgggtgttggctatggagttaaagctgtccacaatctccttgcctccatacttaagcttgccgtcaatctcgttcatccagttataatccagtgaaaaatatacccggtcattggcattggtgctcttgatggctgtgtaaatgacacggaatgccttctgatatgccttcacataattagtcaggtccatggcccccatgtaattccactgctgattgttaatctcgttgccgatgatccaatttgacaccttgccgtaattaggattgtcgccgctgtaatgctgggccaggaaggacgcgattgccttggtttggtcaaatccggcttcggtttccgcattaaacatgtagtaaaacgcattggaattcttctgtgtgcccggatacaccaaatccggcgtattgggattccagtcattgagcaggataaccgtaaccgtcattcccttgttagatagcgcgctgatggtcttgtcataagcgtccaccacgcctttattaaaatggtacgtctttccgtcatactggtaatcaattccggttcccataatctgggaaaatgcgatgttggtggtcacgtgcttcacgcccaggtcaaaggcgtcgttgagcatgtcaatctcaatcacaagccccttcttagtcagcgggtcattaaaaggcgtctggtttttggcaatcagctccggattggttatgtagtggggctggctgaccttaatgaacttggttccgtcaaatacagccaggacaaaccggctgtaaagcttatcctgaggtgtgcccaggttcaggggcacgcttaccgaggcagcgcttaaggcaggcgaggaagcaatgaaattgctgcggcttcccaactcttcctcgtagggctgcatttcaaagacatagatgttgccgtccgttcccgtcacatccccggtgctggaaaatccaatttcaacgttttgtttatctcctgaaatcttacaggaagtaatctggcccgccactcccggcgtgaatgcctgggcttctgcctgggtctccgcctgagccgtggtcccaaatgccattaaacttcccagaaatacagcagtgcacagcagggccgccgtcagggtcagggccttacctcctttaacgaatggtttcttcatttatgaattcctcccaactttctccaaaataggatacatgatacatcatacataaataagtttactttttcaatgaactttttattacatgtctcttaaattatacgaacaggagtcacatcttcccgttgtgtcccggagcatctgccgctttaccgtatcaaggacggagatatattctatgctattaataaactttctattgatatcttgttatcgataaaatctatattattgataaggcaatacacttgaaaatactttcttcatatgataagttgtctacgttaataataatagaggaatagagaacaaaactatgattaagaaacaagtcgctttagttagtgtttcatttgtcactgccgccgcaatcagcgtgggaaccgcatatctgccagtatatttcgcagtaccgaggattttatatgcaaatataataccaaccgctttggccgcagttgtctgcggtcctttatatggcgcggcatatgcacttatcaacagttttattttaaacagcatcggtatgggaagcggcgtgattgtaaacgtactgttataccagatgctggaggctgccctgattggtttgttttttcacaccaaacacgcaaaaaagacatatgcggctataattgtttatattctattgttttccgcttttgacgcaacacttctgaaagccttttcttacattttatattatacgttccacgtaaacatgacagccggcaaaagcctgatggattatctggcatacaattatagcttttatctgaaatccggaattgcatctaattttatcgttgttctcttttcattaactgcagctgtaatggcgggacgttttattttttggttatgcatggaaaaaggtggatgtcgtgagaccaaactatagtttgacctcaataacataataaattacacgaaggagaagcagcagaatgaaacacatcaaacctctattgctggcaggagtagtttcgtttgcggtaatgggctgtgggaaatcaccggctccgcaggaagaaacatctgtcaaggaaacaattgccgccacggaaaaggaatccgtggccgcgaaggatgaagcccaaacagttaagcttttgaaggcggacgcgctgacggatgatatgcagctggtagacgtccgtgaagaagaacagtatattggctggaataccgggaataaaccggggggacatattgcaggcgccgtggattttccggcaagctggctcagtcagagcccggatacctatgcaatcagaacgacaatggaaaacgaattaaagcgccgcggcattgattccgaaaaaccccttgtcctttacggagatgatactgtaccggaggaaacagcttccatgtatgcggaactgggatttaaggacatctctgttctggaaggaggcttctcatcctatttggaaacaggcggggaagcggcaatgctgccggggttcagcctctatgtatatcccgactgggtacaggcactgatagacggaaaaaagccggatacgtacgagggttccgattataaaattattgaagtctctttaagcagtgaagagggagaatacgaaagcggccacatccaaggcgcaatcaatataaaagacactttcaaccatgttccggggcttcgtgtactttctgaatatgagaacataccgatggaggaacaactgaaattctggaatcgtccggaagattccgtgattcaggaaaatctggaaaaggccggaatcacgcagaataccaccgtgattttatatgccacaacaccggccactaccgccgcgcaccgtgcaggggtcttaatgaaatacgcgggtgttaaggatattcgtttcttaaacggcggaaaaacactttggaaacttcaaaacaggcctctggagacagaatccaatataccggaaaatgtttcctttggaacgaaggttccgtctaatcctgaccttatttatgactatgatgaggaactgggatgtgtaaacgacaatcaggcggtcattgcatccatccgaagctggaaagaatatatcggaaatgtcagtggttatacatacattggcgaggccggggatattgccaaagcgcgttttggttatgccggctcagacccttacagcatggaagatttccgaaatattgacaatactatgtttaactacgaaatgattaaggacagatgggtaaaatgggggattgttccagataaacgtatttctttccactgtggtaccgggtggagagcaagcgaaacatattggtattctctggcattgggatatcctgacattcatgtgtatgacggaggctggtatgaatggtccaaaatgcctgacagcccgaagaaagaaccaggagtgcccgcagacgcacctgaacaggagccggcagaatactttataccaaaggaaaagtaagacaagaaactgaaaaaagttctgaaaacagggaaggtttcctgcatacactatctgcaggaaaccttcccttccgctaattcatagagcctgtcgcacacagacgccagctccctttcattgggggaacagtatacaacaccgattcccctgctctttgcaaattccagaaattccctcactgaattccgcatcaatatgtccgtgcccgaaaacagattatctatgacaatcagccttgccttggctataatccacttatacagggcaacattcagctggcaccgatggctcagtgtctcaattggccgttttagatcctcctcccggatatccagcagcgtcagataatcacaggcaaccgcctgttccagcttctcccgcacccccactccgggagcaaaatattccagaccggcaatggtcaggttctcggccacatccagcttaggaaaaaggctctttttgtaatcctcaatatatccaaaaccgcgtctgaccatgttctttctcccccctgccagctccacctgacgtccagccagccaggcgcttcccgattccaccttaagctctccgctgagaaggcgtacgatttcccggcagtatgtgtcctccggatggatgaaacccaccacctccccgggacacacatgaaagctcacgtcccgcagttccctggcccgcacctcccgcacggacagaagcaccgcccgccccccaggctctgcctgggaccgggtgatttccctccccgccttccggttctcaccgattataatgcggtcgatcatctgccgttcaaattcctcccggtacaatacggctgccagacgcccttttcacaggaatcagtcccaccttcagcgtcctgtccttgatggagcgcggctggacagcatactccccgttttccggctcagcttcctgactctctgtctccttggctccctctgccttctcagtctgctctgtctcagctttggcctcctgtgtctgggctgcagtagttgtctctgccggcttctggttggaagtggcacaccccatcagagagattgttgttgccgctgcaagtagtaatgctaatcttcagatgtttggaccatacgaagatacctcgccaatttttaccatgaatcactgtccgactcgtctgtgctgtcggcttcctcttccccaccggccggattcatattgaacatataactgaaatccccggcaccgtcaagcaccaatctgcctctgtaacgtttataatcaaaatatgaatcaaattcacttccagggcttctgacttcaaataccatcggaattctttcctcttccatagtccttcgtatacttcccacatggccgcccgcggtattcccggaacacacaagatatgtatatgttttttggaagatttcttctgtcattcccggtatgcccctgaccgcagattccaggtcctttaccataaccccacggttggagacataggataaaagctctgccggagccatccttggcatcagtccccagctgttcttggctcttgagtctgcaatattaaccttactgtcagacagatacaaatcagccagatgagaaactgcgcataggatgtaattgtatatctccttatcacgttcattcgccgtaccttcagaaggaacatatgaggtgtcatatgtccaccacagctccattccatactcttcaaaaagggcccgtacctcatcaaatcccatgccgaaagatatctggttatttcccataacatccttgactataaaagcgttacataaaagttttactttaaattcttttaaatcagcattatcctccaaatctgtatacgccgaaaacgcttcatttacctgtgttttagtgaccatgcccggtacagccccctgctcggcggaataccgttccagaaagtcctccaaaaatgccatgattctgagattctgattccgctctttttcctggcctattttaagaggctctgtaacaatctcaatggtcctggtctcccttcccatgtcggaaaacaaacgtattaccgtatcacctccatgggtcacctccaaaaaagtcatgctgtcaggtaatctgttcagggcaaaacgcactttataaggcagttcgcattccatgccaaaggtccagtctttatgactgctgtatttctcactcattacttctttctccttatattttattgagaaaagcttttctgaacctagtataagtatatttcgtcacagacggacatggacagcatggtttgtacatttcctgtcatccatggttcacgaaatgccgtatcgcggcccgggaatttttacgcaaaaatccccggcaaaggaatcatccatcctccgccggggcattctcgcactcagcaacatctcatttattcaaaatcaatcatacatcagccggctaactctatgccgccagccctatcccgtcaaccaacctctgccacccggaatcctttggactccagcatatccctgcactccccgtccaggtgcatacagtatactttatgcctcagctcctccggaaccgtctcctccaggactcccacatagcagtggctggggattggcggattgtggagggacgtgtcgtggtaaacggcgtccagatccccttccttaagcatgccggcgatccgctccggcattcgcgcggaatcaccgctgtaataaatcctcattttctctgtctccagaatgtacccgaagcagtccatattgtccgcatgctccaccggcaccggttcagcccgaagacagtccacttcctcaggaagtcctttgtaataattgtaaaattcatccttaatgcccataagccgcagaagctccaccacggttgccctggggtgaatgacgctgatttttcttcccaaaatacaataattgtaagaaatcagagacccaaggcttcccacatggtcagcgtgaagatgggtcaacagtacatatatctgcctgtattccctgaggctgctgcgcttcatcaaaagctcgtaaaccgtctcgccgcagtccaccaggaacaggcatccgtccgcctcaaaccaggcagatgtatttcccatggcaggattaaaggcgctgccgcatccaaaaaaatgcaggtctaaatattgttccataacgctcctcctctcatgctctctcatgccctcctttattccttcatcactctttgattccggcgctgacaaagctgttcataaactgcttttgcaggaagaagaacgctatgagcagcggcaggataatgataaaggtagccgcgcagacattggcccactgcatgttggcctccttggacttggcgaagatggcaagtcccactgtcagtgtgcggttggagggtgaattggtcacaatcagaggccacaggtagttattccagtggtagctgacggaaataaccgcaaaggacatataggcaggctttgcacagggcatgtacaccctccagatggtctgccacgtgttggcgccgtcaattctggccgcctcagccagagcctttggtatggatttaaaatgctgcctcagcaggaaaatggccagggcgcttccaaagaacggcagcatgatacccaccttagtatcggtaagtcccatgtcagccagggtcatgaagttaggtgtgatgagcacatcattgggaatgataatctgcataaaaatgactgcaaacaccagggtccgtcccttaaaatccatgacagccagcgcataggcagccagagtggatgtgacaaactgtacgcagaaggtcaccaccaccagtatcagcgtattcagataataccgggcaaagggaatggcattccatacataggacaaattcccaaaggtaaaacggctgttgggaaaaaaggtcatatggaaggtaggctcactgaaggcagtccccaccagccataccaggggagccagccacataaacgccagggccagggcaaaaacagatattgcagtacttttaacttgtttcataccggctccctcctttaattgtaatgtatcttcttatcctggctgatgaaccttggcagggacaccacaagcagaagtcccagcatgattacggtcagagccgatgatacgccgtagttgaagtttgtgaagccctgctggtaaatatagtacagaagcagggtgcttgcattgttgggcgctccctctgtcatgatgaccacatggtccaccagcttaaaacagttggtgaacgcaatggtggacacaaacaggaaggtgggcgccagcaggggaatggtgatgcgcctgaacacggtccagttgcctgccccgtcaatcctggcagcctccatcacctcgtcggatatgctctggataccggacaggaagaacaccatcaggtatccggcctccttccagacatacatcaccgccatggccgggagcaccgtattcttgctggacagcacattcatgggttttaaccccatggctatcagcagctggtcaaagagtccgttctttgccatataaataaacatccacacgctggcaatggcaatcatgggcatgaccaccggatagaaataagccgtgcggataaatcccacccgtttgcccttgcggtttaccagaaccgccaggccaaggcccaccgccatactgggaatcaccgtcataagggcgaatacgatggtatttttcatcaccttccagaacagcttggaaccggccagcttcacataattctcaaggccgatgaactcggcgctgtccataccaagcttgtacttggaaaggcttagatacaggctcctgaatatggggaacactgtaaatgccagcataaatataagcgccggggccatcagggcccaggccgtcgcattattcctgttttcacgctgcttctttgtcttggttttcatcctctcaccagccttttcatattccgcctgccgggccgggttttgtgacatgtcccggtctcttaaggcgctgtgtatgcccggtcatggggcaaaagccttgcctttgccccacatggcaccgggccacagcgccttacttgttcctaacaggcattacattcatgcttcacagattttactgatactctgacaggacttcctctgcctgttcctgggccgcatccagggcctcccgggcagacatatcgccgaccacggctgcctggatgttatcatttaacaccctccagatttcagctgcattgtatgtagtaagctcaggctttgcatagggaagctgctcataagcaacggacgcctggggaacctctgcataataatccttaatcaggtccgtgtcaaagcaggactgtcttgtggccacataaccagtatccaggctccactgcgccgccctgtccgtagaggtcgcgaacttgatgaacttccaggcagcctgcactctgtcctcggaaatgccgctggagatatagaagttgccgccgcctgtaggcgctcccactctcttgtgagccggaaggaaggctgtcccaaaatcaaagtccgcattgtcatggatattagccatattgcctgtggtgtggtaaatcatggccacctctcctgcaaggaactgggtgggcaggtcggtccactgtacaataccctccgccatacatttgtactcattctgaaggtccagccagaactgaagcgcctccacgttctcaggcgtgttgaaatacacgctctttccatcctcgctcatcaggttctgtccgtcggtgctgttctgcaggcagaagcctgtaaacgcccactgtgcggaaccggagttcagagcgattccaacgccgtagcgtccgtcgtccgtcagcttctggccgtactcagccagttcttcccaggtagcgggaggcgtttccgggtccaggcccgcttccttaaacgcgtccttattgtaatacagaaccatggtgcttctctggaacggtatggagtatatctttccgtccacataggaatcttccatgaagcccggaaggaaatcatcgatgtaagcctttccctcttctccgtcagcctcaatcagttcgtcaagaggcatggccatgccggtggaagccatggtaaaacgctgggtagcgaggcttacaaacacatccggaggcgtgccgccctgcatggctgtctgaatctttgtcactgtatcgtcataattgcccgtataaacaggctccacgaaaatatccgggttctctgcattaaaatccgcacagattttctcaatcagctgtgccgcggaaccgcctacattgaccgggtaataaaaggtaaggtgcagcgcgccgtcgtcagccttggctgcatcatccttggagctattcgtgccccctcccccggtttccttagactgctctgccggcgccccgtctgtcccgttacttcctccccttccggaacatcctgtgacggcaagacctgctgccatggtcatggccaggaccgctgctgcaatcttctttgtttttttcacaatacatacctccttttatactattggaaatttgtcatctgttctgtaatttcatcatagcattgtatttgaaacgtgtcaatattattttaaggcattttgcacatttttcttatactttaatcagtttttacatgaattttttctactttttgcatattttttacattttaacgtgtttttatttggctgtcccctctgtagattgcgtattttattgaatcgtagttgcaatagttttacaaatcacccgccatatggtaaaattgaatcaaatatatctttataaagtgcatcatttgaaaggagagccggcagatgactaccatcaaagacattgcgagagcggccggagtggcccagggcaccgtatccaacgttctcaacgggaagggaaatgtgagcagcgagaaaatacggcaggtcatggacgctgccgctgcccttggctacgtgcccaatgagcgggccaagctgttgaggaagggcaggtccaatacccttgcggtcattctccccaacatccgttccaaacaatatatagacttctatcttagttttaaggcatatgcggaaaatcacggctacagcgtgtcccagtacctgaccagcgacgacaaccgggaagcggaatacgcagccatacaggaagtccgctcctccatggcccagggcatggcaacggtctcctgctgttccttcgccggcgccaacccctacctggacgagcagggcatgctggcggaccatgtggtatttgcggaacgccgtcctcccttctctgccccctatgtcggcttcgattaccacagggcgggaagcgagctggccttaagggcgctggagcgcggcttctccaacctgtgccttctcaccggaagtctccagctgcccaatgaatccgacttctataacgggttcatgggcgtcatgggttcatccggctgccgggtaaaccacatccagacagacccctaccgcaagctgcagaatatcatgcagatgttcggaaacgccgctccccaggccatcttcatctccaactacggcttcgcggagagcgtcaaggatatatggaacaccttctattccggggacagtccggaaatttacacggtatcccccatgttcaccatgccggaaaatgacttccagaaatatgagctgaactaccggcagttgggaaagattgcggcggaatgcctgatcagggacatatcagaagaaaaggcgaaaaagagtggttcggaagaaataggcgaaccgcaacagcggaccggacaggccagcggacatccctgcctgctgctggagaattccggcttcagagactggtttgcgggcatcctcatcccatcctccaaagagcccttaaatgtgctgacactggacagccccagcgcctacaccatgcgcaacctgtcccgtatctacaccaagaaaaccggggtccctgtgaacatcaccatctattcctatgaggagatatacgaggccttcaaccatatgcgccatgattccgtctttgatgtactgcgtctggacgtgacgtggctgtcctggttcgcggacaaaattctgcagcccctggaccagattgaccctgatatctccagctgcctggacaccttcttagacggaaccatcaaccagtattccatagtgaggggcagggtatacgccctgccgtccactcccagcgtacagctgctgtactaccggaaggatctgtttgaaagtcctatctaccgcaggatgtatcacgagacataccgccaggagcttaggccgcctcaggattttagggagttcaaccagattgccggattcttcaccaaggcacgcaccccatcctctcctgtggaatacggggccaccatgacgcttggctccaccggggtggccggctccgaatacctggcccgcctgttcagccaccaggagaatctttataacgaggactgccgggtcaccctgaattcccccgcggccattggttcccttaaggagctcatcgccctgaaggaatactccgaccccaagtactgttcctggtggaccaacacagccaccaccttcgcgggaggcaatgtggccatggccatcctctacagcaactatgcctcggatcttctgagccactcctcccgggtagcgggaaatatcggatacgccatgacgcctggcagcaatcctgtcatcggaggcggttccctgggcgtggccaaatataccaaacgacctgaggacgctctatccttcatcaaatggatgtgcagcgaacccgtggcctccgcggccacgctgctgggcagcgtatccccctgccgcaagtcctatgacaattacgagatactcaacaccttcccctggctgaacctggccaaggacggattcggactggcccacggccgccgtacccctgagttctccacacagccctttgatgagcgcagcttcctcagcatcataggcatggcagtgaaaaatgcctacagccaggtcatgacgccggaggacgccctgaattacgcacaaaagctctatgacgaacagtttagccgcaccaatatataaacgcgccttaaaacacaagttccaggcaggacatccctttgagggttccggcctggaagcttattttaagacgcgcttttctttgtctcagcacagcttttccatgacagatgccgaggtcttttcattattcacgctgcacctgtcatagtatgtcctgtaatattccgtgtacagcatatctatcaggaagagctggctgatttccgccgaggaagagcctgcctgcaacggactttcattggccccgcacaggagcgtcaggtccgcataggccgtaagaggcgatttgatgaaccgggtcacacagacaatggccgctcctgcctgcctggccagctgagccacgtggatggtgtccttggtagccccggaataggaaaagatgacagcaacctctccactggacatggtggaggccatcatggcctgcatgtgggaatcagaggcacaatagaccttcggctcaatcttcagaaacttatcagccgccttcatggctgtcgtcatgctggtacccacaccgtaaaaacagatgcgtccggccttgtggaagcactcaatgacccgccggaacacatcctcctttaacagggagtgggtttccttaagagcctttatattggaactcagcaccttctccgccacctgggaaaatgagtcctccaggcttatgtcgctctccatctgtccgaatccctgttttccctcgtgaaggctcagggacagaagcatcttaaattcctggtatcctttgcagttcatggtcttacagaagcggaacacgctggtatcccccactccgcaggcttcggccagttcagtgatggacataaacagaaccttcttggggctgctcaggatataatcagccacctttttctccgccttcgtaaactggttatacccgcctcttattttcaacaaaaaatcctctgccattttccttcctccttatgcggcccgccctgtgaaaaataaatttactcctattataaaaaaaaatatttcttttagcaagaaatgtagtaaaattaaattaaataattgccattttcaaagaggggggctgtattatgaggcatattccaaaaaaagagcttttgtccatccccaacctgatggggtatttccgtttaatcatgattcctgtattcgtgtggctgtacctgagggcttccacggacgcagattattacagggctgccatcgtcatgggcatatcctccatcactgacatgttcgacggaatgatcgccagaaaattcaatatgattacagagttcggtaaactcctggacccccttgctgataagctgacccacggggccatcctgctctgtctgtggagccgttatcccctgattctgcttcttctggtcctgtttgtgctgaaggaaggcttcatgctggtcatgggcgccgttaaactcagggaaggcaaaaagttaaacggcgccaagtggtttggcaaatgctgtaccgccctgctgttcgtggtgctttttctcctgctgctcttcccccacatgtccctggttacggtcaatctactgattttgttgtgcgcggccgccatgctcatcaccctgcttctctacataccggtatttcgcagtatgtgaccaattcagtgtgcggcagaaacagtatgcggtaagggcagcattgcggccggagcagtatgccctttactgccgcgcttccttatacactctcttaagggtgaagcccctgcctctcacctcattaatctggttgataatcatgaatgcctccgggtcttcatccatgaccaggctgttcagcctaggtaaatcccgccgggagattaccgccagaatcatttcctgttccctgtggagataaccggtctccatatgcagcagggaggttccgcagtcaatgcgctccgctatgaggcggttgatttcctcatgctttctgctgacaatcttaacctgtattctggcatttcccgacataaggacctggttcagcaccatggtgtatacaataatcagtatgataccatagagaacggcatgggaatcagccgcaatcagctgaaggcccagaaccacacagtccacgaggtacagggtcatggacacatttacatccagctttttcttaagcaccagggcaggtatatccatccccccagtggaggcgccggcccgcatcactatgccgattccaccgcctatgagcagtcccgcatagagcaccgccaccagcttctcctccagcacaaagcccccgaatccgcttccctccagcacccccagtatgaccgggtagataatggtgctgagcacggttgtcagggcgaactgttttcccagcacccatgcccccagcaagaacatgagcacgttaaacacgctgacaaaaaggctgatggggatgccaatgctatggttcacaaagagggccaggcccgtggtccctccggtaatgagtccgtttggcacaatgaacagcaccactgccgccgcgtacattatatttcccaacacaatctcacccaggctcaatacaatttcagccgtcgtctttttcttttccatgattttagtcctttctcactgcaccggaatgaattcctaaattaaaagacggcagttctctctgccgtcctgacgtctcaaaccttctataatacaggctcccggttccgccggggccttccctgtacgctttcagtaccatcatgttctgtccgttctctgtttcgtataatgaatcctgcgttttatggtagcatgtttccccaaacctgtcaagagccccttccatccgggcgtatacgggctgatgctgaccaacctgcttaacgacgtcatgctgggcgaacccgaaatcatccctgccccggttggcctcggggtgattgacccggacttcatcaacatcatgattacaggacaccagcactccatcttcgtccatctccaggaacagcttaggaaaccccaggtccaggagctggcaaaggcagcgggagccaggggccggggatgtatgcggcctgtccggcatctggcccaacgccatgaagcagggcgtcatcgctgccaaaaacatgtacggcatccccaccccctatgaggacacatacgccctgaagaacaccatgaacttcttcggcctgccggcactttgcattggggatatcaactgtcttgacagccgcactctggtcataacagaggaggacagcaagaactacaaaaaggccctggtggaggacggcgtattaaaaagcatactgatggcgggaaatatctcaggcagcggcatttaccagtatctgaatgaactaccccgcagcaagctgcggggtatcgaaggttgcaacctctacatataatcccatatgctatactgctttgttttctctacgtttttatagattgttttataatttttttcctgtccctgttctttcacatatctacttatgatttgctcattcccatgttcactcaccgttgctacgtaatagccatctgtccagaattctcctccccacaattttttcttcacttgtggacatttcgcgaacacctcccgggctatgatgctcttcactatttggatgattttttttggactatatgcaggcactgactggataagaaaatgtatatggtctttatctgtacctacttccaaaaatcttatttcatacctttcctgaattccctcacacgtttctttgattaccctatctacatcttcatctattactactcttctatattttgctggacatacgaaatgatacatgagtactgatacattgtgtgacttgcgtattgtttcactcatcacacaatttctcctttcctttttcctctagtatatcacttcctccatgtcttgaaaaagtttgttacgcagcaagctgcggggaattaaaccctctttttgattaaaaaccagataaaacttccctctgccggccggagtattttcaggctgtcatttgctgatttctatggctttgacacgtcaaaaggagcctatacgtgggacacggacctgcgccgcggataattttcactccagatatcacaaaaacccccgaaagataatcttccgggggtttttactgtttggggcacaatatcaattcagatatattaatttatgatttaagcgtataagcttgccgaaattattcgatgatgcttacaactctaccagaaccaacggttcttccgccttcacggatagcgaaacgaagaccctgctccatagctaccggatgaatcagctctacggtcatctctacgttatcgccaggcatacacatctcaacaccctctggcagatcgcaaacgccagtaacgtcagttgttctgaagtagaactgcggacgatagttgttgaagaaaggagtatgacggccgccctcgtcctttgtcagaacgtaaacctgagcggtaaacttgttgtggcacttaacggaacctggcttgcacagacactgtcctctttcgatttcagttctctgaacgccacgcagcagagcgccgatgttgtcgccagcctgagcctcgtcaagcagcttacggaacatctcgataccagtaacaacggtcttgcggacatcctcatggataccaatgatttcaacttcgtcattcaggtgcagagtaccgcgctctactctaccggtagcaacagtaccacggccggtaatggtaaatacgtcctctacaggcatcaggaatggcttgtctgtctcacgaactgggtctggtacccaagagtcaacagcgtccataagctcaaggatcttgtcgccccactcgccggaaggatcttccagagccttcagagcagaaccctgaactacaggagtatcatcgcctgggaactcatattcattcagcaggtctctgatttccatctctactaattcaagcagctctgggtcatcaaccatgtcgcacttattcataaatacaacgatataaggaacgcctacctgacgggacagcaggatgtgctctcttgtctgggccataacaccatcggtagcagctacaaccaggatagcgccgtccatctgagcagcaccagtgatcatgttcttaacgtagtcagcatgtcctgggcagtcaacgtgtgcatagtgacgattcttggtctcatactcaacgtgtgcagtagagatagtgattccacgctctctctcctccggagccttatcgatattctcgaaagcaacagcctcgccggtacctaatctctcatgaagagtctttgtgattgctgcggttaaagttgttttaccatggtcaacgtgtccgatggtaccaatgttacaatgaggtttgtttctttcaaacttagctttagccattttataacgtcctccttaatttgcgccctttatagtgggctattatagttaatgtcaggctatcaaccattatattctattttcctttagtttacaagccttttatcaagaatctatcttatttcttatggtcggaaagtactttttcctgtacattcttcggaaccggctcatacttttcaaagaacatggagtagttaccacgtccctgtgttctggaacggagatccgtagaataaccgaacatttctgacagcggtacatatgcttttaccatcttgccgccgccgatgtcttccataccctcgatgcgtccacggcgagagttgatatcaccgataacatctcccatgtactcttccggcatggttacttcaaccttcatgataggctcaagcaggattgggttgcccttttgcatagcttccttgaatgccatggaaccggcaatgtggaatgccatctcagaggagtcaacctcatggtaagaaccgtcgtatacatcggcatgaacgcccagcactgggaatccgccgaggataccggtcttgcatgcttcctcgataccttctccgacagcagggatgtattccttcggaatggcaccgcccacaacggaggaagtgaacttgaaggtttcttccgcgtttgcttccattggcgtgaagtgaaccttacagtgaccgtactgtccacgtccgccggactgcttcgcatacttgctgtcaacgtcaacagcctttgtaaatgtctccttgtaagcaacctgaggcgcgcctacgtttgcctcaacgttgaactcacgcagcagacggtcaacaataatgtccaggtgaagctcgcccatgccggagataatggtctggccagtctcctcatctgtacgtacgcggaaggttgggtcctcctcagccagcttaaccagcgcgtcgcccatcttatcctggcttgccttggtcttaggctcgatagcaatatcgataaccggctccgggaattccatggactccaggataaccggattcttttcatcacagatggtatcgccggtggaagtcaccttaaatccaactgctgccgcgatgtcaccggagtaaaccttatccagctcgtttctcttgttggcatgcatctgaagaatacgtcctacacgctccttcttgcccttggttgcgttcagtacgtaggaaccggagttcaggcttcctgaatacacgcggaagaatgcaagcttaccaacaaatgggtcggtcatgattttgaatgcaagagctgcaaagggctcatcatcagaggaatgacgctcaacctcgttgccgtccaggtcagtacccttaatagaagggatatctaacggtgaaggcataaattcaataactgcatccagcaacttctgaatgcccttatttctgtaagcagtaccgcagcataccggaatagcggcacactcgcaggtagctttccttaaggctttcttaaggtcatcattgctgggctcctcgccctccagatatgccatcattaaatcgtcatccagctcgcagattttctctactaactcggaacggtataactcggcatcatccttcatatcctcagggatatcaatgatggatatatcgtcgcccttatcatcattatagatgtaggctttcatttcaaacaggtcaacgattcctttgaaatcatcttccttaccgactggcagctgaatgcagattgcattcttgccaagtctggtcttaatctggtctactgcgccgtagaaattcgctcccagaatgtccatcttgttaatgaaggccatacgaggtacgttgtaggtgtctgcctgacgccatacgttctcagactgcggctctacaccgccctttgcacagaacacgcccacagcgccgtccagtacacgcagggaacgctcaacctcaacagtgaagtcaacgtgtcctggagtatcaatgatgttgatacgatgctctaatgcacctggcttcggcttgcagttttcctgtagggtccagtgacaagtggttgcagcggaagtaatggtgatacctctctcctgctcctgagccatccagtccatggtagcagtaccttcatgggtatcgccaattttatagtttacaccagtgtaatacagaatacgctcagtcgttgtggtcttaccagcatcgatatgggccatgattccgatattcctggttcgctccaatggatattctcttccagccaagggattttcctccttaaataatcaaacaggttaaacacattccaaagattagaaacggaaatgtgaaaatgccttgtttgcctctgccatcttgtgcatgtcttctttcttctttacagatgcacctgtgttgttggcagcatccatgatttcatttgccagtctgtccttctgggtcttctcgcctctcttacgggagtagagggtaatccagcgaagagccagtgtctgtctcctctcgggcctaacctcgataggtacctggtaggtagctccaccgatacgttttgccttaacttccagaacaggcatgatgttgttcattgcttcttcaaaaacttccatagcgtccttgccggttgtctccgcaacacggtcaaaagcgccgtatacaattttctgcgcaacacccttcttaccatctaacataatgttgttaatcagcttggtaacaaccttgttattgtagattgggtctgccagaacgtctcttttctgagtatgtcctttacgtggcacgttacttccctccttaatagaactgtaaagacctgcgctgcagatcccttacagcgtttcattagatcataggtactcgtgctttgagtgcttagcgaggtctctcacgagcttagcaatcaagcacacctgcgaagcgagcgcgtctttcagcgcgacactgagcatggtgcctcctgctgctgtttttcctctgcaccttccacacgttcatgcacggtactacaatatataatcctgcaacctacaggtcaatatcatcattccggcataattcctacaaatcaaatttgcggtctaactaagttatttcttctcttttggcctcttagcgccgtatttggaacgggcctgccttctgttcgcaacacctgctgtatccagtgtacctcttacgatatgatatctggtacccggaagatcctttactcttcctccacggatcagtacaacactatgctcctgaaggttgtggccttctcctggaatgtagcttgtaacttcgatgccattggaaagacgaactctggcaatctttctgagtgctgagttaggcttcttaggggtagctgtcttaacagctgtacacacaccacgcttctgtggagcagaaacctctgtagccttcttctgtaaggagttgtaacccctctgcagagcaggtgcagtagacttcttaacgctggtctgtcttccctttctcactaactggttaaatgttggcattcttttcacctcctgtgatattgtctgcggttgctgtatatcagctttttgcgcacgaaaacattacgtgtttcagcacgccatatcattatatacatgcaaaaaaattctgtcaaggaatttctttatttttttcgcaatttccggcaccaacggccctaaaacccgcccaaaagagctgtatatgccagcgtgactgcgaaaaacaccagaatcatggggatgtttctccttaccagggcgccgatatccaccttaaagcactccgcggcaatgaacaggcacacatgggtaggggatacctgcatggccgcataggcagaacccataagcagcaccagcaggggaacacccgcctcgggcatggccgccatggccatgggcatacacagaggtatgatggcattggaaccgctgatgatggtgccgaagaaaaatataagggcaaacaccatgggaagcggaatggacaggcctccgaaaaataccggcagttcgtggataacccccgtgtaggtaataatgtccttaaacatcatgattaatatggtattaaagataatgaccggctcaaaagccgtcctgaacatgggcattatctcccgcggcttcagatggtccacaaagatattgagaatggctgccatcggtgtggccacatagaccggtatgtcaaaggctatgatcagcatcacaatcaacaggatggaccacagactcttaaacagcatggctgccgcctttttcctgcctccctccggcttctgccccgtggacctgggcaccttcctgagataaaagatgtgaccgataaaaaacagggccgccaccaggggcagcatggcaggaacgaattcccccgctcccacgccggacacagccagcgctatcaatatggaggagtaggtgggcagaaagctctccggtatatggcggtaaaaactggtgacacaggtcatgtcctcattgctcaggtaatcctgacatgaggatctgacaatctccgcacagattgtcatggcccctgcagagggaagcaggccgatgaccgcaggtgccgcggacgcatttacccggcggttgttaaacagccagtttaaggactgttctgcctgctttaggcggttcctgcgttccagcatgcgctgctgaaaggtgataaagtaaaagcttaagaccaccgtaaccgtgtccctgctgaccagggatcttcccatgatggaaagggcgtcggatacatggactccgtacagaatgagggcagcggccaggccgcctgagatagcccagaacaaaggccgcttcatccagaggatggcaataattacagcaaacaccagacagagcttcattattaatatattcatttcttattctcccatacacattattacagctgccatgatataatcctaccatggcagctgccttgactgctgcttatttttcaggttcttttttcttctgatctccccctatgtagtccacatccaaatcctggggaatctctttctttttcaggccggcgcaggcataaacccatgacacggccagcaggcccagcagcaaagcgacagactgtttcggcatggacgccagcagggatgatgccagcaccactgcggtgactgctccgaatacagaccagggcttgtacagtgataccggaatcttaagctttgtcctgcccgcacactgggggtactttgaggccaggaaccacagggatgccagcaccagtaccttttgcagcagggataccgaggtgctcagcttggagataaaacccaggtcaaagccggtcagtatgggccccatgcccagcacataaaaaaccgtcaatatcttccacgccacgccgcgctccgtgacagttgccagagattggggcagaagtccgtcctcgcaggccacaatcagtggctttgtcacccaggagagctgggcattcagcgtagacgacgttgctcccagcgctgccccaatcacaaacacgtaatacaccggccttggaagcacctcaaaggccacgatggtcaggttctggtccgctaccttatcaataggaaatactcctaccgccaccagggccaccagaacatacataatgcccaccagaactgtggatataatcatgacaagcgggatatccctgcccggattctcggcctctccgcccagctggcagataacggaagcaccgcctgtggcaaagcttaaaagtgccagggctgccatgaaatttggaatccccttataaaacagatgtccagtctggaatatatatggaaagtccgccttaggcagcccaaaggccgcaaaagccaggattgcgcctgtcataacagcacatataatggtattcaccaccgcggcctgctttgttccgatgatattgaccacaaacagcacggtcagtataacagccgctatgaaaatctggctcatcccggtaaacaggcttacaaaataagaagcaaaggacagcgcgtacagtgacaacgtactgctggatataataaataatacaatatacaaaaatccgaaccgcttgtccagaagtctggacacatacttataaggaccgcccaccgcaggcgcgcaactgctcagtatcccctgcggaaagtcggttatcagcgtcagcaccggcgatatcataaaggtcagagctactcccgtacccgtcatgccgattgcggttccggtcatggtcatgatacccgctcctataatctgcccgattgccactcccatcaggttccaaaaggtcaaattccgtttcagtctgctctcttgtctctcagccatagttccctcccaaatacattttccctatctcgtctccctttccgctctcatctccagaagttcctttaactcctccggccccggaacgtccccggcgtttaccccatatctcacgtatgtcagacgtaattcccggtccaccacaaacacggcgggcatctgaagctcctccccctcgtactccttatgagtaaaccattttctggcctctgccgcctttgcctgggtgtccccgcccataagctggctgctgtccgcggcaggccggatctccagagcctcatacagtctgcgctccgggtcgcaaatcacggtatatggcagcacattttctcccagctctctccgtaccgtctccggactcgattggagcaccacgcagaaactgccgcctccggccgtgatctcactgtacttttccgtataccggtgcatgtcgtactggcacaaagtacatccatagtagcgcaggaaaatgaaagcaaacctgttgtatgcgccgtcctccatcagtcctctgacagagtcctcccctgcatatggcgcacaaaatttaaaatccggcatcctgttcccttgctgtaaacgcgccataatccctcctaaagcttcatgtgctttttataagctgccgccatgcgctttaaggcatccgtcagtacctctgtagggcaggcaatgttgatacgctcaaatccttcaccttctgggccgaatatgtaaccctcgtccgtgaagaaataagcctcctccacgttaatccgctccagttccttataatcaattcccagctgccggcagtccagccacatgagataggttccctctaaaggtgttaccttaacccacggaagttccttatctataaaatcctccacagccttcctgttgcggacaagaagctggatacattcctcaagccacccgtcgcatctggtgtaggccagttcggtactcttatagcccagcacgttcagacggttgctctgtgccgtgtacagcagctgcgtcatataaatgccgcgtttttcctcgtccggtatgaatatacagctggactgcatgcccgccaggttgaaggtcttactgggtgcaatacatgtcatggtatgggcctccagttcgctggaaatattcgccataaccgtgtgctcatatcccggcatgattaagtcgcaatgaatctcatcgctgacaataaacacatggttgtcgatacagatgcgtcccaccctttcaagctcgtccctggtccacacccggcccaccggattgtgagggctgcagaatataatcagcttattttcaggctttcctgccatttcttccagaagttcataatcaatctcatatctgccgttgatattaaccagagggcatctcacttccttccgatcatttctccggaccgcaaaggaaaatgggtaataaacaggtgtcagcaaaataacaccgtcacctggctccgtataggccagcacggcctgatgaaaggcatttacgattcccggcgtggtaatcagccattcccgctttgtctcccatccatagcgcctccttgtccaggattcaacagcctcataaaaactgtccgtaccacacggataccccaataccgcctggtccagatactccttaaggccctccattatttccggcggattcttaagttccatgtccgctaccgacaggggcaccacactctccggcacattggggttcagccctttcatcccctcccacttggacgaaccgctgttcctccgattgggcgctgtaataaaatcgtacttcatgcttgctactcctcctttaggtagatttataggttcagctatgtaacgctgttaaaccgcatcagggcctcccgtattaccccctcatgatgctgtccattccctcacccggcgaataggcccgtgtcaccacacgatgtcccaccagatagtccagggaacagccgaacaaatcagccagctgttcaatttcataaagggaaaattctgtttctccatacagtttaaaaatcacatcattcagaggaagccccaggacagctgccagctgctggcccttcaggccatggcgtctcatttcatagtggatgtttagatatatcattttctgattcctcctcttttcagctaactattgtgagttatttattcttattatactctctttagttagtttgtcaataaaagattgacgctttcactcacaaatgttaatatctttctggaggtatgaacatgggattcaacgagaatttaaagctgttactattagaaaaaagtatgaagcaggcagatttatgccgcatgacaggcatacagacctctctcatgtccgaatatataaacggcaggaaaagtcctaccatcggcaatgccatcctgattgccgatgcccttaacatttccctggatgacctggtaggcagaaagtggaatacctgccgcgatcaaaagaagcctggtgaatatactgatgaattaagcgagacattgaataaattgacagaaaaggaatgtatctttgtcatggatgttataaaggcgctgaagcagcatctgcaataagaaaaaggccgggcgcgaagccctggccttatcaatatacatctatatcatctttctgcagtatcactcttctatgatttcatatctgaaccagtcaaaatcagtatggttatgtgatgtctcatgtccggcagaggcatacatccccatcacagggcaatcctagtcccgctttccccaatcatggctaagggagccttttcaagggatgaaatcaccgcattcctgccctttttgctacgtgcaaattccatggctgcctctactttgggaagcatgcttcccggtgcgaagtgaccttcgcggcacaggttttccgcttcctccactgtgatttccttcaattcccgctgctccggttttccgtaatttaccgccacccgatccacagctgtcaggataaacaggtaatcagcgtccaccagctctgccagcttggcagatgcaaagtccttgtctatgacagccggtatactttcatagtcaccattctcatccaatatcacaggtatccccccgcctccgcaggcaatgacaatgaattcatggtccagaaggtttaagatggaatcccgttccgcaatatccactggtttgggcgaagccaccatctgacggtagcctcttcccgcatcctccttcatgtgcagctttggattttccctcatcatcttcagggcctcttccgctgtataaaaactgccaatgggcttcgtgggattcagaaacgccgggtcatccttatccactacaatctgtgttaccacggttgccacatgccacggcattccttccctgcgcagttccttcttgattcccttctgcagatggaacccgatataaccctggctcatggccgtacactcaggtaattcaaagacaggtactttttcgttggcggcactggccgtatcaaatgcctggcgtatcatccctacctggggtccatttccatgactgatgataatctcatgcccctgtttaatcagcccggtgagagcgggtgccgcattgtcgatgcgctcctgctgttccttaggcgtatttcccagtgcatttcccccaagggcgattacaattcttgacatactcctatcttcctttctgtcatctattttatttccgctccggaatcctcatgcctttggctgctgctgggtaatgcagtggatgttgccgccgcccaaaaggatttccctggcatagatgcccaccacctcgcggcccgggaagcattcctccagtgtccttctggccttctcatcattctcgtcatggaacatggggaatacaacacctccattggcaatataaaagttggcataggatgctgccagtctgtcaccttccatgcggggaagcgtgccgtccacagcgtcgacgccctcgctctctcctctggtaataaggatgttcttaggcagcgtcagcttatggatattcagcttacggccctttgcatctgtctccgcgctcaacacctcatatgctttctggcatatatcatactgcgggtcgtccttatcatccgtccatgccaggattacctgacccggggcaatataatggatgatattatccacatggccgttcgtctcatcattataaatgccatacggaatccagataattttctccaggttcagatactccttcagcacatcctcaatttccttttttgtgagatgggagttcctgcccccgcttaacaggcattcttcagtcacaatcagggtgccctcgccgtccacatggatagaaccgccttctaatatgaaatcatccagacggtacctgcccttgcgctcaatgtcgcacacctttcttgccacatggtcatccttatcccatgggaaatacagaccgtcaaccagtccgccccaagcgttaaaggaccagtcaacacccctgacctcggttccattggtcacaaatgtggggccacagtcgcgaatccaggaatcatccgtggacatttccacaacacgtacatcttccggaagctggtatctggcattgtcatactgtgcattgcttacgcatacggttaccggttcaaagcggctgatggcctttgccacctccacgaagaccttctgtgccggttttgctcccagtctccagttatccggtctctcaggccagataatccagcagccctcatgtggttcaaattctcccggcatcctaaagccatcctgttttggggtcgttgtatatgttttcatgtaaaataccttcctctcattcttttttctatgggccctgcccgctcaccaggtccgcttctactccgtttctgccgccttcttcatcccggccgcagttccggcctttgtcactttacgttttccggctgccagcatttctcctatgccaacgaacacaacggaaccaatggtaataggcagtacttcatttaatgtctgggcatcaaagctcatgggcactgctataaaaatcaatgatatgactatcataatcatgggaagtgctgccagcaacctgaggaatgtcttgcttccgcctactttaaatggtctctccgtctccgggtcaatggaacgcagtctcagaaatgccgggaatacgggcaggtatgctagcaggaacatcaccaagttcagtgcaaagaagctccagaacaaatcctggttgggcagaataggcgcaaggatgacaaccacgctggccacaataccattcatcattgcagcgcccaccggcatgctgtttttgacgctctttttagcaaatacctccggcatatccctctgctcagcagcatagctggccacattgttgactcccagggaccaggaaatcatatttccaaacagcgtcagtacaaacataacagccatgacggagatgaacagactgccagtctttccggtcagaagctgaaggctgtcaatcagcccgctgctggtgctgacctcggcagtgggaatggccacgccgattccgaaggctgagaatatgtatatggccgcaatcacaagaccgcctgaaacaatagcctgcggaatctgttttttcgggttctccatattgtccgcaaaggtgcacactacctcaaatcctaaaaaattaaatagaatcacggaaatgaaggacagactctttgcgtcaaaggacggcatcagagaagccgccgtatactggttggccacgccatgggtcactgccccgtatatgcccagtccccctactatcactgccaacagcaccttaatcagggctgcgccgttgagaatccacacgctgtcacacacagggaagaagctgatagctacaatcacccagataaacgccagctctataattagcgaaggaatcacgccaatgggatgtcctatgacgatactgaacatattcgggcacatgacagccagggatgccatccacagcggaaagttaatccagtaataccaggagaccctggtaccccatttggctccgaacgctttcctcacccagtcatacaatccgccttccccgtcataggtggttcccagttccgaggcaataagcccgtagggcagcaggaaggtgagcatgaggaaaatccaccagaaatactgggagtttccgattgcagccacaggcgccgctgcttctgccacgaatacaacacagataacggacagtatcgcatccgttaatttaaattttttctttccttgtgtttccggccttgtgttttcagccatgtgttttgccccctttacttgctaaattacagcgctttctttaagaatacttccaaatccgcttttgcctttgctttttcctcttcatctgctttcttctcagcctgattcaggaaatataccagaagtcccctcatagcggtcaggcgattctcagcctcgtcaaatacaacggaatatccggcatcaatcacttcattcacaacctcttctcctctggaggcaggcagacagtgcatgaatttcacatggggagcagccttggccatcatggccggagttacctggtatttaggatagaagatagccatccgctcctcctcggacagctctgcgtcgtacaggccgtaccatacatcggtatatacaaagtcagcgtccttaagcgcttcatcttcattatcagtaaccaggaaggttccgccgcttaccttgcagtttgtctctgcgattgccctgtggttttcatttaactggtaaccctccggtccgaagtgcacgaagttcattcccatcttggtggtgatgaacattaaggaagcgcatacctgggttgcgtcgcctacgaataccaccttgcagtcctctaatttcttacccgccggcaaatgctcaatcatggtacataaatcacccatttcctgggtcggatggttataatcggacattccattgatgaccgggattgaagcgttcttagccagatctaccacgctcttgtgacggtccacacgtgccatgaggatatctaccaggcgggaaagcactgcgcttgtatcttcgattgtctcatgtccgcccagctgaatctgtccgggtgccaggtactgtgcatgtccgcctaactgctgcatggctgtctcaaaagatacccttgtcctggtggatgactgctggaatatcattcccagggatttgttccttaataattgaggatagcagcccgccttgatgcatcttttaatctttaatgaaagattgatgatgtccattagttcctccttggtgaattcgtttgtgtcgatgaaatcttttactgacatgttgtttcctcctgtattatattgtttttgctctgccggatgcttcagggctgtccggcgccttgtgacgtcatcatagccccacgggaccgagtttaaaatcatccccgggatggattcagagattgagaaaatgaccaattctcagcggtcgaaagtttgattttactcagtcttttataacaaattatctaaactcccctaaaccttttatgaaatatgcacaattttttcaatatttttccaaataaaacgtttgatatattttagatttttggtatactctagtgtgtcacagcataaatgacagcacatcagccactgtcaaaaatggtataccagcaggaggtaatctatggatatactgattttcatctataatatttttctgattgtcctttacacagtcgttgtcacatcttccatcttaaattacagccacaaaaaaagaccgctgttcgcagtgacagccgccctatttctctcttacatatttgataatgtgattatctatatgactgaattcctggaggatttctccaccctttacgatcttcagttcatgaccgtacccgcctttaaaacattgatttatctcgtatccaactactgtctggttaccatacagagactggtccttcccggtaggcagactgtccgggacagcgctgccctgattctcctgggcctggccctgctgttcgctcccatggcaggaggcggagcactgaaggtctggctttactatcttcctgcccagatttttacattttaccttgggacctcagggcttttatatctgagccaatacccggagagccttgacagggaaatggtctcctataaaaccctgctgggagtaaccgtgatattttccgtgctgattctcatcgaagacaccatagtaatcttttcctttgatgtttactccaatcccatggtcaaaatcaacaaccgcagtttatccgaggatatcatgagtatcatatactccatatacgccatcaaatacctgacaaggcagcttaggcttccgcgtctggatgtaggggatgccggaaccattttccaggaaacgccgcctccttctgtccagattcctccggaccaggaagatgccgacacggccttcctccactttgccaatcactatcagctgacctcccgggaacaggacatcttgaagattcttctcacggataagaataaccaggaaatcagcgacgcgctgtacatctccatcggcacggtaaagacccatatacataacattttccaaaaggtaaatgtcaccaagaggagccagcttctgcgaatctactatgagtacaaaaggaaaatgccgtggaaataattctatgcttccatttcttctaaatcccgctctttatcccccactaaaaaatgctctggaaagaaacatatttcgtttcttcccagagcatttttggtataagacttctatctattcttcttcctctatggcatcgtcttcctcatccacatccgccatatcgtccattcccagaacttcctcggcaacattgtcctctgtgagtccgctgccgctctcatcctcggaagagactaccagttcatcgtcatcagacagcatgatctcatctgaaatcaaatcgtctgtgtccagcttcaccttgcggtaacgcttcatgccggtacctgccggaatcggcttaccgatgattacgttctccttcaggccaatcaggtggtcaaccttgccgttgatggctgcctcggtcagaaccttggtggtctcctggaaggatgctgctgacaagaaggaatccgttgccagggatgccttggtgatacccagcatgacctgtctgccttctgccggcttcttgccgtcggcaatcagggcctcgttcatctcgttgtaatccagaacatccatggatacgcccggcagcacatcgctgtcgccgctctcctcaatcttgattttcttaagcatctggtgaacaatcatctcaatatgcttatcgttgatttccacgccctggagacggtatacacgctgtacttcctggagcatgtaatcctgcaccgcacggacacccttgattttcaggatatcatgggggttaatgctgccttctgtcagctcgtcgccggcttccagcacctggccgtccattaccttgattctggatccgtaaggaatcagataggtcttggcgttgccggtctcattgtcggttaccgtaatctcgcgttttttctttgtatccttaatctgcaccacgccgccgaactcggtaatgatggcaagaccctttggcttacgggcctcgaaaagctcctccacacggggaagaccctgtgtgatatcgccgccggccacgccgcccgtatggaacgtacgcatggtaagctgtgtaccaggttcaccgatggactgtgccgcgatgatgccgacagcctcgcccacctgtacaggctggcccgttgccatgttggcgccgtaacacttggcgcacacaccgatatgggacttacagctgaggacggtacgaatctttacagacccccgtcctgtcttattcagcaccttcatgacagcagcggcgcgcttcggtgtacacatatggttagccttgaccacaacctctcccgtatccgggtcagtgatggtctcagcgatatagcgccctgtgattctctcttccaggtcctcgattacttcatttccatccatgaaagccttgatttccatgtatgggatatccctgccctcgcagcagtccacttcacggataatcaaatcctgtgatacgtctaccagacgtctggtcaggtaacctgagtcagccgtacgcagagccgtatcggacagacctttacgggctccatgagccgagataaagtactccaatacgtccagtccctcacggaaattggacttgataggaagctcgatggtatgaccggtggtatctgccatcagtccccgcatacctgccagctgcttaatctgcttatcagaaccacgggctccggagtcagccatcatgtagatattgttgtacttatccaggccggtcagcaggtcgtgcgtcagctggtcatcggtggtcttccatgtctcgataacctctttgtagcgctcttcctcggtgatgagtccgcggcggtagtttttcgcaatgcggtccactgttgcctgagcttcctcaatcagctttggtttgctctcaggcacggtcatatcggaaatagaaacggtcatggccgccctggtggaatatttatatccaatggccttgatgtcatccagggtaacggctgtctgggttgcgccgtgtacgttgatgaccttctcaagaatctgctttaactgctttttggctacgtggaaatccacttccagcttcagctcgttctccgggatgcttctgtccacaaatcccagatcctgaggaatgatttcattgaaaatgaaacgtccgatggtggagtcaatggtccccgtcttcacagtgccgtccggcatggtcttgctgaccctcaccttaacgcgtgaatgaagggttgcctcctggttctcatatgccagaatcgcctcgttgacgctcttaaataccatgccctcgccctttgctcccggacgttcctgggtcaggtaatagataccaagaaccatatcctgggaaggaacagccacaggaccgccgtctgaaggctttaacaggttgttagggcttaagagcaggaaacggcactctgcctgggcctctacggaaagcggcagatggacagccatctggtcgccgtcgaagtcagcgttgaaggccgtacacaccagaggatgaagcttgatggccttaccctctaccaggatgggctcaaacgcctggatccccagtctgtgcagggtaggggcacggttcagcatgacggggtgctctttgataacatcctcaagcacatcccacacctcaggctgcagtctctctaccatcttcttggcattctttatattgtgggcggttccgttggaaaccagctccttcataacaaaaggcttaaacagctcaatggccatttcctttggaagaccgcactggtatatcttaagctcaggtccaaccacgataacggaacgtccggaatagtccacacgcttgcctaacaggttctgacggaaacgtccctgcttaccctttaacatatcggaaagggacttaagggctctgttgccggggccggtcacaggcctgccgcggcgtccgttgtcaatcagggcatccactgcctcctggagcatacgcttctcgttgcgtacaatgatatcaggagcgcctaactccagcagtcttgccaaacggttgttcctgtttatgattcttctgtataagtcattcaaatcagaggtggcgaaacgtccgccgtccagctgtaccatgggacggatatccggagggatgacaggaatcacatccataatcatccactcaggacggttgcctgaggtaaggaatgcctccactacctccagcctcttgatgattctcgcgcgcttctgtccggtggaatccgccagcgcccttctgagttctgtggaatccttttccagattaatggccctcagcagttcctggatggcctcggcgcccattcccacacggaagccgccggtgccgccgtacttctccacttcctccctgtactccttctcggacaggacctgcttatactgcaggctggtggagcctgggtccagaacgatataggacgcaaagtacagcaccttctccagcgttctgggggagatgtccagaatcagacccatacggctgggaattcccttgaaataccatatatgggatacgggagcagccagcttaatgtggcccatacgctctctacggacacttgcctttgtcacttctacgccgcagcggtcgcagataacacctttataacgaatctttttatatttaccgcaatgacactcccagtccttactaggcccgaagattctctcacagaacagaccgtccttctcgggcttaagtgtcctgtagttgatggtctccggcttcttcacctcgccatgggaccactccagaatcttatcaggggaggccagaccaatcttaatggcatcaaatgtcattggatgataagtttcattagtttctggcatgagcatttactcccttctattcttcgtcttcaccgtcagcagcttcatccaggaataaatcatcctcgtcatcggcctcttcggtgtaatcatcggcgcttacatcttcttcctcttccacagctaccagctcgctatccttgaattcctgctcctgatagccaaactgcgcataggattccttctcctcgaagcggcgctccccctctaacatggcgcgcagctctgtatcaccgtaatcgatattctcattcatctcgacctcggtgccgtcatccctcagtacctgtacatccaggccaagggactgcatctccttaaggagcaccttaaaggactccggtacgcccggctcagggatattctctcccttgatgatggcttcgtaggtctttacacggcccacaacgtcgtcggacttaacggtcatgatttcctgcagagtataggaagcgccatatgcctccagtgcccaaacctccatctctccgaaacgctgtccgccgaactgggccttaccgcccagaggctgctgtgtaaccagagagtaagggccggttgaacgcgcatggatcttatcgtcaaccagatggtgcagcttcaggtagtgcatgtgtccgatggtaacagcgccgtcgaaatattcgccggtacgtccgtctctcaggcggaccttgccgtcacggctgatgggcacacccttccaaagctccctgtgctctaagtgagcgcccaggtagtcgatgacagaaggcttcagcaggtcttcatatttagctttaaattcatcccaggacgtgttcacataatcgttggccacttccagggtatccatgatgtcgttctcgtttgcgccgtcgaaaatcggggtggatacgttgaagcccagggccttggccgcaaggcttaagtgaatctccaacacctgtccgatgttcatacgggaaggcacgcccagagggttaagcacgatgtcaagaggacgtccgtttggcaggaaaggcatatcttcaacaggaagcacgcgggaaacaacacccttgttgccgtgacgtcctgccatcttatcgcccactgaaatcttacgcttctgggcaatgtagatgcggactgtctggttcacgcccggcgacagctcgtctccgttctccctggtaaataccttggcatccacgatgatgccgtatgcgccgtgaggcactttaagggaggtgtcgcggacttccctggccttctcgccgaagatggcgcgcagcagacgctcctccgcggtcagctcggtctcgcccttaggcgtaaccttgcccaccagaatatctcccgcgcggacctccgcgccgatacggataataccgcgctcatccaggtctttcagggcatcctcgcccacgcccggcacatcgcgggtaatctcttccggtcccagcttggtatcgcgggcttccgcctcatactcctcaatgtggacggaggtatagacatcttcctgaaccaggcgctcggataacaggaccgcatcctcgtagttgtagccctcccatgtcatgaatccgataagcgggttctttccaagggcaatctcaccgttggaggtggacgggccgtccgcaattacctcgccggcttccacatggtcattcttatatacgattggcttctggttgtaacagttgctctggttgcttctcttaaatttggtcaggtggtacacatcgcggttgccgtcactgtccctgcggatgatgatttcattagaagcagagcgctctaccacacctgcgttcttagctaccacacacacgccagagtcaacagccgcctttgcctcgatacccgtacccacggcaggggcttctgtggtcagaaggggcactgcctgacgctgcatgttggaacccatcagggcgcggttggcatcgtcgttctccaggaaaggaatcatggccgtagcaacggagaataccatcttaggggatacgtccatcaggtcaatggtctttttctggaactcggatgtctctgtacggaaacgtccggatacgttgttgtgtatgaaatggccttcctcatccagggcctcgtttgcctgtgccacaacgaagttatcttcctcgtcagcggtcaggtacaccacttcatccgttacccttgggttcgccgggtccgtggtcttatccaccacgcggtagggagcctcgataaaaccatactggtttaccctcgcataggttgccagggagttgatcagaccgatgttaggaccttcaggcgtctcgatggggcacatacgtccgtaatgggtgtagtgtacatcccgcacctcgaatccggcacggtccctggacagaccgccagggcccagggcggagagacggcgcttatgggtcagctctgccagcgggttattctggtccatgaactgggacagctgggagcttccgaagaactccttcacagccgcagtcacgggcttgatgttgattaaggactggggcgtaatgccatccatatcctgggtggtcatacgctcccttaccacacgctccatacgtgacagaccgatgcggtactggttctgaagaagttcgcctacggcgcggatacggcggttgcccagatgatcgatgtcatctgcgttgcccacctgctcctccagatgcatattatagttaatggaagcaaggatatcttcctttgtaatgtgctttggaatcaggtcgtggatgttcctgcggacagcctccttaagagcctccccgtcggtgccagcttcttccagaatagaagccagggccgggtaatatactaactccgtaacgcccacttcctccggggcaaagggcacatgggctgaaagctccaccatcatgttggagagaaccttctgcttcctgtcgggaccgtccacccatacaaagggaacagccgcgttctgaatcttcatggcagattccttgtcaagcttggtgcctgcctctgccagaatctcgcctgtggcggtgtccaccacgtcctctgccagtacctgtccgttaagacggtacttaaaggacagtttcttattaaatttatatctgccgacttttgcaaggtcatatcttctggggtcaaagaacatgctgttaaggagactttctgcactgtcaacagataacggctcgccgggacgaatcttcttatataattccagaaggccatcctgataattatcggaggtgtcctttccgaagctggccaagagctttggctcctcgccgaagagttccaggatttccgcattggttccgaatcccagggcgcgaatcaatacagttacaggtaccttacgggtcctgtctacacgtacatagaatacgtcattggagtctgtctcgtactccagccatgcgccacggttggggatgacagtacaggtatacagttccttacccactttatcatggccaataccgtagtagataccaggggaacgtaccagctggctgacaataacacgctcagcaccgttaatcacaaaggaaccggtatctgtcatcaggggcaggtcgcccatgaaaatctcgtgttcattcatttcatctttatctttattgtacagtcttacctttaccttaagtggtgcagcgtaagttgcgtcccgttctttacactcttcgatggtatactttatatcatccttacacaatgtaaagtcaacgaattccagactcaaatggcctgcaaagtccgctatgggagagatatcatcaaatgcctccttcagtccttcttttaagaaccactggtaggagtctttttgaatctcaatcaagttaggcatttcaagaacttctttctgtcttgaatagctcattcttacgcttttcccggccggtaccggacgtattctgcttttctccattgacgtttcacccctgttttctaatttggttcgcaatatttccatctcaatctgacgccgaaccggacgccagatgcagcaaaatatcactgtcgttctctgtaattgggcgccataccacgtaaaaccgtacatgagggcgcaaaaagcccacgtcgccacaatagtgcacactccataataacacagacctgtcaaggtgtcaaggatttttacttgcaatttaccgcctgaaatgatatactattatagaatgtcccctggggttgtagattgtttaacggggggaatggtactataattacataggttggaggtaaaccccatggctcagactattttaaatgtactgattgtcattctggtcattgctcttgttgccctggttgttctctactttctgggaaataagctccagaagcgccaggtggaacagcagcagttgttagatgcagccgcccagaccgcatccatccttgtcattgacaagaaaaagatgaagattacccaggccgggcttcccaaagcagtgactgaccagacgcccaaatatatgcgctgggcaaaggtccctgtggtcaaagccaagattggccccaaggtcatgaccctcattgcagacggacgcgtatttgactcccttccggtgaaaaccgaggccaaggttgtcatcagcggtatctacataactgagatcaaaagcgtgagaggcggcgcgattccgactccgccaaagaagaagggattcttcgcaagatttaaaaaggataagaaagataagaaataaaaagaagcggcagtcacgccgcttcttttttatactcttttacaatatccttctacagtttcttttactgctctctgtcactgcggacaggactggacatccaggcggatgctgcaatcagacagatgttcataattgatatccagggaataatccacattcaccaaaagactgtccggttcttcatttattttaatccggctggcctgtatgcctaccaccatatcgcccaggggagtggtgtagcatgaaagattcttcttgttcttctcaaactgcatgtgggtgttggcgattccctttttaattatgtccattccggaaggggatattttgattacgttcttgactttacctgtaaagccttccatcatctcttcgtagaggatgtaatgctttccattcttctgataataatctccccttactatcatctccacatcggagtcctcttcgtctatcatctggatgccactgattgtaatcagcacgtcttttgtcatattccttcctctttcccttatgtgtatcgttccatcccatgggtcatcagcatatccaccagctggtcctttgtaatccctctggcttcccacagcatggggtacatactgatggcggtaaaaccgggcatggtattaatctcattaaataccacttctccgtcatcctttacaaagaaatccactctggccagtccatagccgtccactgcacggaatatgtccacagcggactggcgcaccctctctgccgctcctgccggcagttccggatccgtcactgtcctggattcttcgttgtaatacttggcctcaaagtcgtagaactctgcggcggccagtatctctcctacgccggatgctactacctccttaagtccgcctccgaatacggcgcactcaatctctctgcccgtgatggtttcctctaccaatatcttacggtcatgccgggccgcctctaaaagtcctgcttccagggcctggcggtcatccgcctttgtcacgcccctggaggagcctgcattggacggtttaataaatacgggataggaaaaatgcttctccacccgttccaccaccgattccatatgcgcaagctgttccctgtacactgcctcgtatgctgcctggcgcactcccaggtcatccacgataatcttggtgtacagtttatccatagacaccgcggaggaaaggaccccgcagcccacataaggtatcttagccagttccaaaagcccttggatggtaccgtcctccccgtagagcccgtgaaggaccgggaacaccacatccaccctgacctcgcggaccgaatttccgtccatgaggaggatgcacttcttcgtcgcgtccggcagcaggagggctgatacagttccgtccctccaggtaccgttttttacatcttccggcgaatttgccttaatccagtgtccgtcttctgtaattcctacaagtaatacatcgtatcgcgtcctgtctatatgctcaatgacattgacagccgacatacaggacacaatatgttctgatgactggccgccaaatatgactgcagcctgaagtttacccatgctagtctccttaaactcacttattttagtgattgttctacgtttatagtataacatatgtggcaataattacaaacagaaattaaaactgcattaacggccaaggaggtcttaaatcatatgaaatacaaaataagcctgtgcatatccgcactttgtttttttactgcatttctcattcttatggcatcccgcaccaccggcgaggaggccctggcatcccgcattgcccctgaaatcctccgttttcacgtcctggcggaaagcgacagcgccagagaccagaatctgaagctgggtgtaaagggactggtcctggactacatccgtagccaggtacccgaggacacggacaaagaacagcttgaacagtggatagagggcaacaaaaccagcatcgaggccatggcccaggactggctggcagaccagggggcgtcctatcccgtaaaactggaattaacaagggattactttcccaccaagtcttacggggacatggtatttccctgcggaacctatgacgcggtccgcatcaccatcggaagcggaaaaggccgcaactggtggtgcgtgctctatccctccctctgctacaccgatgccatccacgcagtggtgccggattcctccagaaaaaccctgtcatctcttttggcggaagatgactatgacgctctgttatcccccctgggcaggacaaaacagccgcagcaaaagccggaggttcacgtacggttccggctcatggatttatttcaaaaaaagggctgagcttctatttcttccggctgtccagcatgtcctgaagcgcctcgtcgctcacgtcaatccatacatcctcttcctccgcattcagtcccagataccgggccagagtgcggggatcgtcgctgttattccagcggcttacataccggtcgatctcctcaaagggaatctcccctgacagataccgttccttaaaggttccttcccccattatttcctcccccgcaccggtgcggccggctcctgttcctgctcctttatgttgcgtgaaaccgtaatctcctggttgtctatatgttccctggccgccttttttgcctcggctatgttgcggttcttaagggcgttcagaatgtgctcgtgctccaccagaagcacctgccttttgtcctcgtcctttatatattccaggcggtagcggtacatctgctcacgcaggttgcctaacatctgcaccagcttatcgttgcgtgtcccctggtagatgacgtcatgatactgctcatccgactgggcaatgctcatggcctctccccggtcaatggcatttttaaagttgccctgcacccgttccagttcagccatgtcgtcctccgacatccgctggcaggccagctcaatggccagttcttccagggatcggcgcacctccagaacatcccgcaggctcttctcagatatcttggccacctcagcgccctttctgggaatcataagcaccaggccctccagctccagcttgcggatagcttccctgatcggggttctgctgacgcctaatttttctgccagctgaatttccatcagcctttcccccggagccagctctcccttcagtatggcctgacgcagggtgttgaacaccacatcccggagcggaagatactcgttcatattaaccttaaaattattttccattttaaaatgcccccttttcctgcattatactctgtcctgcccatttcttttcacattaaagaaattggtcagatacacctgttttgccagctccgacgccttgccgaaacgcaggtcctcgtaggctgcctgcgccgccctcggattggcaaaaagcccgaataccgtgggaccgcttccgctcatcattgcccccagagccccatagtcacgcatgacctgttcaatccttgaaatggccggatatttctctccggtcaccagctccaatacattcccgaaccggcctgccacctcccgcagattctggctgcggatggcgtctatcataccgtctatgtcgggatggtccgaaggcataagcttcatagcgtccagactctcgtacaccaccttggtggacacgctgatacccggcttggctatgagcacctggcactggggcatgggaggcaggggcgacagcttctcgccaattccctcagacagggcggttccccgcataaggcagtaggggatgtccgctcccagggtcacgcctcgctccatcagctccccggtggacaggcccaggccgaacattttattgactccaaagagaacggaggcagcgtccgtacttcctcccgccatgcctgctgacacggggatgaacttgcgcagatggatggacaggccctggcgtatgccgaactcctccatcagcagcccggccgctttatgggcaaggttctgctcattatccggcagataaaacaggttggtctctatcctgatgcccggctcctgggtggcgtacaggtcaatccggtcgtgaagccccacggtctgcatgatcatccgcacctcatgatagccgtcctccctccggcccagcacatccagagccaggttaatctttccatatgcttttaagcgtaagtgttttatcatacgcggactcccctctatgtacattgttcatatttctgtttttataatacattatattgtatacaatactttcactttatttgcaagtggaaattgcagaaaaatacagaaaaccggcagaaattttccggccggttttactaatagtaataatcagattatttccccttcagattccgaattgcttccttcatctcctcatcctcttcacccagcagaggggtggcatccgtgtgattctgttcttcttctttgggcatatattttccgaaaatagcagtaaagaaatatgagttcacaaaggcaatgagaggcatcccaaacaggaataaaagcatggcaaactgcgggaaataaaacaatccaaagtatgcggctgccacgattcccaaatcagtggccagtatcccgattgtctggaacaaatggcgcacggacataaaaaatgcattgaacagggtccgcttaaccggattataaaacctggcctgaagcgggaacacatacgtaataataaacaggtaaatcagaagcaatccgccggagaccgcggtcatggctgtcttagccgcgccgtttaaaggcatctgtcccgacacaaagaaccagaaatcaaagcccagcacgattcccgccgccagcaggataagccagatggctgttgcctgtttgaagttgctcttaaaagaccggaaaaaggaccgtatggtggaatcatcctcatcccgcaccagctttaaggtcacatagtagacggcagtggcggaggcgccggctgtaaacacagggatggaacagacaatccacaaaatgttcagtatgattaagtctcccagctttcctatgaaccgccacaccggattatcgtaattaaatataccttgcaacataagtattcctcttctctctgtaaatacacctggtgatattctatcatattaaacggaaaatgcaaagggctgctctgatttcatgaaatttttatattctcctcagggccggatgtggtatacttacatgaaacggcctgtccgtgcaaatacagcagagagaaacggaaggaatgcataagctatgtccatcagagaagaagcagaaaacgaacggcagaaactgaaaaacatgacctggagggaccggacctggtatgtgtgggaatattataagttccacctcctgggcgtaattctggccatcggggtcctaagcaccataggcaccatgatataccgccagacctttaccacccgcctgtccgtggccattatcaacgatcgctccggaggcgccggctccagcgctcagctggaatcagatctgcggaaatacctgggatgcggcaaaaaggacctgattgaaataaacgagggcctgatggtggattttaatgaggaatccacctcccagtacggatatgccaccctggccaaaatatccgccctggcagccagcgaaagcctggatgtggtcatcggggaccagtccgccatagaccactacgagaccatatccgcatatcagaacctggaggaattgctttctcctgagctctatgcgcgggtgaaggaccatatctaccaggcaaaggacggggagggaaaccctactcctgttgccctgtccctggaggacactgccttcggagaaaagacgggcatcgtcatggatcccccttacctggccatcatacagggctctccccataaagaagctgcccttcaaatgattgaatatctgtttccataagacacgtcattcccaggccttccgccaccctgcgggaggcctggttttctctgcggatcagggcgcagagccgcacctgaagcacctcatggctgtaaccggcaatggccgacacagcttccgcgcagtatcccatctgccggtaaggcaggaaaatatggtaccccaattccagccagggaacggactgtcccagggagtccagacaatcctccatctcccctgcgagtctgggattggacactcccgccagccccaccagaacctggtctttcctgcgtaccagggcccatgtgccatactcataaaagccgtactggtacctgcgatacagttccagcgtctcccttgaacggaatatggcctcctggggcccgtactcctcctccggaatataaccggcgtcatccgcggtcagttcccgtatgagaagcctggacgtcctgcatatattccacggaagccccagatggcggcgtattaccagctccagcagctcgtccgtggcatccttaatgtccggaatcacatagggaatcccctttatgtcccagatatccgccccctcacgttcaacgccgacaacggccctcccggcagccttcgccgccaaaagggcctcgggttcgtctgatatgactgctgtgcaggtttttccatctaaactgatactgcgctctgctaccatattaccgcctcattgtcatattgctgtcccatcgacgtatggcctccgctttgctgaaggatgccgtgaatgacaattcctatcagcacttctccggttccggatagtccaccccaaaggtatccactgtcatggacttaatcttctgctcctggaggggacggtcactgtaatcagtccgtacacccgcgattttattcaccacgtccatgccttccgtcacttttccaaaggctgcatatgagccgtccaggtgcggtgatgctttgtgcatgataaagaactgggagccgcctgaattggggtgcatggctcttgccatggaaagtacgccctctgtgtgtaccagatcgttcttgacgccgttctgtgcgaattctcccttgatagagtagcccgggccgcccatacccgtgccgtccgggcagccgccctgaatcatgaagccgtttatgaccctgtggaaaatcagtccgtcataatatcctttttttacaaggctgatgaaattgttcactgtattaggagctatatccgggtataactctgctttcattacatctccattttccatggttatggtaactataggatttgccattttgtctttctcctttttcaattagaatctttatccactatagcaaattccgccggctttgtccagcacggcttatctttaaaccgcctctgttattcttcccctgttttccggtatactatgacggagggcctgcgttcctctgtccgtatcatcccctggtcctggtctcagtctttgccctttccatctggaatgaagccaagcttcaaaccgatttcggacggctctacccaggaatacttaacagatgtaacctcccagctatcccgtgatatccgggattccattaataataagataacccattacagacatacagcaaatgcagagagatatggccgaatgccagatacagggagcttttaaaggacatggagccctgcacctattccattgtgctgctgaatgtccggggatttaagatagtcaacgagcagttcggcatccggagcggcaatcatactctctcctaaaaggacactctggctctgaatctctatcttctggacttgactaagactgaagtggcctcttcctattacgatatttaccttggacattataaaaccagtgaaggaaatgtgttttggattcctatggctggtacggtagagggtattgttgccaataaaggggaatgggaattgaaagcttggcttctgtggacgggagcgtctggaaaaagattatgaaagcggaaagccacatcagctggcccccaagatatggcttcctgcctttaccctgaatccgtgaaactggttgttttatgatgctaatcccaaatcggattggcttattcttgataaatagttcttcaaagacagtattttaatgtatctggattgattttggttccaaatgacggttagtaacactagaaatcctttcaaaagggcatgctctgtaacgtgacttgccatcatgatcatattaccaatcaccgtgcgcagccttctgcgcctgactttatgttttgtctttgtgcccttcctgccgatgctttcctgtccgatcatccgcagaatgttataggccaggattgccagttccagtaccagctcattggtctcaaatttgccggatggcagccgctccatatccatatcggtcttgatctcgctatggaactgctcacattcgccgtgggcatggtagagtcctatgacttcgcggtccgtcattccaaggtttgtccaccaggtattgacttcaatgtcgccttccagaaggaactggccatatttatcaatggtacggtttatgatctcgtacccggcacggacggtgatggttttttccgtatcatccgctgttttataggaaaccggtttccagtcgctgccgatatagacggttttcccttcacggggagtttcgatatcttggctgtattcctgtgccatctgcagccagtcctctttgctttccctgcggaggttgcgttttatgacgaaataacagcccgcttccaccaggataccgatattctctgcggcatcgtttcctgaatcaaggcggatcaggagcggttcatccgtaatctccctgcacatacggatggtttcccgtaaaaactcaggggtatgcttctggcaatgctgttttccttcccggagttcacagttgaccagatagccctccgttccaatatatgccattatcggcgcatagccgtcacatcccttataagttctggagacaccctgctttttggtcttggaattatcaaagggcgtgacatcaatatccacaggcacataaccgttcgggagttttcccggtacaatgccattatccctgagcatcttgatgttttccgcaaggatataagaacgcatggatgagccaatgtcatccatccgctggcgcagcgtctcctcagaagggatgcttctgacaatgccaagtgcgtatttgtaaaaatccgggtcgtcatcaaactcatggacggactcataagcaggtttccccatggtgagaagtccgatataagtgagcaggacatccccgttcttgatctggtgctgtgaacggtttggggtgacatccatacggttgcaccgctttacgaagtcgcttttgccgagaatggcaccgacaactgcaaggccgctggctgggatgagccgctcattggtaaactcaatttttatctttttcatgatgactgcctccatagttttcttatggaatattgtatcagaaaacatcaccaaatgggtgatattgttaatatttttaaaagtatcgacagaccgcataaacaaagtgattgcagcatgaaataataattaaactccacggattaaggtcatttcttaatttttaaatttcgtcactttgacgatattgatttagggcacctgtgaactgtaacccggcgtgaggatttggacggaaatttctaagaatcacttgaatttaggaacttgattgattataatagaagtgtaaaagaaagcacccactccaaaagtggatgctcccagtagattacttaaatgtccttatggacaccgcctaccctgtggatcagacagggtgggcattttatttacgcttatttctcttatcgagaaaggcgataatcgctacaatcaagctgccaaaggatatgagtagagctagtatccctatgaagattgaaataatctcgtatgctgtcatgggcgctacctcctttcctatgtattccggcgaaccgtttttactaagtctgggaggttccactcctgtcgtgagtgctttcctaatgtttattttaacatgggaacatacgttttgcaaagattatattttctttttgtttctacttagctgaatcaaaaaccgcataaaaccgcctgtcagataatctaaaaaatctatctcctgttcatcggctgtattgttatgtttagcttcattattattgtatgttgtatagtaagtaaacagtgtagtatacatgttggaactgtgagtgaaaaaccagaaaaaaagcagaagtactcggattgttaagtcctgatacttctgctttgattttactttgttctattttcgactgaacaatgagtgggaagtcggtgggaaggagacaacttcctgtcaaggtgcgagtgaaacccgcccttttgtcccactgaaaacagccttttcctttttcgctcttttcttcctttttatattttcagacatgcttttttctgccttgttctctgctctttttccggctttggtgcagccacactatttgagactgtcacagccaaaggacaagaacaaagacagtttaccgtttgtttgtattggtctttaggttgaattttccttgtaaatacgttgtttccgggtgttttccttttcagcttttctttccaatttgctctttcttcttttgaaaacagagagaaaactaagggcaaacggcagatgggaccgggagtgaaaaaccggaaaacaaaaagcagaagtacccggattgttaagtcctgatacttctgcttatgtttactttgttctattttcggctggacagtgagtgtgaagccggtgggaagataacaaagtaatcaggattaattcaatcgctgattacagtataacagattggaaaaatggcgtatagccgggaatctgcacaaagtttatggtttttatcctgcactattacgtccacaacattttttgaatttcttaccacttccacatggacatgggtcattcggatatatttttctaccgtcttcatggcaatgtggaacttccttgcgttttgggtccggctctccataatagactgtcccatcatatctattctcaattcttaaaatatcagaaaatggtataatctgttcagaaatataccagcttgatactttttgattacgacctaaaatcccgtccaaattatacacatatttagggggtcaacccatatagctcataaatgtctttttgaaatggggtaagctcagtggtgtatttttttcgtgttccatttatactaacactgcggacagttttcatttcgcttattactttttgaaggtcatgatttttaaaccatccagccgcattcatcacctgctttaaccgggttgtgatcaggagtgctataaactgtatgaaaatcctgccttccatggctgccgccgaatggatacgtaaacgcttcatgtcaagatcatttttgaggtcatcgaaacatttttcaacagcatccttgtcgcgatacacctcaagagctttcgtcttatccttgatgtgattgcttacaagcacgaaccagccgatatggttccttttatgcctgctgatggcttcctcgttgtaatccaccctgatgccccttacaggtgttttgtgaacctgaaaaaacttattgtaatacgaggcatgctcctttacgtgtctgccagccataagttcttcataacagcagtgcaggatatggtcaaaattccgttcgtctgtcgccgccttgaaactatcatggtagacgtggatatagaatcgatgccctttccacgtggaagattccgtgaccgcgtacagttcgtccccaaagactgcacagtaattgtgatgtgaacggatgctatccctgtagcgttctactgccttgcaagcgaaaccgaccgtaaaaggcactccgaccaggaacttcttatgactggcatacattgcgtcaaggttcggttcactataaaagcctttatccatgacaaaatgacaggtcggactgtccaaaacggatatattcgctatgctgtcctccagggtgttcacatcctttatgctgccgggaataatcctgtaatacagcggcatatgggaagtgacgccggtgagcataaggaggttgatctggggcagtttttccccatcacggttgtatccccaacggacaaagtcaatcaattcgctgtaggaggatacactggtgatgtccattgcatagacatctttctggcggtttacatcaatccacctgctgaaaaagttctgctgcagcgcaggcgtgagccttacaaggagttcactcacccgccggcttgcaagcagagaacggcatggtggcggatacatccgctgccactgttcaatatgacataatgccccgccttcgctgacaaggtaatacgcgcacgtcaatatgcgtttccagtcgtctggaaaaactgcggtgagcggtactgtcagtcctatgtctgaaacagctttatccaaaagggactgtatgccggtgttttcaacaacacagcggccagcaggttctttcgtttcagcctttttgcgggcaatatcgcctttcctgcggttgggaaccacttcgcctgttgctggatccagatgcccgatgctcttgcgaatatgtttgacctttttggtttccttatcataaacagaaacgttgctatatacatagattttaccatttggatttttgacataaaccaatgacgacatggcgcggctccttcaaatatgtgtataatatttcttcttatattatataatttatacacatatttgtaaagagagaatgcttaaaaacctagtattttcaatggattcacaacatcagggagctggttgtgtataattttttcgggagattaggttcaatatgtcccgccttttttagggaatttcccttgctcttttcagggaattctgacgctttttttcggtcatactagtgtatcataaacaagcagttccatagcgagatcaagaccgatatggatatggagcggctgccatccggcaaatttgagaccaatgagctggtactggaactggcaatcctggcctataacattctgcggatgatcggacaggaaagcatcggcaggaagggcacaaagacaaaacataaagtcaggcgcagaaggctgcgcacggtgattggtaatatgatcatgatggcaagtcacgttacagagcatgcccggcagttgttgttaggccttggccgaagtaatacatggcggtatgcttttgcacaggtgtatacagcatttgcggatttccggtcataaatgtcatcctgccaggtagcctttgagaaaccaaggggaaagcatgcccttttgaaaggatttctagtgttcctaaccgtcatttggaaccaaaatcaatccagatacattaaaatactgtctttgaagaactatttatcaagaataagccaatccgatttgggattagcatcataaaacaaccagtttcacggattcaggtaatatatcattgagttacaaaaatcaaggagtttagctcatggacgagattaaaatacgttctgataatcatatcagcgtaggtgcaaatatcaaacggatcagagaaagcaagggtgtccgagccttcgacctgatccgtgaattacagttgcaaggtttaaatattaataagcagcgatactacaaactggaacatgacctcgcaaatgtttttgcgtctgaactggttgccatggcaaaaatccttgatgtagatatttcttaatttttcaagtaggaagttactctgtgacctcctgcttttcttttacttctaatttctctgccagttccttcttgtctttgtaaagcattaagttttccatgttcaaatcgttgttaatttcctccgcaatcaccactttgtagaacaaaaacagtgttgatgtcagcaagaccgctaacagattcaacagaatagagattatcagattgcggttgtctttcatatccatatacctgacctcctctaagattctttcaaatcataagtcaaaacaagtacaggatcaccgttctcaacatcaacagagaggtgaacggtcgacattattgccatatacaggcagcggctatcacttgatatgtctaacccacaagcattacggagggtggcttgtatgagcatttctctatcccgttcaatatcaagaatagaggaagtctgctctgcatattcttttaaaaccgggaggatagcggtgtcaaaccattccatatgttttgtggtggcctctatttccgtgtcttgtctgattctttgaattgcttcatgtaatgcaatcatttccttgtttgtcaatctgtccagttcttcaggaacattcctagccagatcaacattggctgtgtaatcgtatctttccataggcaattctccttttgagtatattagcgccactctaattttactatcgtagtgagaccaggaacagccgagagaactgctgaaattatcgcccagggtcagtgcatttttatggtaggccgttgcttttgtctaatgtttatgggcggtaaactgattagaaccatgaattttgctgtgttttgatggcccagcggtgacccactggttgaatagccggacaacttatgaaagagctagactttttatttcggataagcccgggtaaaaaacgcattgactttttgtgggcctgtgcaacctatgcaaagacggaaaatcggatttattttacttactggaatgccttatgaacaaaggagtttcttctatatataaagtaatgcccatatagagccgttgattttgacgaatagattttttgtattttgaatacaaggagcaaaagtctgtgagcatttaccagaatcagacacattttagaaaagcgtttactatctgattctatgatgttttatgttgaatcggctgataattcattcgagggctgcttcatgggcggcggctggaaaatagagcggttttgatggatatgaggtgcaaaataggtgaattgctctcgccggcgtgtgaatttagacgaaaatttcaaagaatcacttgaatttagggaacggattgattataataaaagtgtaaaagaaagcacccactccaaaagtggatgctcccaaaaggtttagttaatgtccgttaggacaacgctcaccctgtggaccagacagggtgggcattttatttacgcttatttctcttatcgagaaaggcgataatcgcaacaatcaagctaccaaaggacatcagcaaagccaatatccctataaagattgaaataatctcgtatgctgtcatgggcgctacctcctttcctatgtattccggtgaaccggttttacaggtttgggaggttgccactcctgtcgtgagtgctttcctaatatccattttagcacaagaacatacgttttgcaattttatttttatctcctatgagatttgttattcctgattccagttccctccacctctgaaatatctggtgcctgtgctttggctttctcccatgttgattgattaaaattcttttgataatgctcctttaacttacctttggtgaaattctcccattgattccggtttacgtagcgtaaattacgcaactcctttaaccgctccttgttatcctccaccaactgccaaaactctgtattgattttagattgctcgcttctaaggaaagctatcctgtgtttcttcgtttctataaattccggaaaaattgggtcggaaggatctgctttatatgccttgaaaattttctccctgcggtcatatagagattgtatttctatctctgtcctagctatttcttcaattaattcctttcgtttcttgacctgtaatgggctgcataactccaattcctgcttttttaagtcaagggatttcaggaaattttcaagggccaccgtaacctgttccatggattctgcataggttttggctattactgcttcgttacttttttgattctcagtggtggaaacggcggcagagagcgtcaaccgctcataggcataggcgatatactttgagcgtaagccctccagtttggcgttgatttggttcaaatgctctgtttccatttcttccatgcgtttgattcgttcctcaatttcacttaaaaactggttgtcctctgtaatttcgcggttgagatttcctgagtctgtgtgttcacctcgcttctccatctgataagcggaggaaccgaggtggacagacgcaaccttgttaatactctgttcctcatacgaacggtgatctatctgctgattaatgttgttatctcttaaagcctggttgcacatactggcccatgattcacgccaacggaaaaaactgtcttttgagttccattctgccatagcagagttttgaacacattctgatttcggatttttgttgattcgttttaaatctttcttagtagcggattcctctgttagccatattttctttttaccaactttatattgatattgtttacaccagccttccagttcagcctgtttcatttctggtgcaggaatagacttttcttgatttccattgcgacaaatataattcttttgggattttggctgccactgtccctgtttatcaagagaacgcatagtaagcatgatgtgagcgtgtggattgcggaatatcattttatccgggtcgttcgagggatttccctcgctgtcaatgggtctgtgctttgaatctgtgacaggcggattatggattgcaaagtcagcacacattcccactgcgacaaaggtttgttgtatgtaaacccttgtcagggcgatttgttgttcaagtgtcagttcctttggcagagcgatttcaatctctctggcgagttgggcgttaccggatttctctgcaagttcaacgccgttccaaagtacagaacggtctttgaatgtatctggtgcgttaggtggaagcttgtgccttatggcactgtgggtctttggcctagttgtattgggattgtatgagagagggaacaacttgaatgatggaaagcgccgcaggccgcacataccgcccgaagggtggtatatcagtgcgctcttccttttaaaaaaaagagatacatctctgctatgtaattcactgttgagggtgacaggattgcgtaatacacaatcttctgaatatcatcattcgtaaatctatcggcaggacagatttcattgattgctgattctaaaattgctccacgttcaattagtctgtgagcacgctgttttctctcctttaaccttgcccgtttctgggtgcattcttccctgtgtttttgttgtagctgttccagttctgtcatgcgtttacctcctgtgatggtgagtatcacctatacttgatattttcattggttcgtctgcaacagtcagagaaatatcaagattgttggtattttttaagattgtactgtcaagctgttcaatcacatcatgggctgttttttggattgtctgtaaagaagatttcagctccggcagttctttatcactgctccaactagcaaggtaaccaaagctgtagtccgatgtatctaaccctaagtattggcataccacgaaagcgacactttcagcctccacttccattgtctttgaatcctttgtatgggttttgtccttatgtaaaatactgtgagcagtttcgtggattgctgttttaacagtttgcaattctgacatacctgatttaatcacaatctcctgagtcactagtataactcgattttaataagtttacattattatcctgaaaaccaagggaaacgtgcgcccaaagcacggacacgtaagccaataaatcagattactaccaatgcttaaattgtaagcttatttaaatcgagttatactagatcgtagtagcctttctttgttacgttccatgtgtcaaaccggatagggactggagctacgtcacgtattgaatccatgagtaccttataatttgatatttctccttgtaattcctttgcaagttctgggagaggttcgccctcggtttggtaaatgtcaaaaattgaaattgctttgaaactggcacgggagatttctttacgctctttcatcacttttccctgttcgtcccgtttgacctggcctgtgttaggatctaagacatcaacatagtttacggacttgtacgggcagggagccaggattgtaattcccttttctccctttttgacatggcggcccaacgtttcccatgtcttaaatcccgctacataagatgcctccggtttttgcatgagaattagcatagaattgttatagctgtaactgtgaaatttatgcacggcggaaagatactcacggtaatggccagaagcaaacacctctttaatgcctgcttccagtctgtctgtgagttccttaactctatcggtttgtcctttcttttctgccataatccacctctgactttggaacaatcttcactggcccgtttttaattttaggactgggaacgactgtgtactcaatacccttctctgaatgatgggttttcaaaaagtttctgtatatctcaataaaatctaattttttctgtaagtccatttttattacctcctgtgatgtctaaacactgacaggcttcataacttaccaccatattatctgattccaaaatccttgcgtactctctggcttcccggctgtggacgcataccagcttttgattcttctcactgcggaaactgatatccctgcatttctttccaaccttatccatttgcttcactcctttacaaaaattcaaattaatagcgattgaattgaattaatcctaatttttgtaggtaaacatgaaaccgatacccttaattatatcatgaattcccaggctttatggggatgttttgagacggtaaaaggacttcggattgcagaactttcaaggccccaggattcgcagattgtttcagtgatccgttatacatggaatggacgtgagaagatattagatgtgcaataataaagaatgtgcaaattactttaaaagtcagcgggcatatcacagatgctttgaagaatttagaaaaaaatggaaatcttacggaaaagctgcgggaagaattacgcttaaacagacttcggaggaagagcgacgggcagtgggcggcataatcggtgtttttgtagtttttcaacttcccagtaacaaaaactctaattaattcaaattcagcctcgaattattccgagtttttgtcatgaattaatccgagaatttgtatttaatccgagtttttgtagtttttgacctctcacagcaacaaaaactccgattaattcaaattaattggaattactttgtcaaggtgcgagtgaaacccgcccttttgtcccactgaaaacagccttttcctttttcgctcttttcttcctttttagattttcagacatgcttttttctgccttgttctctgctctttttccggctttggtgcagccacactgtttgagactgtcacagccaaaggacaagaacaaagacagtttaccgtttgtttgtattggtctttaggttgaattttccttgtaaatacgttgtttccgggtgttttccttttcagcttttctttcttatttactctttcttcttttgaaaacagagagaaaacaaagggcaaacggcagataggaccgggagtgaaaaaccggaaaataaaaagcagaagtacccggattgtttagtcctgatacttctgcttatgtttactttgttctattttcgaccggacagtgagtgtgaagccggtaggaagataacacttcccctttgcccattcacacttcgttcatatttcattcaaaaaccttttacacaaacaacattatttcttcatgtttacgctatatactttaaccatagcaaacaacaagagttgctgccccaaaaacgcttacaagatttttttcataatactcgagctgataagaatttatcagctctcctcccttttttaatacttttttccagaaggcgcatcatccacgggatggtgtgttttttcgtttatcctggctcaggggcatagtcaaatccgcccctgtttcccttctttgatttggtacatgaactatcctcttactcccttcctatttagtcaagtcttttttccttatttttcaaggattttttagtatcatatctcagatgaatgagccggaggaatggagatttctctgtatctggtacgaaagtagagggggttgggtacacgaagtaaaacgtcgttgtctttcgttctacatggccttttgtatacccatccttctacggcagcgaacctcccgtgtctgccaggagctccagcatttctgccgggtcctaacttccttcgtcccgcctgtccataaccagggtgtctgcttagctcctttgcagggtcatgccctatggaaaatattcctgccgactactggctcattctttgtattaagtcttactgacctgtcatgcatgattcccggtcggcgccttgcggcggacgttttcccgactcgttcttcctgcctttcagccttcctgtcacggctgaattcagcccttaactccattcgccaaaagctcaattcaaccgggacagggcattgcctgtttggttaccatttcctctactgcttatgccgcctgcatctgcggcctcttgatgtctcccatcagtttcaacgggtcatagtccacaccttttgtcagtatcgtgtagaatacccttagaatctaacaggccgctgccacaacagaccgcatcttctttaagggattttccctgcgtgtccggtagtattcatggattgcccggaactcggtattcttcccaaccagcgatatcgccgcttcatacagcacgtatctcaggcgtttcctgcccctgtaactgatacggctttctccgctgtgctttcctgaatcatttgccacgatcgcatatcctgccagcttctgcagctgcttcgggttgtcaaaacgtccaatgtcccccacctctgcaataaatccgctgacgctcaccagcccgatctccttgatttccatcagtttatccacgtatggaatttctcccggcttctcctctatgtttcggagcagttcgtccatccttgcttcttcattccagcgcctctcagctttgcgttcctccatattttgtttacaccttctgcaccaagtttccggatgtcctccggcaaaggcgcttccttcagcaccattctcccactgaccgcctttaaatccccataaacgtctttatattcagggaagcagatggcgaaccatctggcagtccggttcttgatccttgtaagctcctcctgtgtctgaaaacgcaggtttgacaaactcctgatctccgcatagatgccggttggtatataagggtaagagaagcgcccttcatttaccagtgcggcaatggtctttggatccttgcggtcattcttgttggggttgttgtcgttcagctcttttgacttcttgacatggtggggatttacgtgtaccggcttcattccgttgtcctgcaggaatttccccagtgcaaaccgtaggctaagcacacaacgccttgcccaaaggcaggtttttgcgtgcttgcccccgaaccatacgtgcacctttcaatgcatacggctctccatttgtgttgacttaaaatccacttactattttgctataacaagtttcgcatacaaccagggttttccggttcatttcaagcatttttcgttcccagtcggtgactccggatagttctgacagctttcttacatggtggactattgttccaggttttgtttcaccgcaaagttcacaacagtcttttgaaaagcgtgtgagcaactccttggattgttttttactagcatggtttgtgatgatgggttgttttttgaaaccatagtcatataagtatactgttttgaagccattatgggtttggtaacgtgtctgcatgcgtccttccctgaaatatttcctcattattttgtgcactgaacttttgtgttttcctgcgagtgttttagcaaggctgtatttcatgatgtaataataatcattgagcaccgatgcattgtccgcaaacctgtagtattggtataaaccgacgatttcccagttgtatatacggaagctttcatggtcggggagatagagcaggttatttcttgttttcggtttccagatttcctttccatcagcgttgtgttcgatttttattgcctcagactgtattaatttctttaaccacgcttgcttggggaggtaaagcctgactcttccatggtgacggtctgacagttttcccagcttatccctggacgggacgccttttcggccaatggttatttcgtaaccgaggaattgtgctttttcatatccatgggtaaccagtgttttttcttcggacagctccagatgtaattccttaagcaggaatgactggattacctgtttggttgctatagcgtcctgtttgctgccgattattccgataaggaagtcgtccgcgtacctttggtagaaaatccttctgaatgaagaatccattggctgggagcaggacatagatacccgttggttgcgcaacgctttgagttcttttagtttttgggttctctctctggaattcccagcaagcccggagatggacttcctcaaccgttgttctttattttggacagaaatgtattctttggacagctgtcgttttgtccccttatcaaaggaggttttgtatgtcgccataaaacagtcaagttcgttcaggtaaatattggcaaggataggactgataattgaaccctggtgcagtcctctgtccggtctgtgtaattgtccgttttccaggtgcccggctcttagaaatttccagattaggctgataaaggcttcgtcctttatccttctgcggagaatgcttatcaacacgtgatggtctaccatatcaaagtaggaatggatatcaccttcgataaaccatctgaccccggtgaagttgattttaatctggctaagggctgaatgacagcttcggtttggacgaaagccgtgggaggtatcagtgaatgtatcttcgtagatattctccaacatcattttcataacctgctgtaccagtttatcatcgctggactgaataccgagcggacggagtttcccattcttttttgggatataggtacggcgggcaggttttgggcaataagagtggtctttcatgctggtgatgattttattgactctggctaggttcatgccgtcaaatgtctttccatcaacaccagggctcatgttgcctggttttgaatacgtctgctggtatgccagcagatagaacgccggattgtataggttacggtatagccgttcataccggtatccgggtgaaacagagtgggattttaagcttttcaatacagcttcgggacttctcatgatgtctcgcacatccttcctttaggtattgaaatcacaaactgtcccccttcgccatgtacagcgctttccgctgcccggactactatggggactccgttgccatggcggtataaccgctttaggcaatccacatttcatgcgcataacatagcgtgtaccgtttcagacaggattttcgcccgtttccgcttactgcggatggctggcagtgggtatatataccggaacaatactgggattccgttatcactgccacccagcgttacaattgccattcgctggtgacccggctaagactccttgggctatccttcaggcagtgtagcttttgtctttgtcgatacgttcatcttgccgttcagccgcaacttggcaatttctttggcttacggcgttgccggcatgcgtttgtccctgttgtggtttcccttgcaggtcagccggttgatggcggcatttttataccaatgccttcctcctgctttcggaggatttgttatgtgcaccatatgtgcgcgcagtaatacccggcgggctccattccggggattacagcggtttttccttgctgttgcgctatgtcctccatccatgccttgaatgtcagaaaccccgcttctgtattactgaattccagtggtttcttcgtgtactcataatttctccagtcaaatgccctggcgtaatgggtctcactgccgacatcaattccaacaatcaaagttttttccgttatggatgtaatttttgcgttttgtgtgttacaattcattttagatacctcactgttttaataagattttttactagccgttccagtcagtaatcttattttactctgaggtatttctttttctcacccctctttcttggaactccctatacttgaattatacaggaagctccttcttaaaaaaccctccggcagagtcacctccctggataaaaacaacagggctgtcaggttgggaaaggccatgagcccattccatatatccgacaacagccagaccaggcccagcctggcctcgcttcctaaaaatacggctgcgataaacaaaagaggatataccttggccgcaagcatgcgctgcgcattttctccgaacccgcatcctccgataaaataggcagcggcctgcctccccagataaaaccaggccatgatagtggcaaaggcaaataccaccatggatccgctgacaagatattcccctacaatccccagtcgtctgctgaaacaccaggccgcaagagctgccccctcataaggtattgtctccgggctggaaccggtcatgcacaggattaccagggccgtaagggtgcaaaggaccacggtgtcaaaaaacacctcaaacatggcccacatcccctgctcatgaggcgttgtgccctctgtaggtccgtgcagtacggccagcgtacccagtccggcctcgttggagaatactccccgtgagatgccgtaacgcacgctgcggctgattacatatccagcggtccctcctgccgccgcctcaggccggaaggcggaggacaccatggataccagggctcccggtatctgttccagacaggacagtatcacaatcatggaaaaggcgatatagattccggatgccgcaggcaccagtttttcagccacatttccgattctgcggattcctccccaggtgaccagcgccagaaggccggtaaatatcagtccgccagccagggccggcacatgccaggtgtattccatggtgctgattgccgagttggcctggaccatgcttcccattccaagggagctcatcagacacaggaagctgtacagcacccccattcccctgagccccagtcccctttccatgtatataaacggaccgcatatgtaatgtccgtccttatccctgtaccggtacctgattcccagcatggtttccgcgtaagcggttatcatgccgatcagggctgatacccacatccagaacagagcgcctggtcctccagccgtgagcgcggttgccacccccgctatgttgcctgtgccgacggttgccgccagtgcggtgcagaccgactggaactgactgattccctttccttttacggtcccgtccgctctcccgtttccgtccgctctcccgtttccgtcttctctcccgttcctatcctcctttccgaacgcttctcctgatatgagccgtcctgcggtccggctccaccagaataaaaatcccctaatttggaaaaaatgacatttcagggtaaagaatatacccaccccaaggaatatgacaagggtccacggtccccacaccatctggtggacctgctctaatacattcatcatccgagcccaacctgccctgcttgcttcttataaatgtcttattccaaagttcccctgactatgaccactggaaggaattttcttttgtttccggctcgcatttcatagttgtttatgatagaatatgaagcaggaacaactgcaagaatccaatagaaaagaggtatgccgatgccaggttttacaacacactatgtcttgggtatgaaagcatacaatgatatgcctcagaacaatctgaagtttatcattgccaagtatcggtggctctatcagctgggtctccaggggccggacatgtttttttataacctgcccatcctgcgccatcgagaccaccgcaatgtaggttcctatatgcatgaacaccatgtcaattactttttccgttgctgtttcatgcagctttcccgaatcggctccaggcagcagcgtgaagaaggcctggcctacatgtgcggttttatctgccattatatcggtgactccatatgccacccctatgtatacggacgcattgaatacgatgtcaatcacccgggctcctattaccatggactccacgccaagctggagaatgacatcgacgcccttctcctccagaagtacaagaggaagaagccatcccagttcaaccaggcagcaaccatttgtcttaatggaatggaaacccaatttatttcccagttcctgtcagactgcatcaacgaggcgttctatccgttgagctataaaaacaggtatcaggtcacggctcccatgatacaccgttccatcttggctctccgttttggatgcaggacgctgtctgaccctaacagcaggaaaaaggacaggattgcgttttttgaatccctgttcctcaagaacccggtggcttccagcaagctggttacggatacagtggagaacccggcctggagcctgaacctgcaccatgagacatggtgcaatccgtgggataagagcattgcctccaagtcctccttccccgacttattcagacagtccctggggaagctgagcactatcttctacatgattaactccatgctggagacagggcagcccttaaagctgaacacccttgagaacctgctgtccgagctgggaaattattcctaccacagcggacttccctgtgctgatgactgaatgtatgaaaaacagctgccagggaaagtgagtaaatagacaaaacagacaagcagataaaaaagataattgcgaagcaaaatgccgcggtccctcttcctaaatcctcaggaaaaggggccgcggcgtttgctgtcggtggttttgccattttataatttctgccattttacaatttctgttattttacgatttctgttattttgcggctgattcatttcacgctttattcgatcacctggtcgccgtccttgatgcagtaatttgcattcaccccaaggcgcaccatccagttctttgtctcctgcgtaagccagataccgctaccggagccgccgccgttgtcattatcccacagccactggggggtgggccacagggcaacgcttggccttaacgccttgtagacctcatagcccacgccgttctgtccgtggtgggccacctggacgatatcgcacttaagggcgctcagatcatggtcagccatcagctgctcgccgcctgacttggccaaatctcccagaaacacggtgtttgtcccgtttaaggataccatataggccacactgctgttattgataaagtcattgttcatcttatatgcctgattcaatacctgaatcttggcaggacctgcctggatgacctgtcctgatacaatatccccgtgaagtatgttctgaggcaccagaccaaaagctcccttgatataggccaccatcttggcaacctcagggtccttctcagcataccagctgtcctctgcaaaggagtaatagataccgtcaatggtaatctctccgttatgcttgtacaaaatgtctgccaatgctcccacatggtccgaatcagggtgggtcagcagccatgcctggacgtgaccgcccttctgcttaatctggttcagaagataatccgcgttattggtccagcctccgtccactacgatgagaccgccctctcccgtctcgatgatgaccgacagaagctgggccgccgtgtcatgattggccagcatggtgagacggccggccccaaacagtgaggtggtatctgtctttggagtggtaacctccccaaacgcggcaatctgagccttggtctgaatcaccggctggctggcagcggctgcctgggatgactgggcattatccccttcatccctgatgataattttgtccggtgaggacagcatctgtccctgggcctttaacggctgggagttggtcatggccaggctgtccagattccctccggtcattgtcagtgtcatgatggccagcagcccggcggcggcctgtttccagtatctgtcaatcctcatcccaatatctccttaatcatttctttactgaatctgagctgtcagctctctctgttcccctgccttcataacatcattcacaaggtatgcgctttcatccccttctttgtcataagggaacacctgcacaagcacgtcgtgctcgtcaaagtaactgccatagtaggtgctgtccgtatcctccgagtcagtagcttcataatagaagttctgctccgcaacataggtacccactgccttcagcacttcctgaccataaatcacagcaatgtcgcctgtggtcttatgtgtcacgggaagcaggacaaccaacctgctgctgccggcgtcatacttggcatccagatccaacacgtaatcagcgaactcgccgtaaggatccaggaactggtccctgagatcttcccttacctcctgccagtcaatgttaatatttttatcaacctccaggtcaggctgtccgtccccctgaaccacaccgttactgggagaaacaatgttgctctgggtacaaccgcaaagcagggccgctgaagctaataatatcaatgataacttctttaattttctcatgatatggtaatcctccttttgtcaacgttattattatagctaagattacaataatttaacagtccttttttcttacaaaattattgatgtttttacaagttcctcttgatttttccagtaactgatgataatatgttcaatataattaattttaactattttttgaacattcaggaggatacagccatgaagcaagataaaaacagcagtatagataccccattaaagaatcggctggaccgggtcacaaccatcattccctttgtgaccatactggccctctgctccctgtttatgatattcccggacgcctcctctcaggttcttgggtctgtgcgctttttcctgggcgaccagtttggaagctattatctgattcttggactgggcgccttaatctgctccctgtacatggcattttcccgctacggcaagataacgctgggaaatctcgaaaagccgcagtactccgccttccagtggggttccatgatgtttacggcgggattggctgccgacatacttttctactccctgtgcgagtggatgctctacgcaggcgagccccatataacggacatgggggccatgcaggactgggcatccacctatcccctgttccactggggtcccattccctggagcttttacatcattttggctgtatcctttggcttcatgctccatgtgcgcaagcggaacaaacaaaagtattccgaggcatgcaggccgcttcttggcggacgggtggacggcctctggggcaagctcatcgacctgacagcggtatttgcccttctggccggtactgccaccacgttttccctggcaacgcctctcctctccatggccttaagccgcgtgttgggcatacctgagaacaatttcctgaccatcggcatcctggttatcatctgcgtggtgtataccatggccgtgtacttcggcatgcagggcattgccaaactggcggcctcctgcgtgtacctgttcttcggactgctggcctatttccttctgtgcggcggcgagacacgctatatcatcgagacaggtatcaccgcggtgggtaacatggtacagaacttcgtgggcatggccacctggaccgacgccacgcgcacctcctccttcccccagaactggaccatcttctactgggcttactggatggtatggtgtgttgccaccccattcttcatcggcaccatcagcaagggcaggaccatccgccagactgtgctgggaggctatttcttcggtctgtcaggcacctttacatccttcatcatcctgggcaattacgggctgggactgcagatgcacggaaagctggacctgatgggtgtctacgccggaaccgatgacctgtaccaggccatcatctccatatttgagacaatgcccctggcaaaggccgggctggttcttctggccattaccatgattgccttttatgccacatcctttgacgcactgaccatggtagccagctcatactcctataagtccctgggcgctgaggaggaaccccacaagcaggtaaagctgttctggtccatactgctgatgctgctgcccatagccctgatttttgcagagaactccatggctaatttacagaccgtatccatcatagcggcctttcccattggtttcatcattgtaatgattgtatggagctttttcaaagacgccaggcactacctggacaaagagaattctgaaacgcaaaacattgaataacgtggtcagaaaacgcaattgaatggtataattgaatcacagcaataataaataaacgaggaccggtctccctgtcctcgtttaattttgtacacacataattatgtactctccttatccttcattatcctcccacagaatcttctgaatcctgtcctcggcctctgtctcgtcacttcccttaaagtaaaaagtcagaaaacctgtcattctaagattctttacttcgtcatattgcttgacattcgctgtatgcttatcgctggtgacaaaaatatcgcagtcaaattgatttgctgtctgaatcaaataagaaatgggaattggcctaaagacccgttccctgctgtcaacttgtttcgttaacatagaatcacctcaattcaaaacaaaaccggctactggttaccaccctcccctgaataattatacatgcccctatgtatttagaataacatttttttcctctaaatacaagagattaacgtattaattttatattgtttttgtaaatttcaaactaaaagtcagagaaaatccctattttcgccgttattttattgcaactgcaacaaaactggtaaaaatagggttttcctgtaatttacatttaaccggcgcttacgctgacgccttttacagcccactgataatttcgcagtgcctgctggagattcaggtctgcacacttaaacccggactgtgcctggagatacgccagctcctgctgcatgaactgaatctgactcagcgtgccgttctgcctctgaatctgcgctgcattccatgtgagctgggcgctctggtaagcagtggaagctgaatcataggccgcatttttctccagtatggtgtcgtacagtgtctgcatatcagaacggagctgatcctctgaatagtccacggtacgcatcttgtttgccttctgtgtcattcctttggtggtgcggacctggaaatcgctcattcccgcccctgagccgctccgcatgctgatcaggctgtaattattgttcaccgcggtttccttgtcagatgccagatccagggttccgataaccgacgggtcggctgccggaaccgggccaatgacagtatccgcgcctttgtcccatccggtatagtagcaaagcgtcttatatatctggtcaattcccgcgtctatactctccagctgggattttgccgaggacagctgggctgccgccgaaagcacatctgcatccaccgcaagcccctgggcctgcatggtctgctgtatggcctgggctgtccgggctatctccaatgccttggctaccacggttctctgagccagataatactcatactggttcatcagggtttccgcgccggacacaatcatgttcacctggcggtccacactcctgctggacttgctgcgctcaatggcgcgatccatggagcctgcgctggaacgcagcatcctggctccccccaccacctgcatgacagcgggatttccgctgcccaacacatctgccagctggtctgcctgggacatataatcatcagccaccacgcgcatggccgttgcaatgcttccctggtcctcctccatggtatcaatcatggaatatgcgctttttatgggggcatagtaattctttataagttctgtcaattcatcgtactccatgtggctgtcctggagacgggccatggcttctgtgtacgcctcacccggcaccacccccggctcatcggccagtgccacggctgtgctgcccgccgtcatcacggctgccagtgacaaagccatgagaccttttcgtctgttcatgttcatctgttcaacctccttacctttcttcaaccggcctaattggaggttgtgagaccttttacattccaatcataggcttccatggccagcagaagctgaagcttatctgtctccacactgttcttggcggacacatagctgttaagcgcgctctggtattccagctctgtaatctcgcctaccgccctcttggccgtggccgtgttcaggttaacgaaggcaacatccagggccatcacggccgcgttcagggaatcccggttggtaagcactgtattgtactggtttctaagagatttggccgctttgtctcttgcatcctgaagctgtgcctgattggactcaatcagatactggctggtcaggttgccggccttcttctcataatatttcacatcgtaattgtttgagatggcagtctccatatcagcttccggattcatggaagcaatccggttcaaatccggctccggcacatccctaatctcaggctgtccgtccaccgcccatcccagcatcaggcaaaggcttctgtggacattgtcagcagacttctgcgcagacaaaatggccgtatcctggtcctgtacgctctttaacgcgctcagcacatctgcctgggttgccatgccggcggcctgacgggccacggttgcctcgtactgggccttaagcagatttctggcgctttgaagattttccatattataccgtgactgctcataagtcaccatgagctgctgggcctgatacacaagtcctgcctctgtctggtcatactgaatcttttccatgtcggcatcctgatagttattgtcggcctgctgctggagcacgccaacctggaacctggcagtggcccatgccacgtcgtcgtcgctgtctgcattattccagatggcatcaatgtcatccatataatcatcataggccgcattcaggtccttgcccttctgatccttataggtagaccggttgctgcggaccgttgggttgtactcgtgcactaaatcctttaactccccgaattcgagcacattatccctgagggatgcccatttatcctcactgtatgcgaattcagggcttaaatccttgttaatatccggtgcaggcggctctgcgataacatgggcatcatccggcttgcttgcattccttgcaaatgatgttatgggcattgctccggccatggtgatggctgacagaacagctgccgccctgtacccatatttcctgttctttaaatttttcatatcttctctcctcttttctgtgtttccctttcacatcagcttccgatgttccggcatacaccgtattccaatatgagcatttccttctttgacacttccagaagtttttcccggtccaccacattcttataatacagcgttacggctctgatgataataatcatggccatatccaccagatatgccaggttctcttcatcaatgggataacgttccctgtcaattccttcataaagcttctggacgaactcacgataggactcatcctgaagcaaaaaacccttgattccaaataaatggttctggtccaccacgcttaaatccgacagcatgttcctgtacatcttgtagcccaaaccgccatggtcctcatccaccactgcctccagcagcttaagggcggttccaaagggattcccctcctgctccttcagggttctgaagattctctcctggcagttatccctgaagcctctgagcatataccgcatcaggtcgtccttatcttcaaaatatgtataaaagcttcccctggatatgtctgcctccttgataatctggttaatggatgcagatgaataaggaacccttgagaattcgtggaccgctgcctccagtattgcctgcttcttctcttcctttagtttcaaaaatcgttgtgtaggcatgaatccagcctcctagccctcttttgtatggtacaatcatattccttttggtgacataatatcatttgtgacaatatgtcacgaacccaattataaacacatatgccatggattgtcaagaaaggaagaattaaatttccataaacagaaagtgctggaattccccccgccatatatctccatatatagcagctccgaaaaccagacagcgtaaaaaagagaccactcgtttccacgggcagcctcctctctgatacaaaaatggggttcctgttaaaatttatccttccactgggcaatgttatccttgtcaaaccgcagcggctctcctaaaagtacctgagttcctccgtcatagtactcttcgatagtgaattttcccaagtcgccggcatccacaatgtccccaaccctgccggttgcagctcctgttaccagcgcatgggcagagtatgctcctaatacagtattgcttaaatatcagtgattaaattactaatggtatcccggcatatgtccacttaaatgggtgtgctgtaagattgtattgttcaataaagcgcaggatgcttgcttccagttcttctattgataggcagcttttccgcttcagcagcttccggttaatgatgccaaaccatatctcaatctggttcatccaggaactgtgtttcggagtatagacaaagcggatccggtgggaagggtcatgcaggaaatccgcccggctttccatacttttaaggatccctgttttcccttttttgcccagttccacgccaagggcacaggcttctgccacatagcggacaagggcttccgacttatgggtgtttaggccatcgcatataaatgtccatggggcttgcgggtctgtccctgccaatgctttcacggcttccacaaaatcctcttctgtgcgtgtggagtttaaatacggcatttccatacggcccgttgcaacatcaaagaacccgatgaggctggtcgtgccatggcggatatactcaaactccattttggcgcactggccgggtaatgggagcttgtcaggatatttatgttccagcgcctgtaccccggtcatttcatccgtggaaacaatgtgtgcaccttcccggctttgttcctgggcactctggtacaggccgcagatttcgtttactttccgcgcaaaagattccggggcttccgtcttttccgaagaatgaagccagtaacggattttgtggggatgtaaatctacctcatttttaaaaaacggctgacagatttctcagaaatctgttcagcgatcccctgctttttaatttctgccactaacagcgggaggctccactggcttacttcgtacccaaaatcatttgggttgctgcaggcaaggtcgatgatccgcatgatctggtccggcgtaaaaacagacggggcaccggggcgttttttatcggacaggactgcccgtatctcatcttcaagcttttccggggcgtccatttcaatcctccgcaaggctgggagcgccgcgaggaaccgactgcgccaggtggcaacattattataatgaagcccgacctgtggtgcaatattctggttgagttccccctgtgacgcaagcaggacaatgctggctcttttgaccagtcctgacggaagggagcggctttttgaaaaagcagataatatgtttttcatggcatcagataaaaccgggatagtatcaattgttttccttcgcataataacccatccattctttagtgatagaattattatgcaccgactacaataaaaaagcaacgtctattcattattattttggcaatgccgtactaacgctccctggtccagaggattccacagataggcatcgtagcagattccattttcaatatacggcgccatctcagaaggcaggccgacacctgttaccttgcagtcagaaccctggtcctgaatcaccttggccgctgccagtatgcctaccgtcgtgggggagatgattgccttaaggtccggattgttctgaagcatggcctgggcttcgcttgtggatttatccggaaggtcatcgccataggcgatatccagcacttcgatgttcttatagtcctcaggatgttcctcaacctccaaaagcattgccttgcaccagtcggcatgaagctgggattcagggtttgctgagagtatgccaatctttcctgagcttcccggtcctttgcagattgccagggcggactgcatctgggcccttcccacctcgtcaatgctgcactgctccacatgtacctgacggctttcagggttcactgcggtgtccacggaattcaccgcaattccctgagacattgcctgtttaagaataggctgcagtgcattaaagtcagcgccaatcactgtaatggcatctacgttctgagcgataagctgggtaatgatttcaatttccttttccgctgtcggctgatcagccccacggtatacagcttctactccaagcttgtcacaggctgccttgtatccgtcaaacatcagaaggaatatggggtccgctgctgtcttggatacaaatgcatatacctttttctccccatcttctgcctgtgtcccagcttcctgtgccgctgcagcggccgcatcttctccagccttggctgcctccgtaacagccgctgtttctttgctctcttccttctgcccggtgccgcatccggtcaggctccccagtaccatagctgccgcgagcataagtgataatgtacgtttcttcataatctttttcctccttcattatttttgtttgttatgtatgacacgtagtctaatccacccgcctgaggcagattcagaaatcacttccttcaaatttggaatcgccaccgccactaccagcagcgctccaataataatcatgagaatctgcgatgaaacatttacaattccaaggccatagcgcaggaatccgattgaaaacacccccagaacagcgcccagaaccttgccctttcctcccgcggtactgaccccgcccagaattgccattgctataacttccatctcgtatccctttgcgatgctggctcttgcacttcccagcttggagataaggaaaagccccgcaaaacccgcgcacaatccgctgagtgtaaacaccagtaccttaatccgattggtcttgataccagaaaacctgctggccttggcattgcttccaatggcatacagagagcgtccaaattttgtcctgtgaattacaaatgcaaataccaatgtttgaaccagaaatacaatcagaatcaacggaatccccgccaccttgctccatgccaggaacgacatcttggaagaaatggatgtaatgggtttatcctccagtatcatataggcaattccccgaaacaggatttgattgcccagcgtaacaatggtggaattcaaatcaggaaacgccaccagcaaaatcccgttaaagaagccgcaggcagcccccaccagcagtcccgccatcatagccggaacaataggcagccccgcctcgaacgcaacgcctgtgcagcatcctgaaagacacatgatggacgctatggagatatctatctctcccaagagaagtaccatcatggtggtaaataccataagggccttatccatgaacaccaccatattgttcatcatattgttaaagttcagataattactggacaggttgatgttgattatatttatgataatgaatattacaaatatcattgtttcccattggaataaaacggattttaaggaatgggattttatctttgctgttccttccataattaatccctcccctgcaatgccttcttgtccatatgctgctgcgtaatagagttgattacaacagatgcaatgatgacaaaacctttgatacccatctgccaaaatgaagaaacctgtatcaatggcagaatattattcagtgttccaaaaagcagcactcccaataccacgccgcccacttttccggaacctccggtgataaacactcctcccaataccacggatgcaattacgtttaattcatagccgctgcacgactcgccctgcgcgttgccgaacttacatatccacagcattcctgccaggcccgctatcataccattaatcacataagccagaaatttagtctttaccggattaataccgcttatcttggcagaaagcgcatcgtttccaactgcatacatatatcttccgtttctgaaatactgcaggaatatgtaccccataattgttatgatgattgctatgaataccagattgttgattcctaaaaccttgcccgtggatatactcatgaattcctgggtcatatctccctggcctacccatgcacccttactgaacacatacaccaggcctctcagcatgtcacatacccccagagtacctatcagtggaaagattctcagtttagccacaataaaaccattcagcagccccgccaaaaggccaattcccaatgctatcagcacgattactataataggtgtctccctgtggtcccttaaggtcagggcacatatcatccctgccaaacccatggtggaacccagagacaaatcaatgcatcctgtcagtatgaccatcatcataccaacagataccatcataaggatggcagtctcccgcagcaggtcatttaagttggagccggacaaaaaacgtccccctgtccttacctgtaccaggattgaaatgacaataaggattgcgaaaagcgtaagttcccttatattgtgagacacaaagcgttttaaatcaaagtcttttgaaatgcttttcatccatctcacgctccctctttcaaatcttcatctttggcggtcatggctgccgccagtatctcctcctgagtcacatgagaggcatcaaaaattgccgccagatgcccttcatgcatgacaccaatcctatctgccatagacatgacctcaggcatctcggaagagaccaaaataatggcatatccctgggcggccaggtcggacataattgagtatatctgggcctttgcgcctacatccacaccctttgtgggctcatccagcaacaggatgttcacatctgagttcagaagctttgcaaataccactttctgctgattgcctcctgacagtgaatccgctctggaaaatatactcttggctttaatctgaagcttctcacaaagctcctttcccgtctgccgctcccttcccgtatcaataccaatcaaacgattatatttatccagtgtagagagagtcatattcctgtacagctcccacgagagaatcagcccctgctgctgcctgtcctccggcagatagcccacccccttctttaatgcctgggacggatgagtaaagatgcattcctcccctcctacgtataattttcctgaatccggctttaaaagaccgcatatcccctgacatacctcggaacgtcccgcccccaccagacctgtaagtccgaatatctcccctttcttcacatcaaagctgatgtccttaaaatatcctttctttgtaagtccttttacttcaagggccgtcccgccgatcggaaccgcctgtttcggatacagctgcgtaacctcacgtccaaccatggctgatatcagctcatccttggaaatcctatccacatcccatgtacctatatatctggcatccctaaatacagtgacccggtccgccagtctgtacatatcctccattctgtgagaaataaatatgatggaagttccctcggcctttagcttttccgtaatgcggtacagttcctcacattcccgcttggacagggcagcagttggctcatccatgatgacaatcctggctttggaggaaactgcttttgaaatctctacaatctgctgctccgccacacttagattcaccattcttgtcctgggattgatgccgcatcccagactgagcagaagctcctttgccctggcatgcatctcattccatttaatagaccctgcctttgtcagtgactcatgaccgataaatatattttctgttacactcagatacggatagaccgtgctgtgctgataaatggccgcgatactgttggctgccgaatcattggtatttttaaataccgccttcctgccattaatcaggatgtctccctcttccggctcatgtactccggtaataaccttaatcagtgtggattttcctgcgccattttcacccattaatgcatgtatttcaccctgcttcagctggaactgaacgccatttaaagcaactacgcctggaaaacgcttcgtgatattcctgagttccaatatatactcatccaccgaatcccacctcccaatccagaataaaaaagcaatatatcaaatctggcaaggaggttattcttctttgcgatcacactaaattccaggccagcgctttcattaatatcagccagctggactgtatcaatcgaattatcgtgggcagagaactggatgtggaatatgtggatcggcttgaaagtttggggattgaagtggagttagtatagcgacgcaattaaaagaccgcagcggcaagtgcctgatgatgcacacagccgcaacggtcctattaatattataacttttttctaatgagcattctttgtctggtttctattttctgtccggtctgtgatactggcggtctggtccacattttctccctggtccatattctccatccgatccacaatataaataggcctgtccttcagctccgtaaacagaatcgcaatatactcaccgataatgccgataatcacaaacatcatggcaaacataaagcaaatcaataccacaatggtggcatagccactgggagccccttttctggtacaaagagtgtatatcatgacggcgaagcccagcagggccgagaatatgcccgcgtaaattccaagcttcaggggcatgttggaaaagcacaggattgtattgatggagaacacgaacagcttcttgatactgtatttgctctcccctgccacccgggcccttgcttcatactcaacggcggttttcttaaagcccacgttctgcacatagcctctgaggaaacgcaccttttccctgtagctgtccttcagcacctgggccacatggcgggagaccgcaaaaaagtcagaggcatttgcctcaaagtgtacatctgagatccggttgataagccagtaaaagccggaggatgtgatattcttcaccagtcctgctgttctgtttctggtgcggaccatgttgatgacctgatatccttcctcaaacttagccaggatatccggtatacactccgggggatgctgcaggtccgcgtccatacagataatgccgtctcccctgctgtagtccagtcccgctatcatggccgcctcatgtccaaagttcctggaaaagcttatcaccctgacccttgaatcggacgcggccagccggtccagtatatcctggcttccatccctgctgccgtcattgacaaaaagcagctcatagccccagctgatttgcctcaacacctttgtggtttccctgtaaaattcttccaatgccttttcttcgttgtagaccgataccacaactgataacaacctgtccatctcttttgtctgtaatcctttcctggggcataatgaactaccccgcagcaagctgcggggtatcgaaggttgcaacctctacatataatcccatatgctatactgctttgttttctctacgtttttatagattgttttataatttttttcctgtccctgttctttcacatatctacttatgatttgctcattcccatgttcactcaccgttgctacgtaatagccatctgtccagaattctcctccccacaattttttcttcacttgtggacatttcgcgaacacctcccgggctatgatgctcttcactatttggatgattttttttggactatatgcaggcactgactggataagaaaatgtatatggtctttatctgtacctacttccaaaaatcttatttcatacctttcctgaattccctcacacgtttctttgattaccctatctacatcttcatctattactactcttctatattttgctggacatacgaaatgatacatgagtactgatacattgtgtgacttgcgtattgtttcactcatcacacaatttctcctttcctttttcctctagtatatcacttcctccatgtcttgaaaaagtttgttacgcagcaagctgcggggaattaaaccctctttttgattaaaatatgctgtcaatctctctgccgtcatccccccagtgcgtgtctgccccctgttccggcacattctaatcaaaaatacggatttgctggctggagtgggtgggcacccgtttgtcctccggcggcatttccatgtaatttccatacacctctgtcagtatctggtgccatcccttcggaatcatcagacgggtatcctcaaaatccgcatcctccacctggtcgcagcaggacttatccacagtcacatacagataatccggctgatagttgctgtaatagcgcaggctccccttgctgcgcctgtccttcagggcagcggccttctgcatggcaaagataagcttcatgggtaccagacggcccacggctgccagccctcccacgaatatcttgtgaatcatgctgtatttaccaaaatccagcttatacctgtgccccatggccatgccatacaccgccttgtgcaggaagcgggtaaattccgcccccgccctggaggcaggaagcttgtccagaatgaacaaatccacccatatatggttcagctttccctcatagtactgcatctccaagctgtcctcatggcatttgcttttcttgtaaatgattctgggtgtgaaatcataaaatgcctttccgcccctgtaactgtccggctccaaaagctccatggtatccggcagctcccttggagccaccttcatgaacgcttcatactggtttctggtaaacgccacatccgcgtcatcatcccagggaatgaatcccttatggcgtacggcacctatgagggtgcctgcgtccagcatgtagcggatattatacttacggcaaatccggtctatctcttttaatatagtcaagttagcctcatggacccggctcatatcataggtttccatcataatcagtgctcctgccctttattcctgccgtgtttttggcacggcgcccaaactgtgccgcagagtccctatgcgcactccactgcttccttaatcgtcctggccatatagtcgatcataccgtctgtcattcccggatacacacccacccagaatgtgtcggacattatgcggtccgtgttgtccaggcttcccacaatgcggtatccctggcccgctgcccgcatttcatcaaaacatggatgctttgtcagattgcccgcaaacagcattctggtctgcacaccctttttctccacataccggacaatcttattccgatccacgccttccctgcatgtaatcagaaaaccgaaccagcttggcctggaatgcgggcaggcttccgggagaatcagctgattctctgttccttcaagccctgccttcagtcggtcaaaattatggcgccgccgctccacaaaggagggaaatttatccagctgggcgcagccaatggcggcctgcatgtccgttgccttcaggttatacccgagatgggaatacacgtatttgtgatcataccccagaggaagctccccgaactgccggtcaaaccggtgtccgcacatgttgtcacggcctgaggggcatacgcagtcgcggccccagtcgcggaaggaccggataattttattgagaaggggattgtccgtatacacggcgcctccctcgcccatcgtcatgtgatggggaggatagaagctggatgtgccgatgtcaccgatggtgcccgtaaaacgggttacttcctttccatcctcttccatggtatactgggtacccagagcgtcgcagttgtcctccaccagccacagattatgtttctcacaaaatgccttcactgtccttaaatcgaagggatttccaagggtgtgggcaatcatcaccgcctttgtcttttcggacagggcctcttccagctttgttgcatcgatgttatactgagggatggtcacatccacgaacaccggcaccgcgccgtactggatagcaggagccactgtggttggaaacccgcaggcaaccgtgatgatttcatcccccctctttaccctgcgctcacccagcaaaggggaggtcagcgtcataaaggccgccagattggcggaggaaccggagttcaccagggagcagaaacgcactcccagatagcctgccagcttcttctcaaattcatcggtgtacctgccggaggtaagccagaactccagcgaactgtccaccaggtttaccatctccttatggtcataaaccctggaagcataggggatgcggtctccctcctgaaaggacccctttttgttgtggtaggtgtcgcagtattcggctaccatgtccagaatctgctgccttgcctctgtctctgtcttatgttcaaatgccatgttcatttctcctctttacgaaaaaaattctgttatctgccggtccataacctccagcatatcctcgccgtccagataagccctggaccactctaccgtcttttggacggcttcctccaccccatatctggggcgccagccaaatactgactttattctggaacaatccagcttcaggaaattggcctcatgagggcctccgtcatactgattcacccacttcacatccccgccccaggcccggcagaacatatccaccaggagtcctgtggtcacgcagtccttatcgtccggtcccacgttataatatccctggtgccgtccatcctcatactgcctcatggcaatggtaagatacacggcaaggggctccagcaccagctgatagggcctggtggaatggggattccttacaatgatatctttccctgttgcagccgccctgatacagtcaggtataatcctgtcattggcaaaatcgccacctccaatgacatttccggccctggaggtagaaacagcacaccgcccgtcactgaaaaatgatttctgatagctgtgagttaccagctcggagcaggacttactgttggaatagggatcgtatccatccagaggatcgcattccctgtatccatactcccattcccggttctcgtacaccttgtccgtggtcacattgaggaaagagcggacactgtccgtcaatctgacgcactccatcacattcactgttcccatgacatttgtctcataggtatacaccggatccttataagaatcccggacaatgggctgggccgccagatgaaacacaacctccggcctcacccgttcaaacacgtccctaagccccttaaggttacggatatcgccgatcacactgtccatcctgtcctccagcccggcaatctcaaacaagctgggatccgtaggaggttcaagggaataccccgtcacccgggccccggcaagtgccagtatcctgcaaagccaggcccccttaaacccggtatgccccgtcacaagcacccttttatctctataaaaatccgtcaattccttcatcttcataaaaactctcattcctttcgcttcgcttaggcacaaaacagttatgaaatagcaagtttgtgcttccactattttatttttgatgttaaactctcctcagacagatacactacagagcacggaggaggaagtagaatcggttcctccatttgggatcaagtccgcataaaaacatgtgtcggctgtcttctcaagcacaaaccagtgacgccttgagctcgtaacctaatcattgtcaaagcaattccttaggtctttctttgctggacagccagtcaatgtctgtctattttacttaggagggctgttttatgttatctatcaaacactttgtctgctgtggcatggacgttcacaagaaatttgttgtcgctaccattgctctgacagactacaggggcgttacttcttatgttaaaaagcggttcgccaccttcaattccgatcttaattctttgaaaaaatggcttctttctttcaattgcactgagatctgcctcgaatccactggtaaatactggattccaatttttaatatcctggaggattcctgtcacgttgtcgttgctaaccccaagtatgtcagggctatcaaaggacagaaaaccgatgacaaagactccgcctggattgcggatctgtttaaatttgatattgttccttccagttatatcccctgtaaggaaattcgcatgcttcgggaattgttccgataccggcagaaactgattggccaccgcagcagtgagaaaaaccggttacagaatgctcttacggtttccaacattgcccttgcatccgtcctctcagatacctttggaaaatcagcgaccgccatcgttgactatatcctgacctgtgaggtatttgaccccgaatactgtaaatccctgcttcttaaaaaagcaaaggacaaggcagatgatgttgtaacctccataatcggttatgaactgcgccgtgaccaatccgttaagattaaggtctgcagaaagcatttcgatgaaatcaatgagtgcgtctccactctcgaagaaacgatttccgacctggctaaaccttaccataaatttatcgaattggctactacaattcctggaattacagagcagtctgccacctttatcattgctgaaatcggggtggatatggcggtattcaaatcctcaaaacgtttgtgctcctgggctgggctggctcctgaaaataacgaaagtgccggtaaaaagaagagcgtccatgtttcaagagccggggtgtacttaaagcctctgctggttcagtgtgcaaatgctgccatcaagagtaaaaacccttacttcagatacaaatatgaccgtataaaaaaacgtcgtggtcataaacgggcaatcattgccattgcacgcatggtgttgacttgcatttaccacatgttccaaaagcaggaggtatttaatcctgccgatacggattattccgctattcctgaagaaatgtaccggaaatttcaggaacagtatgacagaaatgccatcaaacgtttagagaaacgaggctatatgattactcctcctgctatggcctgataccctttattccataggatcctttggggcggcagtttactggtgctcttgttaagttacgatttttttgattttttctttcaacctaatatcctctcatccaattccagtcatcctcataaacccatccgcataccctagccacttccatcccctccgcacagcgcccctttcctccggcattcgaggaagcccagcatgattccaggcgtgtttcatcaggaagcacgcctggaaccatgcggacccccgcgactccccctctaccaaatcttccagggcgccttacctgactgccataatccctccagcttattcatctcgcgctgggtatccatgcactgccagaatccgccgtgatagaaggacttaagctgtccctctgccgccagcttctgcatggggccctgctcgaatacggtggaatccccttccagataattaaatatctcagggttcatcaccatgaacccgccgttaatcagggcaccgtcattgtcctccttttcccggaaagaaaggaccgtatcattttcatcgatatccaggacgcccttcatctggccaatgttgaccgttgtgatggtagctgtcctgccatgggatttatggaaatgcaccagttcattcaaatccactgttgacacgccgtctccataggtcagcataaagggttcattccccacaaaaggctggatgcgctttacacgcccccctgtcatggtgttgagtccggtatccaccaatgtcaccttccagggctcggaatagttattgtggacttccatcttattattggccagatcaaatgtcacatccgaggtgtgaaggaaataatctgcgaaaaactccttcaccacatactgcttatagcccagacagataatgaattcatggaatccgaattccgaataatacttcatgatatgccacaatatgggttttccgccaatttctatcatcggctttggcttcagatggctctcctcactgattctggtaccaagtcctcctgctaaaattacaaccttcatctctgtcctccattgtattcccgaaacacattcagcttgttctcttccaatatccggaatgcgctctgtatcttatccagtcctttgcggtattcaaactctgtctccagttcttctcccctgtcccgcagttcttcccggctcattccgggaacctccagggccagccgggccttcctctcaaagctttcctccctgctgggcgctttccggatctcacgataagtagtataaccatttcccataaggattgcaaggcagaatagagccatgagccatcggtatcccctgtttgtcccctccctcagctgccacaccagggcaaaggtaagtataattcccaatattcccacctggaactggagggcatagcgggaactcagcgcatagttttccttctcaaatatatacctggaaataaagatgattacatggttcatcccgcctcctgccaggagcataagaggcataatggtcctctcatacaggcggaaccggaaattaagccataaggccataagatagccgcagaccacaaacaggcccagggcgtagcacatccggttgctgagaaggcccttttccataaaacgctcaagttcctcccctcccaccaggactcccgaaaaggactttaacagaaaacggaccggaaatgtgggattttcagccagtatggtgccaagggaacgtcccgtggctcccgcgtgttcctccaccgccatggaattgctcagcatatacagcagaagcggaatcagggcgcaggccatataggccagataccgcgtatcccaggaaccctgtccccttctgcccggacagcccctgctctttctccggtccatcaccatgcagaatccataggaaagcagcagcgtggcggcgtacaccgcacaatatgggccggcagtacccagtataataagccacggcagtaccagcagctttaaccggtcgcgctttttctcctcccccgcccacacccggtccagaaccagctcatggtagtagaagcaggcaaaggcaaaaaaatgggaccacccgcttccattggtaagcatttcccatttattcagactgaacatcaccgccatcagcagcgcaaaccagagacatccgattttcctgctcctgccataggcggcaaatacccagccggccagtcccaggctcaccacccccagaacacgttccagggtaatggtaaagccgaagaactccacattgacaattcggcagagataattgattgggatgcgtgtcagaacatccggcacaagaaatttatccggattccacacatccggcaggtagctgttcaccagccggatatagtctgagtacaccacgtcgcaggtggcgctcctcacgtaccaaagacagaataggatgcctgcaagcggaagaagccaatatatgattttcctgtttcgttctgcgtccatggttatcctgctcctttctcatttcctatgtctttcccggaaaccggtttttacctgaccgtcagatgcacaatcgctgccagccggtcctcccccctctgttcctgggcattctgcatatagaaattatactcaaaggtcaggtgtaccatctgccatggctcggcctggattgttgtatttacaacattagaccgtaccggaagataacggggctcatccttatcctttgtaatcctcacagcctccccgccgctcatgattcccggatataccacctccaggtcaatcacgcctgtctcaccggccatgaccgtcaggctggcgtcttcatccatccagccgtcgctgtagtagccataatccacctgaagcttcatttcccttacaatctccgtaatatcctgaaacccttcatggtccgggtcctcccgcagaaccagcatccggtcatccaccagaccgatatcccggatattctctatgaactccaccctggtgccttctgctgtccggtccctgtcaaataccttaaagaaggttctggccgtgaaatcgctcatctcatagctgttgcctatgatgtaaatggtcttgccgaatattctgtcaccatatcttccgtaggtctcctcagccagggaattgtaccgcagctgattgggccagagatacagcttgggataatccgcccggtaaaacagctccacgggaagcatgaataccacatagcaggcaaaggcggctccccagggccaaagccgtttcagatacagctccggcttcaccccctctgtcagttctccatacatataagccagaaataaaagggcggataccagggacacatacacccagcgcatctccacccgtatggtaacgctggaggacgcgatacagagtccggtaaacagaatgaacagggtgctgttcttcagcatctgaatacggtaatccttccgcttctcccttgccatcttcaccacgaacgccaggacaatgaccgcaatggcagcatctgccaggagcaccagcacctttatcaccagaggactctgcccccatgggcatccattgagatgttccggccctgcgttgatgccgaacacataggcgatctggctcagcgcgtaccaaaaggtatcccccaggctgaaggtatctgccacctgggttccccctgtgcctgccggcagaatacttcctatggtaaaagcgcgtatgacctggaccagaagaaaggacagcaggccggctccccattccaacagcttcctgctcttcttaaacagaaggaccagcagaagcagcggaaacagggccatgtagcgttcatgtacaaagcataccccaaagtagagcacacaggaaaggcagaagtatatctggctgtccttctcattgagataccggaacaaataccagagtatcataacagccatccacagagccatggtctccataagccccagcacctgtccaatctggtaataagccatgcggctgattaagaacattaagccgcagagaaaaccgattccctttgccctggacagcctgcggccaacgaaatatatgctccaggacacggcggcgttcagcagaatgttaaagggcacaaaccatcccacatggttctttaccaccgccatctccagccaggcggccagataatacagaaagcggaaccgggtgctgcccaccggaaacacatactgaaggaagctctgctccccgtaacaggaccagaagtacaggtcgtccatgtataagccctttatttctattcctctgttgacccacactgccatggcaagcagaatgcccataaatattacatggtctttccactcatatttcttttccatcctggagaacccaatcctggttctcgtgctctcttttgcctccaatgtaagcgcctccttctggctgtcaattaagcttagtcatgctgtaattctccctgaactcctccagggcctgcccgggatcgtccggcggtccgccgtcaagagtaaccctggccgtcatattgccccattcatagtgaatatcagaaaggcttccctccgcaatcatatcctcgattatctgcagcgccctgtcctgtcccgccaggtatccggcttccacgaaaaaatactccgttccggcatatctgagaaactcctcaaagtatgccagccgttttaccagatacacatttccgccgcttccggtcacgtcatagtaactctgaacactgcagggcaaatccaggacctcgggatgccttccaaatgccaggacacggctcctgggcgtgaacatgcaggaaagggcaaggctgccctcctgtgcccttctgtcaagcatttccctgcggtggtcgtaatagcccatgtgacgcaggctcacaggcgtaaagcccggaactccggcccagcccgtggcacaggtcaccgctgtattcacagcaaaaaacaaaaccagcaccagggatacggaccgtctgaccgcgggcccccagtcctgcctgcatcccattctcagcgcgctgataaccagaacggaatagaacagaatgaaataattcccgtccacctgatacagggtgtaaatactcgccagggaaccaagagccagaaccggaatcagaatacggtcaaagaggttcaggaaatgttgggggccgcgtctggccgccttccatgaaacggcaagccagataataagaaaaaccgtgacgattccggttccccatgcaatgattacatgggccatgtcctctgacacaggggcaagcaggattccctgcacccgtgaccacagccgcgaacatttttctcccgcagtcagggcggacggatctccaatcacatggttaaagttataggggtatttcacccggcatcctgccttctcaaaaaatccggcaaatatggatgtcatgggcacgccggtgagaagccatgtgcggtaccacaatccggccacggctgcccccggtatcaggaggatccgccgtcctcctcggcagccaaggcttaagcgtcgggtaagaatcagacacagaagcgccactgtgcccagagccgttgagaacaccagggccgtgggcttatacaccagggtcagcagataggtgccgaccgccatgagaagccatggcgtgtttccggcgggaccgcacccttttccctgtctcccttcacacagcgcgaagcagataaagtcatatatgataagctggtgcagcagcgtgatgttatcgcttttggccgttgcggccatgttcataattcccggaatggccgcaaggacggcggctgcccagattcccttttcccggccgcagtatcttcccactatattggctgccagaagcaggattcccatggtgcaccacagagaaaacgccaggacaaatccgtaagtaggagtcccgctcagagggagcaccaggacttccaggcctttgctgtaagtataaaccaggttaatcatgcccagattctcgtaaattccctttccgttatccagaacataggcggaacgcaggccatagtggagcgaatcgtagtccagttcaatgttcatgcggcctgcctgaatcagaaccatggtgatgataaaggcaattaaggcggcctgcgctttgctgcgccttccgcccccatccgcgctttcctttacaccattcagccacgctccgggcgaaacctgattatttccgtgtccccaaaggatttccaggaccacagccgccagggccatgactgccgccaatcctctccacagcatcagccctccgtgtcccgtaagggatacaagacacaccagaaccatccacaatgcgcttcccagcacaagggacacggacgtcctctgccaaaaagggattggcgcggacagccggctttcttttaagaacagccggagaagctgtctccccgccagtaccagaaccgccatatatatgccggataccgccaggggcaggaaaatacggtggcaccatgtaaacagaatgacgcccgctgccagccccagggctctgaacctcatgccggccccctgtcctgacttcccgccccgccccgccgccagacagaacaggctccataaaaacacaaggaccacctctgccatcataagaagggtccgcgtattttgaagcaccggccccagcggctcccggagcagcaccccgaacaccgtcacggccaggacagccatccctgccgcccccgcgatgattgcaagtatcgtatcgtttttaccagtttccatgcaacaaatccttatccctgcatttttcagtcttattcgtaacagtcctgacatccggtgcggacactgctactcatattctccataagcctttttataaaaccccatgataatgtccgccaccggctccggccagaaacggcagaacatttcccgttcctcctcaaaccggcggttatccctgatacatgcctttgtggtggcatcctcatggacccggtaatagagaagaggccgctcatcgcagataaaacgtcccggttcctctgccagcctcacaaggttgtcccagtccagggcaaagctgtattccgagcgcacaaagggttcacccagcgccgccttgtgataggtggtggcggggcagcatatgggattgcccaggacaaaggccagcttctttaaccaggccctgtcgttcatctgcgggaaccggaggggcatcctcagaatcctcttaatccagagcatggcatccccggatatgagctttccctgtttcacaatcacataatccgttgtaaaaaccgtcatgtccggatatctcttatgagcagccaggagccctgcgctgtaatcacggtggtacatgtcatcctggtgcgcaatggtaaccagctcgccttccgccatggaatatgcaaaattccagtcatcctttatattgctctccccctgacgcacgtatacctgcagaccgtatttccaggccagccggtcaatatagctgctgggagtggacgtacagatgatgatatgggacgggactgtctgggccttaagagagcggatgcactgctccagataaggcgagtccttataggcgcatatggcaaatacatgcttatacctcataaaaatgttcctccagcatcaggcacagggcatgataaatgggaaggtgcagctcctggattttaaatgtctcatcagaaggcaccacaatggagcagtcgcaggctcccgccatcttcccgccgttcttgccggtaagtccaatggttttaatgccggacgcctttgccacggccacggcatacatcacattctcagcattgcccgaggtggaaatgcccataaatacatcacccttttttccatagccgtacagctgctgcgcataaatcatttccccgttaacatcattaaggaacgcggtggacaatcccgcgtgaccggtaagggcaattgcgggaaggcctccctgtaagcaggatgccagctcttccccccgcttttcgtctgctttcttaagcgcagccgcaaaatcgccggacaccgggcggcgttttacaaatcccttcatcagttctcccacaatgtgttcgctgtccgcacagcttccgccgtttcccgctatcattaccttgcctccgcctgcgtaacaatcccgcagtatttcatacgcggccagcacatcgcccttcactgcctccagaaccggataccggctggtcagttcctccagatattccatctctctcatccttagtctgcctgtcctttctcaataatccactgagctgcttttacaaggtcctccgcgtagtaatcatataccggagaggtcccttccttctcctcctggccgcgtatcccgctaccataaccggttcccaccaaaatggtggtgagaccgtagttattgccggcttccacatccagcagtttatctcctatcataaaggaatggggcttatctacctcaaaccgctgtgcggccgcctcaaacatgccggtacccggcttgcggcatctgcactccttcttatatgggccggttccgtgctccggatgatggggacagtagtaaaatgcgtcaatggacgccccctggccctccaggatatggttcatataaacatgaaggttcctcacgtcctcctcgccataataccctctggccactcccgcctgattggtaaccaccaccagacggtacccggcctccctaagcatccgcagcgcctccggcactcccggaaggatcttcagatccgaagtcctgtgcagatagtgtacttcctcattcagagtcccatcccggtccaaaaaaacaactcgctccattgcacatccatcctgtatgttatattccttgtttcaatccgtgcccggtcatttaacattaaatgttaaacctgtactcgccattgggcatatggaccttcacctggtcatacttccatctcgattcatccgccacccagctctgggcgccgcgcagttcaaaattccagtccgccagctgtcctcctgcctgctccatgcgggcagccaccttgtggagcacattgtaagggcagtacatgagaaggtaaccgcctccgcctgctcccagaagtttgcctcccagggcgcctgccttcagagcctcttcatacagctggtcaatctgcggatttgttatcttgctgctcatgcgcttcttgctctgccagccatagtccagaagcttgccgaagctgtggagatttccctttagcagctcatccttcagggcataggccagggcctttacctcacacatggcctcaaaggcatcctttttctcatagttttgcacctggtccttgatgatattggcagagacatggatttttccggtatagcagagaaggagattatactggagctcgtgtatgatgtcctttttaatgcgcagaggatttaccaccacattgttgcgtccgtggaattcaataaaattgaaacctccaaaggcagccgcatactggtcctggtatcctccgtcaatctttaaatccaggcgttccacctgataagcaaggtccgccagggcatatgcatccatcatcacacccttccagcgggccatggcagtgagcatggccaccatgacggtggacgaggttccaaggccggagccgggaggcgcgtcgcactgaaggtacacttcgcagccctggtcaatgcccatggcattaagggccgccgtcaccaaatccagttttccgtcatacacataattttcgcttgtattatatttcactgtcatgtcaaagtccagggaatgaaccacaatctggtcgtcctccctgggcacaatggaacagtaggcatatttattgatggtgctgccgatgatggcccctccctgctcctcgcagaatggtgccacatccgtaccgccgcctccaaagctgacccttaaaggcgcccttcctctgataaccatatgtgtctcctctctctgtctttcgtttaggctgtcaaatgaccgccttattctttacatccttctgaaactggaaatacgcctccggaatgccaatgtcaataaaatacccgtcattgacaaagcctcccagacgccttccctctgacagccacctgggtatcatgtcattttccagcgacacctttccctccggtatttcatccagcagccgctgtttcataaggtaaatgcctccgttgatcgtcccttccctggcatcctctgtcttttcattaaacccggtcaggaatccatcccggtccaaaaccgcctggccgtaccgcgaaacgtcgggcaccctgcgcagtaccagagccatatccaaattctggctgtcctgctgtctcaggagccgtgtatagtcaatctggtaaaatgtatccccattcagcacataaaaacaatcctctgtgataaacctgcccgcattctttatggcccctgccgtacccagaagcgtctcctcataggcataatcagcatgaaacccaaaagcagccccatcaccgaaatgctcctccaccatagtccccttatatcccacggcaaaaacaatatccgtaaccccatggcggaccagctcacgggtcacatattccataaaaggcttcccttcaatcaacgccattggcttgggccggtcgctcaccacactgcgaagcctggtccccagaccgcctgccaacaaaatagcctgcattcaacatttcctcctatactatttctcccccggcggacatcgttataccttaattttgccagcacagactgagcgggagcgcggttgcattgtccgggcatgctggctttgcggcgccccacgcgcctctgaggaatcaacgaaagtccccctccaccgccttccaggctccatccaggctatagtgcttctttatataatcctgggtcctgtggcaaagctggtttaaacgttccttgtcctgatataattccacggtctttctggcaaaggattctgcctggtcctctatctccagcactgtgtccgcaaagggaattccctctgcccctgtggatgtggtcacaatgggggctccgttgtaaatggcttccactacctttcccttcacgccggccccgtatctcagcggcaccaccaccactctgcactggccgtagagctgcgccagctcctcctcgctcacaaaacctttgatgatgattccgctttccgtctcctccaaggccttgatttcatctgtcaccttggagcctgccacatagaatttcacatccggcagttccctgcgtataagagggaatatttctctggcaaaccacagcaccgcatccgcattgggcggatgggcgaacccgcctacaaacagcagtccttctctctccccaaagtcatcctgtatgttatccaggaaggtgtcatagacatacgccgtaatggcctttgcgggaatgcttccgtcgatggcgtgaatggcgttgatctccacataagaaggataataagaaacagccgccttgtgcatcatggtcagctccacggatttccagtaatccgcctccctcttaatgttgatatcgccggtaagctcatattcccttcccagacgaaggaagtgcaggtcgtgtccataataaatcaccttcatattggtgtaatcttttataaaatccacatacttggcggcaatatggggacggttcaggtatgcaaatgatatctcgtctccatttgtctttaaccagtcccagatacctgccgcgtatgtgtctccgtagagaacctcgattcccatttgcagaagggtagtggtatagggctcctcatgaaggaaattatctcccaggaacttcaccacataaccctttttcagaaacattttcaagtactggtaggttgtcttggagcccgcgtccctgtcaaaggtgggtacatagtggtccaccaccaggatgattttctttccctggctgcgctccctggccctgaatggattgggatttccggtgttgacacactgctttttaaattcctccgcccatttttccttcagctttttactgttctccacttggtagcgtttcagacctgttccgtttacatccgtaccgttggaaacaccctcaaagtggatcaccttggagagaggctggtagacaaccctgtatccggcctttctcacctcaaaagccagatccgaatcctcgcagtaagccggggcaaaccgctcgtcaaatccgccaatccgcttccacagagccgtgctcagcaggatggcagcccccgatatatagtccacatcctttacataattgtattctgccttgtccggatcatccagacggccgtagttccagccggaaccgtcactccagataatgcctcctgcttcctggaggcgtccgtccgggtacaccagcttggatccgaccatgccgatggaagtatcggactcaatcaggttcaccagggaggaaagccagccttctgtcaccttggtgtcattattgaggaacatgatgtattttcccctggcagcctttgccgcctggttgcagttgcgcaggaaaccctggtttgtctcatttctgcggattacaagtccatccacataccggttcagctctgccgtcgcatcggctgacacgtcgtcggcaatgatgacctcataggtgacatcctttgtaaactctaggatggactggaggcacgcataggtatagtggacctggttataacagggaatcacgatagaaaccatcggaccgtcccatgtttccgcgccgctgcccgcgtctgtatatccacccctgcccggcacttggggaaataccagtctgccgtatttgagatattcctcaccaatcttaaaatcgccgtctatctggttgcgtccctctttggtggcgtacagcctgccgtaacgcaccggatgcttcactgtattaaaacaatagttgagtatcttgcgtttgcgcgtgccccttggaaatgccttgttgacctgggctcccagcctgcgccgggctttgaacacaagggcttcatgcccgttgagataggttgccagcttgcccagctcgtcgatttcatggcgcaggtccttaatcatcacttccaaatttgccacatggttattggtaaggcgctgtacctcctgctctttacggatttgaaggttcttttcctccacctctgcctgaagctggctgatacggtcctttgcctgcgacagggcccggtctgtctccttaagttcagccagggtcgtgactttctgccggtaattcaccaggtatccctggacagcgtccccatggacataggactggaaggaatcctccatggacgcgtacacagatgccatctcacttcctatgccaaactcctgtaaaaattcctccaggtcagtatatgacatcaagccccggtatttataatagaaataagccagattgcggtactgtacaaaacgggcaggaaccgggaaatcaaagacccactcgtaatccagacagtacagctgctcatccccgtccgtttctgtaatcatcagattctcaaagagcccgtcaatgttgcttactttataagaaaaatcatcaaaatccggaaccggcccaaaggtccgggtaaactccggcgtcacggaaaacggaacaatctggtcctccgtcacatcatagagaaactgaagcgctgccttaatgtcctccacaggcgccctgccgtctctgatgccctggcccagacgttctgccagggtgatacctttcaggaaacagaactccaccttgctgccgtccccggatatctccggctccaggattctgaccctgggattcagctgccttaactgccggcatttttttctcagggaaaggatgtggaagcttcccgccccgtccagagcagccttctccacccggcgctctccgttcagttcccgtatgctggtacgaatccggaattcctcttttctggtacggttatacttcgcgaaaatggttttctcctgtccgccgcccttagaggcaataatcaggaaggaattggcaaaccggccaaagtcattttcctcaatcagacggtcatacacttccccttcattgaggcaggcataccgcggactttcataggacacagacgggctggtgatttctccctttcccggcagataccggtctgagtaaagtgatatgggcattctgtggtcgggcaccggataatagaaatccgcccgggtgagtcctgccccctggcaggcttcctccgcctgttttctggtacaaaagccttcctcatggtttccccctgccaggtacctgagtcccaatgcattttcacacgcaattaccagacggccttcctgtttcagaaaggaggcgccgaaggtaactgcatcccgtatttcctgcccttccctgagtccgccgataaccacaaggtcaaatgacggctccggctgtcctgcctgcgtccccgtcttaaagccatatgtgatattgctgtaagccttgttgcgctcctgatttacggccaggttttcatccgcttcgtccatgaccgtcacatgagcgcacctggaggccagcagtcctgtcagaacgccatagcctgagccaatctgaagcacttccccgcagcccgtataatcaagccactccagaagattttcccttatgtcagacagcgcgtggagcacctccggcctggactgattgtccagggccttcctgataccctcaggaccgcttccatattgtctgaataaatctaatatttcataactgatatccttcatggaaagttataatcctccgttcacagttgggcgcgcattaccgacctgggtattcccggcctccaccttctcggcctttacctgggactccatatcatacaccccaaccgtatttttattggaaataaccgtaatattggtcacgttgtacaggcggtggtacaccacatgctcaccctgctcaaatccggtacagctcatgctcagcagatactccccgccctggagtgtcattttctgggtgaattccaccacatactcatccccgcgcttcacaggctggatgtcggcgccttcaaacatggtgttggtgccagtaagctccgtaccctttttatcctttatagtataggtaaaaataggggactgtatctctgtattgaaatgaatccgttcttttatggtaaacatctcaccttttaacaaaaggttggtgatatttcccctctcgtcaaaaagacccaggtccacaatctcagcccggccgtccccgtattctgtacggtcataattaatggtcagctggtccttcatgagacagcttctctctaatcccataccaccggaaaaatcagacatctccacatcgccggattttgttcctgctcctgcctggctccgggcagtttcctttccttccgctcctgctccggtatgttgcccattaccggtatattccggagcattaccggtatgttccggaccattaccggtatcttcctgcccgcttccccctgacaagctctccttctgctgtctttcccgctctaattccgcctttaaggagtccagctgtccggccagaatcttcttatacatatccaccacgcggccggcagggccttctgcgatgaattctcccttgttcagcagcaccacccggtcacagtatttaataatgcttcccatatcatgggtcaccatgaggatggtggtccccttctggcggatttcctccatcctgcggtaacattttgactggaaaaacacatcgccaacggaaagagcctcgtctacaatgaggatttccgggtctacattgatggccaacgcaaaagccagccgtacaaacataccgctggaataagtctttaccggctgatacacgaaatccccgatttccgcaaattccagaatgtcctgaagcttggcgtccatctcctttttcgtgtagcccatcatggtgccgttcatatatatattttcaatacctgtataatccatattgaatccggcccccagctctaaaagagccgatatcttgccgtccacctttacctccccggtggtgggggtaaggaccccggtaatgatttttaatatggtggatttgccggaaccgttggtgccgatgattcccaccgtctcccccttccttaccctgaaggaaagctggttcagcgcgtaaaaatcccggtggtaattcttatgggaaatactcatggattccttcagacggtcaatgggtttctcatataatctatataccttggtcacgtccgcaacgtctatggcatatttattgtcctgttctttcactgacatagcattctccatctctatgcatacttctccactttaggcataagtatagcatagaatgcaggatttttataccttaaaccaaatttttcaaaaaaagttaagaatccccttgacatatataactgtatatactatagttacagtattaactgttcaatctttggttacagaaaaggaagcccgaggaacttcctgacacagaagcagtccttttggtccactgccgcaccggcatccgcaacaagcgtgcttcagaccagctggtggaattgggaatacaaacatttctatgattttggcaaaattgtggactggccctatgaaacagtaaaggaaaattaatttatattagagcagcttaacattacaagcttatatataagattaaagaatgaatgttcggtgatttttatcacataacacaagtacaaaatgtggtatcctataatcaatagagcaaatcacaaaaaagagaaaacctggaggtaataactatggaattgaaacatttgaacaaggatgaatttgagcaggctgtaaacgctgatgacgagctggtggttgtggatttctttgcaacctggtgcggcccctgtaagatgctgggtcctgtcatagaacgggcggcggacaaattttcagacgtacatttttataaagtagatattgatgaggagatggacctggcagcccgcttccaggtaatgagtgttcccacccttatctacttcaagcgcggcgaggtattatccaaatcaatcggtctggtttcaccatcagatattgataaggaaatcagcaagttaaaataataagccaccgcacatttttgcattcctttttggcaggccggttcctcaattggatccggcctgtgttttatccctgttcctttaacttcccattgagcttggcataaatccgttggcgtatccacggctcggaggatgccctaagcgagtcctccaggccgaaccaggctgccccgctgttactttttccgtagcttttcaccggtttaggtctgtattccttattctgcaaatcctcttgaatatccaacaagtattcttctactccgtattcctcaatcatctcaaaggtaatgccatctattccagcacttcccttgtttactcgtacttctttccatgcccgccacaaaatatccaggcgaaagatacggtcatcgaatcccacatgtggcaggcatccatgcaaaccccgatttgatccttttggaccacccggtccaatatctccttcagttcttcaaaccttctccccacctcgcttcccttcccggacatggtttctaacagcaccgttgtcttcatgtccgggaacatcacatggttcagcccctgggtgatctgttcaatggcgctgtccagaggctggtccagacggctgcccggatgaagattgtacaggtttcccggcatcagctccatccgtgcttttgcaaaatgtccaggaatgtctcgatctcccccggttttaactcctttgccctggctctccggggattgcggatgaacagctggaatgtattggcaccgatttggaccgcgtcctttgccagagcggcgtatcctttggcaactgaaagatgggttccgattgataattctttcatgtttcgttggccggcgtttctttggtcaatgtttcatgtcccttacaatgttttttgcaaatattatatttcttcataatgatattatctgtcttagcagctcaattatgtatggctggaaacagcacgagagcggttcaaaaaccgctcccacagataatcatttgccaagaaaagaaaaacattcccggccagaaggaatccttaccgggaatgaatatttaaaccacttttaaatcagttgaatcctatacgcggtcgtctgcgggggaatacttgccgtcataaagttggcatgggtgatcctgaccatctggccgggacggagagaatggatactgataggtctccctgcgcggtctgtgatcggcgtggtgttgggaacactgaatctgatctggctgtttatatcaccgcggtttccggtgtaaataaagccattgcatgcatccacatccgcaatacggtctgttgtcacagaagtctcctggatcctgctccgcacaacaatcataaacgcattggattgaggcgggatacttcttgtcatgcgggaagaaaaaatggcattgatccacattcctggctggatccggcacagacccacactctgtccaaaagaatttataataactgtatttctgtttatattcagctgtaaggtctggatggaaaccatctgtccggcttccggcatggagtaagagatcaatatggttccgttcgaattgttgatacaggagctgtcctccacaaatgcattatcaatacgcagggcatttccctgccggacgatggttcctctggggtcgttgttcatagctatccttaactaatatgttgtttgatattatagtatgaggattttgggaacctgttccattatacgtcatacaccccgccatcataggcagtttgtgcggaaatgcttctctgtctgggcgggaacttctccgtaaggttctccgccagttcaattccgattcccggtgcatccgggatcacaatgtatccatcttcctcccggaaaggttcggtggtcatctccgcctcatttccctggtgatagaaggatgggaactcctggatggcaaaattggggatggccgcgtccagctgcaggcaggccgcagtggaaaccggacccaatggattgtgaggcacgattttggcatagttcgcctccgccatggccgccacctttttggagggagtcaggccgcccagggcgcagacatccggccggaggtatctggcagcccgcttctggagaattgtttcaaactcctggatattgataaagcgctctcctgttgccaccggaatacttgtgcccttggcaacatccgccatggcctccgggctgtccggggggatcgggtcctccagaaacaggggcctgtaaacctccaccccttttgcaaatgcaatggcctcacagggatccatactgcggtggcattccaggatcaggtcaaaatccctccccaccgcttcccggcaggccctcacccgctctatgtaaccttccaccttgctgttataaatactggatgaccggtccgcctgggttctggtgatatcacctgtgatcatcagacgggccgcgtcatatcccttctgttttaagttcacgcaaaattcagccatctcctccggcgtatagcagaaaaccgcctcgtagcttctgactttatcccggcattttcctcccagcagttcgtaaaccggcacgcccaacgccttacccttgatatcccagaacgcaatatcaatggcggacagggcgctcatgatcaccgatcccctgaaatacatgctgcggtacagataattccagtggtgctcgatctgaaatggatttttgcccagaagatagctctcaaaacgtctcagcactccctccactccgtctaaaaagccccaggccccggcctcgcccgtaccgtggatcccctcatccgtgttgatcctgataaataaatatttgcttgccggaatgatctccaaaccagtaatcttcataatggtcacctcattcttcattaataaaacggaaacatgataggcagtgtaaaaatgcagacaatggtgatcataaccgccaaaggtgttccgcatttcagataatcctttagtgaatacccgcccggccccatgatcatgatctggcagggagccgccatgggggtcaggatagaggtagagctggcaatgagcacgcccatcacagccgcccttgggtccaccccaatctttacacaggcagctgctaccaatggaatgaaaatagtcacggttgccagattggacatcacctgagtcagaatgaatggaataatgaagaacactgccatgatgacataggggttagtggtattgcccagcagggagatcatccagtccgccaccacatccccggcccctgttatcttgatggcgtccgagagggccagaacaccggcaaacaggaacacggtgggctgatgaatagaacccagggcctcgcgctccgacagcacaccgcacaggaccaggaggcatgccccaatggaggcggtaaggtacatcttaatgccgatcacagattccaacagcatacaggcaatggtgcccaggataaggatgacagccaccttttccttggaaggtgtcagctggctaaccgtgtccttcttctgaatgttatccgaaaattgggaattatcgatgtcgggcatgagacggtaaccgataaataccatgtaggccagtgaaatcagcagaatggggatcctggcaatggtaaaatcccagattgaaaacggggtggaagcgcccgccttgatcataacatcgctccaggtcatattgctggcgccctgtcccaggaatgtcatggcggtagctatgttggcaatggccatggcgggaaacagcatcttactgcggctggtgccgatctcattggcaatccccaccagaaggggaatcatgatggcagctgtggctgtggcgctggtcagacaggccaggaatccagccactaaggatgagatcaaaattagcattttgggattatttttgtagcggaccaccagtttttgggccctgtccagcagactggtcttggtcagtgcagcgccgatcacaaacatggcaacaaacatgaccacattggtgttgatgaaaccgcttaaggcttcggccggcttcatcacaccggtaagaataagggcgagaatgattcccgctgaaatgatggaaaatgggatttttcccgataaaaacgctatgatagtacacagcaatataatgagcgtaatctgtaaaggtgtcatggtatcctccgtatggttagagtgtcccggatccttttggtgtccgggagtactcgttcttcaatgaccgcgccgtcctttgatatacttatcataatgcagtcaaatgtagatgtacagctcaatattttcaatatttatcaactttaactcaacattttacgtaatagttcagacggaggaactgaacggttactattttaccggatatgctttttgcagatccggtgaaacacattgctctcctcagtcagcatggattcctccagatgtgcggtgaccagattcctggataagggtttctcacccaaggacagagggacaatctcctcatggaacagattattaaatatcatgtggtccagcgtgatcatcagggcatgggtgtacgccacacaggccagaccgctgcgggaggagccaagctcataggcgatatccggcttcagctggtaataaccgtacagattatcagcataggtacggtacggggaaccgggcatcagcatcacattgggttgatcacagcagtacgaaaggtcaatccagggatatcgaaatcccggttttggaacagccttctgtaccaccgggtgcgtaccgaccgctgccatcaccagctcacactggtggacagtctcatagcagaagccatgctcctgcttatcgatcacggccagcagcacgtccaactggcgcccctttaccatctggaccagctcccccacggtgcgctcgtgcatcaggatccggatccccggaaatgcctccttaagctccggcagtataaagcggaacatgacctccgtaaaggtagcctggacaccgatgcgtatcacacccctgctcatactggaaaaactgctcatctgcgtgtccagctcccgctggatccgctcgatctcccctatcttctgaacataatactcccctgcctgggtcagcacaaaccgcttgcccacacggtggaacagcttcacctgaagctcagcctccctggcctggacaaatttacttaaggcagacggggtaatgaacaggttctccgctgctttcgtgatgccgccgcagcgggccacctccaaaatgtattcaattcctttgtccatgtctccacctgtcctttacagctacaagtttaccaattataatatttgatcagtgcctgcgttcccagttctcccatgccttcctgctccaattccttatacatggaaaggacgtcctccagcacctttaactccgtatccgctgccctggcctcttcatctgccaggttcatatccttgataaaatgcttgatgaagaatccaggccgatagtcgtcctgcaacgcccttgaagccacattgttcatctgcacactgctggcggctcctgtggaaatggactttagcattgtgtccacatccagccccacattcttggcatagaccattgcctcacatgcccctgccagggctcccgcaacggcaatctggttacacatcttggtgtgctgtccgtttcctgccttaccttcataatcgatatttttacccatggcctgaaggatgcttagacaggcgtgaaaatcttccctgtcaccgccggcaagaatggtcaatgttccatcctttgcccccttgtcacctcctgtcaccggagcgtccagggcgtgaagacctgctttttttgcctcctcataaatccgcacagccagcctggggctggtggttgtcatatcgatcaaatatgtgccgggatctgcattggcaatgataccgccttcaccaaaatagatgtcctccacatcctttggataccccacaatactgatcacagcctgtcgccccttggcgcattcccccgcgctgccgcaccagattgctccttcaccaatgatatcctccacctttgatcttgttctggtataaatagcaacctcatagcccgccttcatcaaattgcgcaccatggatttgcccatgatccccacgccaataaaacctatttttttcatttaccattacctcctacagatattgggaaaagcccccgttttttccaggtatatctcccaatatatcactttttcccaaaatatcaagccatactcccaaggcagttccagctcatggtggtggagacaatctctgatgccgatgactataaaacaaaaaattgacggcaaaatggctggcccatttgtggtatcataccattaggccagccatttttattgtgaatcgccatatttcttaccccttgatcccatccaccagatacctctgtaatatgatgaagaaaataatgaccggaagcagtgagatcaccgacattacaaacaatccgccatagttgttgtatgagttggggtccaggtacatgttgagagccagggggatagtaaatttactgccactgttcataaagatcaggggctggaaaaagtcctgccaggtccagtaaaacgcaaagagaggaggtgacaatggccggcttcacgatagggatcatgatccggaacaggatcgccagcttgccgcacccatcgttctccgccgcctcatccaattccctggggatcccccggaagaactggaccataaggaaaataaagaacgcgccgccaaaaaaccaggacaggaccagggcggtcctggtgtcaatgaggtgcagctttttcagtatgatatactggggcaccaccataacctgttgtgggatcatcatggtcagcatcacgcatccgaaccagaatcccgagaatctgaacttaattctggaaagtgcataggttgcaaacagggatgtgatcacgcacccggctgttccggccacggtgacgatcagggaatctccgactcgtagtaaacccaatttttccgggtcttgaagataatgacggtaaataccgcgataatggccaccaggatccatgccagggcacagctgtatcccatatcaaaatagataaatgccctgcggtacagataaagcacatagattcttcatgacatcgtccgtcaccaccagggcctttttccccatctttgccatggtatccgctgccatgtccagggtccggctgccgcttatgatctgtccgggcgcaataaacgtatttgccatattccttatctcctttatgaaaatgcctccagcaggtcatcataggaagcggcggtctgcagtctcctcatggtattgtcatttcccagtttcccggccagctccgcaatgaggcgcagatggtccttggcgccgtcactgtgggctgggacagcaaagaggaaaaacaaacgggatggctccccatcgtaagattcccagtcgatcatatccctggtgcggcccactgcgatacccacatggtccacatggtccgactttccatggggaatggccacatgtccgccgattcccgtgatcccttcgctttccctaacatacacatccctcacatacccctccagatcctcaatatatccggcattcttcaggagtccggccaaatgcctgatcacctcatccttattctttgcatccatgttcaggtcgatcacccgatcatccagaatctccagttcacaaagttgccgatgatgaatgccataagaaggccgcctaagaatcctgctttcgactgggccgagcagtagccgatgatcagaccgggcacaattcctagccgtcctgccatggaataggccgcaccggctgtcatcaccgcaaccgcaaagtccattgcataggaacttaatttgttcactccccaccagaaccccacccatgtaaatggattcaggtttgaaaatggtgttgcgcccgctgcaacggcgcttccgatatcccatccgccaaatgcctttgccagcgccccaaggataccgcctgccacaacgataggaatcatataggagatgcctgtcataatgtgtttcatgaatttttgcttctttgccatttaaaagtcccccatctttcagtatttaccgatctgccggcctcacttgccaagcttttcgtggatcttgttgataacgccctttggagatttcataaccgtgctgataggaatctccaccaccggtttgcctttgaaccgctccttattcacgcggatatcagcggagatcaggatcacatccgcatctctgacctcctccggtgtaagttcattttcaacgccaatggaaccctgggtttcaactttgatcgaatcacctaattcctttgctgcgttttccagcttttcctttgctatgtaggtgtgggcgatgccagccgtacaggcagtgattgctaaaattttcatatgcagcctcctctgatttgatttacctagaatgtatcatttttctttgagctgtgggaaatttattgcggcatattaaaacggtaattttttaactgcattcggtaattttgctgaaatacggtaattttctaatatttaggagattttaccgggcgttgttatatttttctctttcaggtacaggagcagcaaaagcatgtccccgctctgtgaaaaatcaaggccggtcaggttcatcagctttcagctgccttaagaagcttttccctggccgggcgccccaccataagctttaacttaagatccggaaaacagctaggggcttttttcacagccccctatctgtcccgttctcctctttgcacagctccatcaaagttctggcgctgcggggcaggaacttattcttgtggtaaatcacagagtacttccggttcagagccaggccctttatcctgaactcggccagttccccttcccgaatgccctggcgcaccaggaaatagggcagaatggaaatacccagccctgcctttacaccctgcaggatgacctggttgctggcgctctgccatatggggcggacattcagctcctgtgcggccagtataccgtcaaatatctccctgccggcgcttcccttttcccgcaaaataaaatcctgattccttacctctgccagctcctccagggtccttccggcaaattcatgaccggccggacatatgaaggccagccggtcccctgcaaagctctcgctcaggataaaggggctgtgggctaccccctctatgattcccacatcgatttcattgtccagtatctgctgttcaatggttcctgaattggcaatggatgcctccaccttcagggccggatactgctgtttcagcctcttgatgtatccgggcagcagataggtccctatggtgatgctggtccccaccttgagccgtcccatggcgtccacgtcccgcactccctgctccatctcatccagcagttctatgatatgcctggcatactggagggccctgcggccgttctccgtcagatacagcttgcgggatatgcggtcaaacagctttaccccgtagtattcttccatttctgagatggccaggctgatggacggctgggcaatgaacagctgggatgcggcggccgtcatgctccctgtctcacatacagtaacaaatattttcagatggcgaagtgtcatgttcctcttttcctgaaccgcatatggcagactgagggtgcatccctgtaatctgacatagggtccatatataatatatttattataatcattatttaattatagtattttacatatggattttcaagctgtatagtaatagcagaaaaaacaaatacatgattgtaattaaatgtattactgtaataaggggaataccatcatggtagttaacataaaatccaataaacatgcctcctccggggtttcgggacacgcgggcagccgcagctcccttctggcaaagctctttctttcaaccttgtacctgagcgcttttaccttcggaggcggatatgtcatcgtcacactgatgaagaaaaaatttgtggatgaataccactggattgatgaacaggagatgttggatctggtggccattgcccagtcctcgccgggccccatcgctgtcaacggagccatcgtggcaggctataagctggccggcatggcaggcgtactgaccacggtcattgccactatcctcccgccatttaccatcctgactctgatttccttctgctacgccgccttccgttccaacctttttgtgggttggatgttaaacggaatgcaggccggcgtgggcgctgtcattgcccaggtggtctgggagatgggcagcggcatcgtaaaagacaggcagtggatatccgtcctaatcatggccgctgcctttatcgccaattatgtatacaatgtcaacgcagtcctgataatccttttgtgcgccgccataggtgcggtccggacccttacttctgagcacaataaaaaaggaacggaaggaggcgcgctatgatttacttccggctatttttaagctttctgcagatcggcgcattcagtttcggaggcggatatgccgccatgcctctgatccagaaccaggtggtaacccttcacggctggctgaacctggctgagtttacagaccttgtcaccatttcccagatgacccccggtcccattgccatcaatgccgccaccttcgtgggcacccgaatcgcaggaacgcccggggctctggcagcgaccattggatgcgtgctgccgtcctgcatcctggttacccttcttgcgaaaatctatctcaaatacaggaacttaagcctgattcagggcgtcctcaaatccctgcggcctgccgtggtagccatgattggggcagcaggcgtcagcatactggtcactgccttctggggactggagggcttttcccctgatctgagcgccatgaacccgcgttccgtatgtatcttcatcggtgccatgatactgctcatacgttttaagatgaatcccatcctggtgatggtgctgtcaggactggctgagaccgcctgccagctggccatgcgcgtgatatagcgttttctaatcattgacttcccggtcctctcctgtgaggtcagctgcaaccagagcctggccaccttcagacgcgctgtactcacactcccaaaaatgatataataagcttatcgcagtacaaaaaaagaatgggggaatcaatcatggaaatcattcaagtaaaaaaagacaaaaagaaatatctggacctgctcctgctggcagacgagcaggaggatatggtggaccgctacctggagcggggcgatatgtttgtgctgacggacggtactgtccgggcggaatgcgtggtgacaaaagaaggtcccggcatatatgagcttaaaaatatagcgacagccccccagttccatagacagggatacggccgccgcctgattgaatatatctttacctattatccggatttgaagacactttatgtgggcaccggggacagtcccctctccctgggcttttaccatgcctgcggtttcaaagattcccaccgggtggagcacttctttaccgacaattacgaccatcccatcattgaggacggaatccagctggtggacatggtctatctgaaacgggaacgcggcatggactgactgccgcagcagggccggaaccaggccactctgtctcccggctaaacctgggaaactggccatttatgtctcccggctaaacccggcttccaaattccttcagccactttctacgggccctgtaatccggcaggattcgttccacctcagcccagaaccgctcagaatggttcatctcttttctgtgggccagctcatgcaccaccacataatccagtatctccggcggcatgagcaccagcttccagtgaaaattcagattaccctgggcgctgcagctgccccagcgggtcttggcggcccgcacggcaatgcggttgtaatccactgccatgcgctccgcgaaataggcgcatcgattctccagctgcttcttggccttctttcggtaaagcttctccagctcagagtccttctcatagtctttgaccggcctggcttcctcctgcctgcgccgctccaccatcatgaaccatttctgcacaatccattcctggcgctcctttataaagtccatcacgtactggttgggaatgcgcacaggcaccctggcatacacatggccgtctgccttgatttccagtcctatggtacgccgtttggagtagaccacctctaccggaatggctccctcctggtccccatggcgccagctaatctccactttctgtatcatgaaacgctccttgctatcctacaaaacatcggaaaaatggggacggagacgcttgaacatcttaagtcccagcaaaagcaccaccgcggtgaagccccagtaataaagggtcagcgtaggccgttcccagaaccagtttcctgtgagcatggtatccctgtacccggccaccacataataaaaaggattcagcttgaacagcacctccacccattttcccgctccggtaaacatggcttcgtggtacatgatgggggtcatccagataccgaactggaggcagatactcacaatctgcgccatatccttaaagaacacattgaccgcgctggtaaagaatccgatacccagggccagcagggacgcagccagggaataatacaccagctggaaccatatgacggagggcatcctgcctataatcagatacatcccaaacatgatgaccacgaaaaaggcatggaccagcagacaggatatgagcttgataatcggcagtatttccaccttgaacaccaccttcttcaccagatagttatactcctggagacagttggtaatgctgttgacggattcactgaaaaaaaaccagggcacaatgcccggcaccagccactccacataagtgaacccttcaatgggaggcggggatttaaagcccattccgaatacaactgcatagatgctgactgtcacgatgggctgtatgaacatccacaccaccccaaagtaagagcccacaaaacgtttccggaaatcagccttgcccaaatcccatataagcttccgttttcctataatctctttcatcagagaaagcacataattcatataagtaaattccttttcatcagaacttgaaggtatccttaaggccgctccactttctgtccttatccgatataatcagctgcatgtccggttctatgggccagtccaccccgatttcagggtcgctccacagcaggccgccctcgtctcccggatggtagaagtccgtgcacttgtaggcgaattccgcttcatcggacagtaccaggaatccatgggcaaaaccttcgggtatataaaactgcttcttattctctgcggaaaggatgacgccaaaccattttccgtaggtttcggaatcggaacgcaggtccaccgccacatcgtagacagtaccgcgcaccacccttaccagcttgccctggggatactgcttctggaaatgcagtcctctcagtacgcccttgacggacatggactggttgtcctgtacgaacaccatgtcgagacctgcttccctaaaatcattctgattgtaggtctccataaaatatcctctctcatccttaaaaaccgcaggttcaatcacacacagccccttgatgtcacagggggtcactttaatctttcccataactccattcgctccttttttattgtcaaacacgcctgaccggccgtcagccctctggcagacgttatccacatccatctggcaattctatcactttatccacagactggcaagtccttatgcacctgtgaaccgcctaaatccatttcccatgtccatatatccgcagcgtgatctacaggaaaaccaggccgtgccgcggctccggacagctctgcgccgcaattccaaacaactctgtgccgcaattccaaacagctctgtgccacggccccaggcaattccgtcacaccctcaggcataccaggctgaacaaacgcagcaccacatagatatccatggcggccatggcaaacagcagtcccctgtcatcccagtccgtccgcaccaccttgtcatttttgaggctgagaaggaaaatggggagcagcggaagcagatatcttccctggactccgtttatgacattggagctcaccggcgtccaggctaacagcatggagaacatcagcgctcccagacacaccaggcagagaaaccatatccacagacgccccttccattggatgaaaatgctctctccgggttttctgagcgccagcatcaccagtatggctgtcagccccagtataaccgcatagggggtgttgagcactgcatccatgtttcccagcgctcctccaatcatgccggagtatagctgttccccctgccaggccagggtattgtaacacatcttaagcaccagcatgggactgtgaagcagctgtccgaaggtgtaccctgtttccccggcccaggctacatacccctggtcagcctgggtgtaaagggacacggtcctgtggttcaccactgccatggccgctgcaaatgctcccagtacggaagcagccgacaggctccattttccccagcctccgaactttctcaccggtatcaggagacagaaaccggctatgacgccgtacaccatcttgcagggtcccatgacagccatcacaagagccagggcagctacatccctcacccgtacacgctctgccttgtaagccaaataaaggcataccgcagtaaagtatccgctgagggctataatcatcacatcataggaaaaggacgccgccagatggagcgtcatgggaagcagggccgctcctgccgccacctccctgccaaagggcatcctgcgtatggtaagacatcccatggcagtgaaaaacataaggttgaacagccgtcccaggaataacagtcccaggccgcccagccccagcatccttcccagggcaatccccatggcctggggaacataggccaggggcgtggtccgcaccggcatctggtatgacatgacggtcccgtcctcaccagtgcttccaaggccccgctcctttatggtccggtatgtgccctcctccagcttctgtcccagtaccacagccgtttttccgccgtcctccgcagcttcataatccatgactcctgtcaggtcctcaatgaatacgtcctgggctcttataaacacccgctcgtcctccgccctggcggtcctgcccatcaggcggctagaaagctggtaagcgctgatataatggctcacctcgtccggggcagacaggggagggaggaccaccatatacatcaggccgattcccatggcggctgcgggaaatatccgcgccaggccatagtcccgccttaccaggaacaggtatcccactgccgccagtaccagaaccgcaaataccatcagcccgccgtaccagccgtagaggaaacgatcccctgtttccaggacaccggccctgacatccgtcagatgccacagtccaagggcaagaacgccgcaggagcctcccagccagacacagcgggaatggccgcgcggcatccttcctgccccggcatcatgcccgattcccggtctgctgctttcctgtttcctccccgctttcttacctgccatctgtttcctccccgcccattttctctgtactcatgccctccttggcgtccgctccggctgactcctccttttccaggaatctctgtatcttaagctccagttcctccctgtccttctggtccagcgcaatgcgctgcaccagctccttttgcctgctttccatctgggacatctggagtgtcatcccaaacaccttcacaatcagcaggaaaatcatgaacagaaagagaaaattaggggtggagtagattcccagcaaatgggcgcaggcatccgccacagccgggaacagtgagaacaccaccaaaatcagggccatgataacccagaacagcgctgcctcaatctgtaccttagcctgccgaatcttccgcatcataaaagccatagtcaatatagagactaaaaccagaatcactctgaatatcactgtcatcataggatgaatccctgccttcttttgttatttccaatactccttattcatgctgcacgctgccgccagcttcacaggcaggaaacggtaacacctgcccaggcggtagcctgcgtatttgaatccgctctttacaatcagtccgggcaccagccatggacggcggtgggtcacaagataacgggctgtctgcctgaccagacggattccctcgccctccgggcggatgcccccgaatacctccggatggtctgcctgggacacagccaggtcgaaattgcggtggaactgggccgcgcacccataattgtgggaatgaatgactctggcctccgccacatacgcgacggcgtaatcgtcctgcagcactgccttccctgcaaatatcatatcctcgttgaatatggtcttatgaatgaaaccgccctggaaccagaacttctccctgtcataggcgcagcatacattggaggcaaaaaaggtcttgatgcccattcttcccaggtcctccttggtctttatgcagctgtcctccggataattaaaggaacgggtaaagcgctccgccatggcgcagtccttatccggcagctgcctggcataggccatgatgaccgactccccgccgggccccctcttgtcaaaggcagccgtcagatgctcaatcagcctttcatcggccggaaccgcgtcgtctgtcataaataccatgatatccgccctgctgtagcgggcccccctgtttctggtggctccatggtcaaattcctccttggacagatggtgcacttccagattgccgattccctcaaagcccttttcattccagtaggccttctctgtattcatgacaatgattttgcctatgggataggtctgcatggaaagcatctttaaaagcctggaaaacttctttccgggcttgtaggtgggtatgattacatccacccgcagcacgcgctttctctcccggccatccgttatctctgtgttacgtgttacttcctccattaccggtattctcctttttctcactctgacaggcgcccgccgtatgcaggccgaagcccgtcactaatcccatcatgagcagcagatagcagcccgccgcaccattaatcccaaattttgataccagaaagccggataataccgctgctgcagccgcggctgccagatatacggcaaatatggccttctgtctgcgcatgattacaagagcataatacatcagattggccagggcatagaaccctcctcccagcacaatgatgatgaaagccccgtaatagctgaccagccttccttcataacctcttccaagaatcatctccatcacggacagcacccattttcccaaaacagcagcagcccccactgccagcaccgtaagtcccaggatgatggcgccgatgttcctgagctccttcttaaagcagtcatagtcctttccggtccacaagtttgtaagcctggtcagaaagggcctgattacaaaattggctaccatataaataacagaggtgggcataaaaatcaagttaaagtatcccgacgcagcatcgttcatcctggcgtcaatggcatatttggcagcggagaacacataaaagtccagaaaggccgatataaacaggaataaggtgcttttaaacagccttcccgtcttcctctcccccttgttccagtccaccgacggcagggcgtggataacatccaggttaaacagcgcgattcccgctgcctgggcagccaccgcggccagacaggagaacaaaaggtgttcaaatgccgccagcgtcaccagaaatacgctgaccgaaaaaagagttcggaaaaaattggattttcccgtaagatacaggcttccctggcgctgaaattccgactcatatacatcagcatacccatctattaccttgtatatgacaagcaaaatgagaatcatgcatttgtccgccgtgtaacgccccatgccgtgcatgaaggtgaggaacacggcccctgccgccagagccataatacatgttatgttcctgtgctccagataatccccaaaggaatactcgcctgttccgtccgtaatctggaagggacggataccaaaataagctacaatgaacatctgctgtcccagagtggaaaatccgaaggaaaagatacctccctggtcgtctcccaccacccgtatgaccagaaaagacagaaccatgctggccaatgcatagacaaaactccctgcaatattccagaccacgttctgccgtccgatatccgttcctttatataataaatgtttcgtcagattcttcataacgttctccaagctccggaggatagccggaaaatactagtataactcgattttaataagtttacattattatcctgaaaaccaagggaaacatgcgcccaaagcacggacacgtaagccaagaaatcagattactaccaatgcttaaattgtaagcttatttaaatcgagttatactagcgtttcctgaaattctgaatcataagtatggaaatcagcatcctggccatatagtggacggctgtcagcggttttaaatagctctccccctccagcctttcgtcaatggtcacctgcagctccgctaccctggctccctgtttgatcaggaaggaaaccgtgtccggctccggtccgtaattcaggttaagggcgaattcctctatcatcctccggttaaacatgcgcatgcccgaagtgggatccgtcacccttgttccggtggtaagccggatggcgctgcctatgattctgcttccaatcatcctgaccgaccatccctttttctccgttacaaaccgggagcctatgacaatgtcatacccttcctccatcttctgtctcatggcctcaatgtactctggcctgtgctgtccgtctccgtcaaactggacggcgtagcggtaccccttcctgtaggcgtatttcataccggcctggaagcatccggccaatcccagattcaccggcaggtccagaagattatatcccttatccctgcagattttggctgtgctgtccctggaaccgtcatttaccaccacataatccagatacggaaagccccggaccaggtcctccaccaccctctctatatttttttcctcattaaaagccggtatcaccagcagtaccttatccatgttcgtctcctacatccccctgataatgccgcagatacggtccacatcctccagctccaggtctgcatagcatggcagcgtcagcacacggtccgccacataggctgccaccggcgtatccttggaggaaaatctgccctcataacactggaaatcattaatcaggggataaaaatattttctcgggtatattctgtgccctgccaggcagtcgtatacctggtcccggtcagccttaaagccttcaaagagcacaggaaaataggcataattgggcgtaagcccttctttgaaggatggcagcttaatacccggcacgcccgccaggccggacagataacgttccaccaccttcttgcgcttccctatctcccggtccagatgatgcaggttgcacagtcccatggctgcctggaattcattcatcttggcgttcccgccaacccataccacatggtcctggtccacaatcccaaaattcttaaggcagttcagacggtgctccatccagtcctccttaaaggttaccgctcccccttcaatggagttaaacaccttggtggcatgaaagctgaaaatactggcatccccaaactcggccacgctttttcctttataccgctccccaaaggtgtgggccgcatcgtatatcaccttcagcccgtgtttcctggctattgcctcaatgcgctccacatcgcacaggtttccatacacatggaccggcataatagccgaggtcttatccgtgataagtgcctcgattttttccgggtccatggtgaaatcctccggattgatgtcgcagaataccggggtcaggttattgcgcacaatggcatgggtggtggacgcaaagctgaagggggtggtaatcacctcgccggtcagctccagggcctggatggccatttccagggccatgtgcccgtttacaaacagcaccatgttccggattcccatgtactccttaagctccttttccagctgtttgtggaaatcccccatattagtcagccatgcgctgtcccatatgggttttatcatctctatatattcttcgtaagaaggaagggaggaccgggtaaccagtatctccttctctttatcttcctgtccgttcatacgtcattttgtcctttctgcaggccgctatgcatctcaaggcctgcctcagcgcgccgtcctgcgtctcaaatcccgcctccccgcaccgccctaccaccgcatcctgcacaccacggtcagaaaccacacctctgccaggacgagtcccaaaacagccctggctgccgccatgcctgccgggccggttcccagatactccttatagtaatacagcttgctcctgtgaagcagcctctgcttatccacgatccgtttaaagcttttgtcaatgctgacagaatgggcatggacataggactcatccgttaccagcacggtcttcagacccattttcctgaacttctgtcccagcaccttttcttcataatacaaaaagatgtgtttgtcaaatacttcttttatttcccccggcgtgagaaggcctgtctttaacataaaaaaggacccgggaaccgcatccaccaggcggcagtcctcatcccccgcatacgcaagcctgtaggaaggcgtattcagcatggccttaaacagacgtctggtaaccaaacccgtatccagcaggtccttccacagaggaaggagggtccagtaggaaaacagttctcccccctgcgggtccttcaccctggctgaggcagccaccgcgccctgggtcttgtccagtgcatcctttacccgccggatgcagcgcggcgtcacatgaatgtccgggttggcaatgattacatagtctgcctccagacagcttacggcgtaattgattccctcttggtttcccatgccgtagccgccgttttgctccagccgaagcgcgtggacctttccgctgccattcagtgtccggaggagcttccatgaatcatcggatgagtggttgtccaccaccaccacgcagtccaggcactcataatccctgacctcatctaccagtgacagggtggtgcggcagtcattatagttcaatataatcatgcttatcttatccatatcatttcccgcttccaaaagccttctgcttccttcggctgtccaccagcctcatccccagcctgcggctgatccacagccggaaggcagggcagataaggctcacatggttaaacacccaccacatgtgcatgtacagcctctttccctcctgttttggggttcccttccagggagtcttatccagataatactcatagagccttctgaaatggttgtggctgccggctatccagggcctctcgtctcccagataatgaatgatgacaggggcctttcccgcctgcctgtactcgtcctcccccactgcccggtatgccccgcacatgttcaccagggtcctgtacctgaaataccggtagttggtaaaataattataccggaccggcagcgtgatgattctgcctctcagcgcgccgttaatggtatcctggtcacaggcaaataggctgccctgatggcttctgtaaaattccagcagctgccccagcacatcctggtttctccacgcctccaggtccatgagcaggactccggaattatagtaaggctcatccttttccatgccgatggattccttcatctccctgtaaaccgtgggctccatcaccatacccaccagatggcttccaagctctgtctcatacaggggacggatgcttccgttcacaatggtatcgcagtccagatacagagcctttcttacgcagtccggcagcaccctgggggcaaagaggcgccccatggcgcttatatcaaatcccctggtatccacctcatagtcaaaccgatccctcagttttcccagctccgccacatgaaggctgcggctgaattttcccgcaacagaggccaggcgttcaaggtaagcctcactcattcccacggacaggatatatacgtccatccgggggatgttcctgctgtggtccagcagggaataaagggaggccgccagatgtccggcatacccgtcattagacgcataaatgatattaacagtttctgtattccaatccatattatggcacctatttcttacattctctagtctttctaaggtcattttgtttacaattttacattatagcgggtaaaaagtaaatcacatctggaattttcctgccaaatatgatagattaagacatgtatggtaatctatataaaattcaggaggatgttacgaatgaatgagttaacgaagcgtgctgtcgcagcccttctgtccggacttctggtcttaggtcaggccggacccgcattggccgcgcaggatgattctatttatggtccggctttttccacaaaagtcgaacaaacctcccctggttcttcagaaagccagagtgggggcgtgcagagttccggcccgcagtcagtggctcctgccaacgcagccccggcagaacaggccgatgggggcagcgctgctgcagccggcagcactgaggcagccgctaaagccggcacagacagcgtgtcttcctctgccacggaccagaacgcggcacaggcagcagacgactcggcgcaggccgatgcagaggcagccgcagcagcccagtttgcagcagaggaagctgccagacaggcatcagccaatacgccttttgtccagattcaggtgctccgtccggataccacatggaccgatcctgtaataggcgatacaccggtggtgtcggagcagggattccgttccatgtccgtctatctgaacaacatagtgggcgacatcctttacaggacgtatacaagcgcgcatggctggagcgactgggctatgaacggcggccacaccactgtctgggaggacggcgccctggtggaggccatccagatgcgtttcaacggctttgtgggcaacacatttgatatttactactgcacaaccctgaacgatgggacagagttaaactgggcgcgcaacagcgcaacagcaggaaccatgggtacaggaaaggtgctgagcggcttcagggtctccctctggggtaaaggcgtggaaggcgctgcctacaacatggagaaaccattggaagcagcgttcccggacggaatccaggttgtggacggggcagtggcatacagtaacggcaccggcgttccatttaccggatgggcctggaatgacagggaccgctactactttgtgaacaatgcgcctgtaacaggctggcagtacatagacggtttcaagtattactttgacgagaccggcaagctgctgaccgacttagagcccattgtgggcaacagcggtccgttcctcatcagcatcaacaagcagatgaactgcatgaccatcttcgcacaggacggagccaacggcttcatcatcccggtaaagacctatcttacctctaccggaccggataccccgattggaaccttccagacaccggccaagtaccgttggcgtgacatgaaccacggaatcttcacccagtacgcgacgcgtatctacaagggcttcctgattcactccatcctgtacagccgtccggaccccatgacattagatccgctgacctataattatctgggtatcgcagagtcagccggctgtgtccgtctcctttccggagacgccaaatgggtatatgacaactgtgcactgggcaccacggtgaccatctacaactcgccaaaggcaggcccttatgaccggccggccattgagtgggttattccgggagaccagcactgggatcccacggatcctctctttgcccagcagtaatattagagtatacatccaaaatggcggggaaccgttcattggaatcactttccaatgaacgtcttcctcgccatttcatatactgccggcatggtatgctcaaatctcagaaaaaaccgcatcctgggcgtaagctctttataatacctgcggtattggggattgaatatctcctcaaactgcttggtgtttaccattgtctggtaataggtcctgcgggcagcgctctctgccgcttccttaaacctgccccctgtggccctgtcaaactgctcataggtgcgcttcatgcggtcacagtaagccctctgcttcccctggtaatccccgctctttccctccacggtccaggaacctgccacgcctacccggtaggcgctcatggcctcgtcaaagtaatagccgtatccgtttgcagccgcaatcagctggatgggcgtatcccccacgggacagtccacatagtaatcaggcagatcccccaccagacgggccggaaatgccatggaagacatggcgtagcccgaaggcttgtcaatgatttcctccggggtcaggacgcggctctttctgtacggcctcatctggccctctgtcagcgcctttcccaccaaatctatgctggcgctgtgaatacacagggtacagtccgggtgggtttccatgtaatccacctgcttctgaagcttatccggggacaggaaatagtcgtccccgtcacacatgaaaatgtactttcccctggccctggggaaattaaaggccccgctgatattgtcgatcccctgtgaatactggttttctgtctgtatcagcggcttcaccttttccggatacctggccgcatattcccgtataatatcgctggtaccgtccgtggatgcatcgtcgtggaccagtatctcaaacgcaaaatctgttttctgcatcagaaagctgtccagggctgttctgatgtaattcacatgattaaatgtaacacagctgatgctggccattatagttgtatctgcggtttgcggcccggcgccgcctcgcactttgtcgctcatatcctgtcacacctccctaccgctccaccttggtaatatattcctcatatttcctggcaatatacatgcctgtgacactgccgtcctgctctatttcctttccctcaaaacaacgcagatggtttgtcacacagtcatatcccgccagacaggaaaactccacgccgccggaaaatctgggattgcactccagcatgtggtaaacgccgtcccggtcctctataaattccatgttcacgcatcccctgattcccaacagcccggcaatggtccggcaccgttcctccagctggcggtttctgaataccagcacagaggttcccgctccgtttggagtccgcaaaagctccctgcggcagatagctgcgcatgtgccctgctcagggcttcgcaccacatccaccgtgaccacgtttccctttatcatgggctggacgatataatctgccggatctgtttcccccagaaacccctccatctcgcggcgggatcccaccatcttaaggccctggctgcttcttccattatagggcttacacacagccggatacctgatttcatccgggtccgcgtcccccaggcgcagagtgggaatcacggttccctccatatgctcctccagatagcggtacagctccatcttgtcacggcacaggccgatgcaggccttgtccgacatgcataaggttacatttatttcactgaattcgtcccggtgaagattgaacacatcaatctccgcgtccgtcaggggaatgacggcctccgccccttccttccggcaaaggaacatcatggtccctatataatggtctgtatccgttgcatagggaacctgataaaacacctccacgttccccgcgtccgcaatccattccctgggatacacatcgcagcctatgacccggattccattctccctgcatttcttaatgacgatatcagccgaaaaagaccctatggctgtcacaatcactgtcctcattttacgttcctcctgtttactttcttccgggcagcctgtccattgccaggcccctgatataccggaacacttccagccccaaaacccaggatgccagcatatacacaaccgcgccaaagagaatctgcattcccaggcccagccatcccacgggaacatatcttcccgcagccatgacagccgcggccatgaggattgagactgccactgacggaatgatatccttccactgctccaatatgctgtagttaagcaggcgtttattgggccatgcgttgatgaaggtgcacaggaaatccgcggccgccttaagtgccaccagcaccagaggattatagcgtatgcccgccaccagcaccgccaggcccaccatctttttcacaatttccaatttaaggaatatatcgctgcgccccattgcattcagcgcctgaaggttggcaatgtgaatgggccagaaagaataggcaatgcacatgatttgcagaaacggaacacagggcagccatttttctcccagcagcagcagtaccatgggccgggccacggctatgagacctgccatcatgggcagcaccagataggagctgacggtgatggcccttcgcagcatggactttacacgctccggctcgtcctggctggctgacagcacaggcagcataacggactggatggcggctcccaggttgctgacaatcagcttgggaaactgctctccgcggttgtagtttcccagcatggattcattgtaaattcttcctatcaccaatccgtatatattgttataaaccgtatccagaagggaggcgcacagcagcttccatccaaaggcgaacatggtcttaatccgcagaatactgaacaaaaggcggggtttccagctgatgctcataaacagaatcagcatgtagaaaaagtagtatgcaatctgctgccataccagggcccatacccccagtcccctgtaggccaggaaaatgctgattgcacccgatatcatggatgccgcaaaggaggatatgaacaggcccttaaactccatattcctggacacataggcattctgtatggagattacccctcccggaaacaggaccacggccagcacccgcaccagggccgtcatctcctggttattataaaagtatgcgatgccgggcgctgacagatacaataccaggtagatgactgcggatacagccatgttaaagaagaaaaccgaagaaaaatccgtgtcatccaccttccgcttctgaatcaatgcggtgctgaagccattttgcaccagtacattggcaatggtgacaaatatgagaatcacgcctaccacaccgtattcttccggcgagagcagacgcgccagtatgatggaaaccaggaactggacgccttgggcgcctccattttccattaacttccaaaacaggccgtttaagacctttgccgttgtctgtttttcattcaatgcctgttttccttcctttcttcatggaaccgcggacagaccgatgcctcaagatacaccctgaaacaggcttttggtcagtccccaatgaacagcatctgccccagtgtacgcacaagggtgttcttggtaaagccgtacttcaccataagtcccatttttccaagccggccgcagcgcggcagtcttatgaaagcctccagcgtttcctgctgttcccggttcagacagctgcgaaacatatggtaaaagcactccgcctgaccaaacatcttcctgtaattctccctggcgctgcctccgtcctttacccgggccctgacagaatccaggttgtctcccttctcagctcccagggtgttgccgccatgctgcctgtaatagtacaggggccggtccacccatcctatctctccaaagcaggacgcgataagggccagccatgcatcgtgcataaggcaaaccccgggaatttcctgtagataaggcagcatactgcggctgagcattacggcgcctccggtcacattgttctgtaccagaagctggggcaggcgggtgcgttccggggaaattttctgatatcggaagaagctgtccgctatgggccgcagctcctcatccgtcacggtcaggtctgaatgcaccaaaaggggcagcctgctatggcctggttctccttccatctctttcatcttatctgacagcatccgcgccttttgaggcagccagacatcgtcctggtcgctcagcataaaataatccgccctggccagaggccccagacgcgccagctggttttccgtcacctcatactctgacagcaggctcaaaggcccgggcagcgcctccgtatcatggtctgcatccgtactatggtctgcatccggattatggtctgcatccgccatcagcttaaggagcttcaggaaatgggcagccgctcccccggaaggctttctcctgaaaagcaccagtatcctgtcccggtgtctttcctcatattccttcagcaattccccggagccgtccgcggaacagtcatccgacaccaggatatggatgtccttctcatcctgtgccagtatggaatccagctgctgctttatatatctgcttccgttatatgaagccaccagtaccgtaatcattttgaacgtttcttccttccattcatccatggcagccgtgtctcaatcagccgcaccacgcccggctccaccgccagcaccagggcaagaagcaggatatcccagggcgtactgcctaaaactcccggatacatcattctgcctgccgtcaccttaaaaaatgcaatgacaggaaccagatgggtacacatgacggtcagggaatgtgttccgtaatatgtaaagaagggcacaagaacccggctgaaaaccggccattccttccagctgccgccgcaggcggacacccgctccccaaacatcaggatggtgactgaggaaaaccaggctgtcagaatccaggacaccggattttccatagtcaggaaattaaagtcgcaccccggaatcaaaaccgtaagggcgatgccggaacacatgagcagaaacgcagccgccaaaccggcccggccctttaagtacatggacgccttctgccacgcatcacaggcaaacactccccccagggccagcaggaagcctgccaggcccttgatatacaccatgatcggcagatgtatgacgcgccacaacgtggtgtcctgcctggaaccattgatatagaggatgaggaacacactggccgctccggccagacaggccccaattcccattttcctgcggctgccgtatatcatattcagcagcagctccgctatgaagatgctgggcagaaaccacagtgtctctaaccccaccagtgtgcctgtataatagatgtcggacatgagtaccaggaaggtatactgctgaggccacaccaggaatatccgcgagaaaataaacagcacgctgtagcacacatatggaattcccagggatataagtctttttcctgccatctcccggctggatatgcctgtccttcccttcccgtaacggagcgcataccgccaccctgtatagacataaaaaacagccagcataaagaagccgtaccagtcagagagaatgccaaggctggtctccaccagacaatggctggctaccactcccagcattcccatgccctttgccacatccagatagacctggcggtcctgtgtcttagtcatctgccgtatatccttcctgtcctttatcctgtcttatccgaaaatctcctctgccttgttcatggctgactcgattaccttgtccatatcgtagtacttatattctcccagacggccgccaaacaatacatgggattcggcccctgccagttcctcatacttctggtacagctcctggttcttctggtcattcaccggatagtagggttccatgccctcctgccagctcaccggatactccctggtaatcactgtctttggctgtgtgccgaactcaaaatgcttgtgctcaattaccctggtatagggcgtctcccggtccgtataattcaccaccgccactccctggtggttctcctggtccagcacctgggactcaaagcgcaggctgcggtactccagcttgccgaaccggcagccgtagaaagcgtcaatggtgcccgtgtataccacggtctcccccaggctgttatagtgttccctgtgttccaggtaatccactgaagtctctatatcacagccctcaaacagcttctccactatggcattatatccccctatgggaatcccctgataggggtcattgaaataattgttgtcatagatataccgcacaggtatgcgtttgatgataaaggccggaagctccctgcaatccctgccccactgcttttccgtatacccttttattaatttttcgtacaattcccttcccaccagacggatggcttgttcctccaggttctttggctcacctgtaatctccgccctctgcttctcgatgatggccttggcctcatccggtgtggatatgccccacatgcggctgaaggtattcatattaaagggcatgttgtacatctggcccttataattagccaccgggctgttggtgtagcggttgaactccgccagggaattcacgaattcccacaccttcctgttgcccgtatggaagatatgggcgccgtacttgtgcacatgaatgccctccacgtcctcgcagtacacgtttccgcctatgtggttcctcttctccaccaccagacagcgctttttgttctttctggcgtaccaggcaaacacacctgcatacagaccgcttcccaccaatatataatcgtattttttcatatccggatatgctcctttgcttatcgctctctttgctttcacaattgtactatgtttcaccggaaatgtaaatggattatgtcccctgccgtccccgtaaagcccgggacagacaggggagcgtggatggcataaacgcacataaaaacacgagactgaagacaatggcatccctctatcctagattctttcgtaccatgcccggcagcactcctccggcgccggcgctgtgtccagccccagaagttccagcatgacactgtccgcatgcatgacaggctccctgtcctggcggagtatgatttcccacagtcccgtgcgggggctgcgcagaatgtctgtctttcctttatccgtaaagtaatcctgcatagaggcctttcctttcccaggccagaattttcttccgccctcagcgcgtcctatttcgccgctttgcctctattatacacaaatatacacaaaatcaccctgccgtaacaagtaaataacaaaaccctgcctctgcaataacacacctcagcctctgtctcttatctcacctcgtcttcatgtataccctgcattcataaggcttcagccgttccagtgcctgtccgcactcctccccggtgtagttgccaatcagcagcctgcagccgtcaagctccagtctttctcccaaatcagcctcagaagccttcatgttggccaaaaccacaagctcctgcccccggtatgtgcgcctgtacgccagcacctgaggatgttccctgtatatgaattcaatctccccttctgatatgactttatattctttcctcagggcaatcagccttttgtaataattcaatatagagccggaatcacctgcctctgcctgcgcgttgatataagaatggttctccggtatgtcaatccacggctccccctgtgtaaatccggcgtaccggctgccgtcccactgcataggcgtacggccgttatccctggaacgggcggccagcacctttaaggcttcctccccggtgattccctgctctgtcaggatacggtaatagttaatgctttcaacgtcccggtaccgggaaatatcatcgtaataaggattggtcatgcccagctcctccccctggtacacataaggcgtcccgcggaacatatggatgaccgttgccagcattttagcggattccttccagtattgtccgtcatccccaaaccgcgatatggctctgggctggtcgtggttgcaccagaacacggcattccagccattctcccgctccatcccctcctgccactccatgaacagctgtttaagccggagcaagtcaggctccatcagtttccacttatccccgtccctgtaatccaccttcaggtgatggaagttaaagcacatggacaactcgcggtcttccggcctgctgtagcggatacagttatccagggtggtggaggacatttctcccacggtcaccatgtcctctatgcccgtatcccgcaccaactcccggagatactcatgtacccttggcccgtcggtataaaagcggcgcccatcccctttgtcatcatccacaaatacatccggtttggatatcaggttcaccacgtcgaaccggaatcccttcacgccctttgccttccagaaccggatgacctccttaagctccccgcgcaccctgggattatcccagtttaaatcggcctggcttacatcgaacaggtgaaggtaccattttttcaggtggggtacatactcccaggcatttcccccgaatttggactgccagttggtggggggcgcgtccgggctcccttccctgaagatataataatccatatactccggattgccctcaagcgccttcttaaaccagcggtgttccgtggatgtatggttaaataccatatcaaacatgcatcccattcccctcacatccgcttcccgaatcagttcctccacatcctccatggtgccgaatacagggtcgacagcccgatagtcagccacatcgtacccgttatcattgagaggggagcaaaaaaatggtgtcagccaaatatagtcaatccccagttcctttaagtagtccagcctgcttatgactccgcgtatgtcgcccagaccgtttcccgttgtatcctgaaaggacttggtataaatctggtaaatcgtactgtccttaaaatgccccataaatgattcctccttcatctccgcgccgttatatgactccatctatcctggccaccgcatctgccgaagccctgactctttgtccggtctgccagcttatatctcctgaatttccgggattggtaagaaccatgatgaccatgtcactgtgtcctgccccggcaatcttatcccggtcaaatgcgataagtttctcaccggccctgactctcctgcctgccgtcctggctgccgcctatccctttcttccttccgagggcataggtcaggcagaagggaatcaggattgccagtcccatggctgctgcgaagggtcccatgtactggggctggatggacaggatgcccggtatgcctcccacaccgatggcattggccttgattccgcttacaacagacaaaactgcgcccaccgccgatccggtcattccgcagataaatggaaagccgtatttcaggttcacaccgaacatggctggttctgttacacccaggcagcaggagatgcaggcgggtacggatacttcctttgccttggcgtcattcttctggagaagaatcatggccagtacagcggatccctgggcgatattggacagggcaatcatgggccacagggtggtgcctccaaaatcagctatcagctgaaggtcaatggcattgctcatatgatgaagtcccgtgattacaagtggcgcgtagaagaatccaaagataccggcaaacactcccttaaagggggatgtcaggcctgcgttcacacagtctgaaatcacggcgccaatcttccagccaatgggtcccaggataccgtgagccactgccactgatatcagcagggaacagaagggaaccacaatcatggaaatcatggcaggacatatttttctgaagaaccgctccagatacaccagggtaaagccggccagcattctctggagaagggtctggttctgcatggcagccttcttcaccgcgtccttggagaccccctctatgcctgccacctccgcaaagtcattgtaaaaggtgctcacctcattgccgattatgacctggaactgccctgcctgggtgaatgtgcccttggcgcaagccaggctttcgatggcctgtgtatccgccttggacggatcatttaacacaaagcgcatcctggttacacagtgggatacggccgcaatattctccctgccccccacatactccaacagtttcttcgaatcccctgtaaactttcccacgttcaatacctcctgtcaatctgaccgcgaaacctcatcttgtttaaacaagtatcttaatctgaattatatcttgtttaaacaagtttgtcaatattgatttttattttttccggtgtttttcacatttcgcatccaaaaagcaccggacgaacatctgcctgaagctttctgttctccggtgccttgatttacctattttgtccgatgggccagatcgtaaaatacgaaccggtccggtctgtgcctggactgggtgaactcaaacatgactccctccttattataggtcatgctgctcaccactgccatacagttataatcctttaaatccagatacttttcatcaatctggttaactcgctccacggtcatctttctcttggtggtcacaatgctttcgcccaggtcattttccatatattcataaatggaacgctccgcaatctccggcgtcaggtcccgcaccacatcctttaggaaatagttatggtcaatgattaaggcttccccctcaatgcagcgcacacgctgtatataataaatctgggcccccacagggaatgtggtccgcctgcgtatggtctcatccacggtcagctccgcgaagcagaccaccttggtggtataatttttcctgtttctggccactgcctccttcaggctctctatgcctcccagtatgaactccgactgctgctgtccgggctggtaaatgattctcactcccttgccgtggatgctctgcacatatccttccgacgccagctgcccgatggcccggcggatggtattccttgaacagccgaactccttcaccagggtattttccgagggcagcagctcctgaaaagcgtatgtcccatcctccatcttttccctgagcgccgtataaatctcattatattttgtcttagccatataaacctcatacatctctttattttaatacgtttacagcacaagtccccgcgcaaaccagaacggttttgtccgttccagacccgggcgccccggaattatccgagaggaattcctatgacacacagccgtatgagaaacagcgccattaaatgcagcgggtaaaaccaatagaatgcgtacttccatcgggcctgtccttttctcccgttgtaaaaaagcaggggcaccgccgaaagaacccccgtcccatgatacttgtcccaggaccccagaaaagacaggaggctgccggacatcacctggacagggcgtttatccctcaggagataaaacaatgaaataataagaatcccgtccatatcgtaatccgccttcaaaaagacagccgccaggcatccgcccccaatggcggcggccatcccaatgacacggtacggctccgttaaaccctggctctgtttcaggccccggagcaccagcagtccgattgccagctcaacgtacacattgcagcctccacctgcccacgtattccacacagccaggcggaagggaatttccgagataagtgcaaacgcagccatcctgagccagtatctgcgccagtccctggtgtgaaggaatccctccaccagcaaaaagcagtagattggaaatgcaatccgtcccgcggacctgagcacctggcacagccaatagagcctgtccccccattgggatgtcatgatcatggcgacccgttccaggctgcctctgtagtacacaatccgttccaacagcacaactcctatgtggtccgcaagcatggcggtcatggcaatatatttcagggcggtaccgcttaatcctccctgtgtttccggtttctttctgctggacggcatgcctcaattccttccttacatctaatctatgtatttatcttatcaccgggtcattggtttgcaaagtgttttcttaatacattctttatgaagtcaccagctttttccccttgtatttatttccacatgatatataatgctgtataagacttctgttaaaaagatgttaagaatcggaggaatctatgaagaaaaagacacaatttttattgaacctggcgctaaccgccatcttcttcattttgattattttccaggggcccaatctaaaccccctgtatccggatggggcattttcctggtgcttcatcatcagctgctatgtggtgcttaactttttcgtggccctgggcagcgtacgggtaggcgccaacgaatacggccgcccgcagatcagcattgacaaaagtgtaaagggatataaaaggggattcatccttctggccatcctttgggtgctgtatttcggcgtttccatcctgtccatgccccttttcaattacaaggcgtacagggaccagttaggcgtcccggcggtgtcagaattcacggataccgtacagcccctggctctggaccagcttcccatcgtggacaagagtctggcaagagagctggcagataagaaagtaggagaaaatcccggtctgggaagccaggttatcctgggtgcccccgttatccagaaggtaaacggcaagctggtatgggtggtccccctggagcactccggtttcttcaaatggcttaaaaatatggacggctccgccggttatatcgtggtgtcagccagtgatgtcagcgacgtaaccctggtaacagaccataaaatcaaataccaggccaatgcttacctgttagacgacttaaaccgccatgtgcgcttctttggcggcggactctttaaaggtcttacggattattcctttgagctggatgatgacggcgttccttactgggttattacctcctatcaaaaccgctggctctttaacctgcctgaggcagacggagtactgacggtcaatgccaccaccggagagaccgcccattataccatcgccacactgccggattgggtagaccgcgtgcagcctgagaatttcgtgatgcagcagattcagaaccagggcgtatatgtgcacggtattttcaacttctccaaccaggacaaattccgccccagccagggtgatatcattatctataacggtacccgctgctacctgttcacaggccttaccagcgtgggctccgatgaatcagccatcggcttcatactggtggacatggtgaccaaggaatccaatatctaccagatgagcggcgcaaccgagatggcggcccagagctctgcggaaggaaaggttcagcagtttggctacagggcatccttcccaatgattatcaatctggacggacagcccgcctacttcatgaccttaaaggataacgcgggcctgattaaacagtacgcctttgtgtccgtctccaactataccaatgtgggaaccggcgagaccattgacagcgccctgcgcaatttccgccaggtccgcggaaacgccggtgtgaatatcaccacaggccagaccctttccaaggaggagggcactgtcctgcgcattgccagcgagaccatagacaataccgtaacctataagctgattctggaggaaaaacaggaccatatcttcaccgtgtcctatgatctgagcaacgagctggccctgacccagccgggagacaaggttgccctggagtatatggatgatccgtccggaatctgctccgcgtcttcctttgacaacctgggatttgaccagtccggccagtgatatggcgcttggcgtcatgatgtctccggtgtcatgatgtctccggcgtcatggcgaccggcactatggctccgtccagaatctccttctgattcgccccgacacctgttctatggccagcacagaggccgccagtcccagaagcagagcgcctgccggtttcggaggcattctggtttcatgcgaagaatctaaagcatcaagaaatcggcgcacctcacaaaaggaccggccccaaaaggccggtccttcaatctttcatcacttcaataacaccacatcaaatataacacccagaatatcaactgcctattaatagaacagcctgttcaccgcactgaatataccgcggatggaagcccttgtgatattggagctgatacccacgccgtaagtggccctgcccgtcacctggtctaccagatggatgtaggaagcagcctctgcgccggatccggatgccaatgcgtgctcgctgtagtccagaaccttaatctggatgccaagggcatcctccatgcctctctgtacagcatcaataggtccgtttccaacgccttcaaaggtcttctcaatgccatgatcggagtaggttaccttagccagtgtcgcaaactcgccgtctcctgtctccgtatcggttatgcggcactttctaaagtgcatgggttccttgcgctccaggtaattcttcttaaattcatccatgatctgctcaggcgcgacctcaccctgctgctcggaaatcttctggatgacatccgcgaattccttgtgcatgccctttggcagcttgaagccgtagaaggtgtccatgacaaaggctacgccgcccttgccggactggctgttgatacgcacgatgggctcgtactccctgccgatatcgctgggatcgatgggaaggtatggaacctcccagtactgtccgttcctctcgtgaagggcctgcatgcccttgttgatggcatcctgatgggaaccggaaaatgcggtgaacaccagcttgcctgcatagggatgtctgggcggaatatccatcttggtgcagcgctcacagacctctgcaatctcacggatattctcaatgttaagttcagggttgataccctgtgaaaacatattatatgcaactgtcagtatgtccacattaccggtgcgctccccgttgccgaaaagggtaccctccaccctgtcagctcctgcaagaagggccagttctgtggaagccacaccctcacccctgtcattgtggggatggatactcaggataatgctttccctgtccttaaagtgtgtattcatccattcaatctggtccgcatacacattgggggtagtcatctccaccgtggacgggagattgatgataatgggcttctccttggtggcgccccaggtctcctgtaccgctgtacagatatcaagggcaaaatccagctctgtgccggtaaagctctcaggggaatactccagacgaatctgggtatcacagtcagccatataccgctgtaccatcttggtgcctatgacagctatatcctttatgtcctccctgtccttatggaacaccacatccctctgtaaggcggacgtggaattgtagatatgtacaatggccttcttaacgccttcaagggcctcaaaggtcctcttaatcagatgctcgcggcactgcaccagcacctgaacctccacgtcgtccgggatgagcttgcgctccaccagggtgcgtaagaaatcatactcaatctgggatgcggcaggaaaacccacctcaatctccttaaagcccagcttcacaagaaggttgaacatctccaccttctcctccaccaccattggctccacaagggcctggttgccgtccctaaggtccacgctgcaccatataggagccttcataatctccttattcggccatgtgcgctccggaaaatccaccacagggacccttttatatctttgataatttaacataattcattcctccattctgttcatctgatttcaggcgcctggaaacgcctggttccgtccatattccattctcacttcatacggtgtcctgtccttttatcactgcgctttaatcttcatttctgccgtcagcccattccgggcagtcgctcaatgacaccgtaatgacggatgatgaacagcacgactcttactggttcagccccatttcacatcattcctttactctgaaaatcgctggctgtaaggacacaccccccggtcagggctgtgcggtaaatacagaaatcccggagcacggcgctccgggatttctgttgtcctcttcgcaacgttatctaattatagcacatttcaaaataactgacaataaggagtcgccggttgactattctcaatagttatggcttttattcctctgtttcataaaatgtactccaaggctcccgttttcatttccggggaatcttccgctaatccttacatccccgcttaaatacaatgtccccggtccttcataacctggataacctggtccacatatgtttcgcaggtctggatatcaggcgcctccaccatgacgcggaccaccggttcggttcctgactgccggagcaggattcttccgtcgctgcccaggctccgggtcaccctggcaacctcggcctgcactgcctcgtcgtcctgggccgtctttttatcctttacccgcacattcttaagtacctgaggataaatctccacctccgaggccagcttatcaagtggctgctttttctccagcaccacttccatcacctttaaggaggtgaggatgccgtctcccgtggtggcatgtttgctgaatatgatatgaccggactgctctccgcccagacagtggcctgtggcagccatgttctcatacacatatttatctcccacagctgttttcacataggcaatgccttcccggtcaaatgccttatataatccgaaattggacatgatggtggtaaccaccgtattattgaacaggcttccctgctccttcatgtatttgccgcagatgtacatgatgctgtcgccatccaccacacagccgttcttatcaaccgcgatgcaccggtccgcatcaccgtcgtaggcaaacccgatgtcgcatttctcatctaccacaaacttctggagatgttcaatatgggtggagccgcagttcgtattgatgttcagtccgttgggctcgttgttcatcacatgtgtctccgctcccagggcgtcaaatacgtttttggcaatggcggacgcgcttccgttggaacagtccagggccaccttcatattcttgaaggaacgggtggctatggatataaggtatccgatatagcggttccgtccagccgcaaagtccacggtccggccaatatgctccctctttgccagcggaatctctgccgcctccccatccaggtacttctctatctccaggatgacggactcttctaacttttcgcctctctcgttgatgaccttgatgccgttgtcataaaatgggttgtggctggcagatatcatgattccgcagttaaagccctcggtgcgcaccacataggatacgctgggggtggtggtaacatggagcagatatacatccgcgcctgaggctgtcagcccggccaccagggaatattcaaacatatagctgctgcgtctggtatcctttccgataaccaccctgcagcgctcatccggcatcttttgtccgtagcaccagcccaggaaacggcctaccttgtaggcgtgctccactgtcaggtccacattggcctcgccgcggaagccgtctgtcccaaaatattttcccattgttattaattcctccctgtcttgttatttaggcccgcattccatctctgtccgccctcttggtccatggcggttcaggatgacgcagcagtcacgccgctgctaaatggtctgctgtcaatccaaactgtccccgttacatgcccctgccgcagccgggcccccgtcttatgccatcccgttttccttaagaaccttcaggtaacgtcccagggcatcctgccatgaaggcagacgctcaaaaccgttctcagtcagcttttccttactcatacggctgttggagggccgctttgccttggcagggaaaccgtcagaatccaccggagtcaccttcacctcgtccatgccggcctggcggaatatctcgcatgcaaactcataccagctgcacagcccttcgttggtggcatggtaacgcccgtacttgtctgtctgaatcatatccaccaaaaggcgggccaggtcgtacgtatatgtgggggaaccaatctggtcatttaccacggatacagcccccttctccttccccagacggagcatggtcttaatgaagttcctgccgttgacgccaaatacccaggcgatgcgcacaataaaatacttctgtatattctgctccaccgcaatctcgccctcatactttgtcagcccgtatacattaaggggttccctgtggtcatccggctcccatggccgctggccgccgccattaaacacatagtccgtgctgatgtacatcatcttgatatccatggccttgcagaccctggcgatattgcgcgtcccctcagcattgattttgcggcacagttccaggttatcttcagcagcatctactgcagtatatgccgcacagtggataactgcgtctggtttttcctgggaaatcacagtttcgcacgctgtgcggtccgtgatatccatttcctccacgtccacaccgattccctcaatcccgcgaagggccagttcattcatcacgtcatggcccagctggccttttacacctgttaccagaactttcataatccatttacctccgttcttaataatggccggcagaggacgggaacccccgaaacggacacgtctcacaaacgtactccggggcatttccctcctccgccagccacatgtttacctacaggcggctgccgtacatcttatcgaaataattactgtactcgccgctcagaatattcttccaccagtcctggttgtccaggtaccaccggatggtctgctcgattcctgtatcaaaattatacgttggcttccatcccagctctgtttctatcttggccgggtcaatggcgtagcgcatgtcatggccgggacggtctgtcacaaacttaatcaggctctcaggcttatcaagggccttcagaatggtctttaccacttccaggttggtgcgctcattatgccctccgatgttatacacctctccctcgcgtcccttgtggataaccaggtcaatagcctggcagtgatccgccacatggagccagtcgcgcacattctctcccgtgccgtacacaggaagctcctcatctgccagggcgcggctgataataaggggaatcagcttctccgggaaatgataggggccgtagttattggaacacctggacacagtcaccggcaggccgtatgtcctgtgatatgccagcacgaacagatcagcgcttgccttggaagatgaataagggctggatgtgtgcaggggcgtttcctctgtaaagaaaaggtccggtctgtcaagaggcaggtcgccgtacacctcatcggtggaaacctgatgatagcgcttgatgccataggtacgacaggcgtcaaggagggttgtggttcccatgacattggtcctcacaaaggcctccgggtctgtaatggaacggtccacatggctctcggcggcaaagtttaccaccacatccggcttttccttctcaaacagctcaaatataaacttcctgtcggcaatgtcgccctttacaaatttataattgggcttgtcctcaacaggctttaagttttccaggttgcccgcataggtcagcaggtccaggttgatgatttcataatccgggtatttatttaccatatggtgtacaaagttgcttccgataaatccggctccgccggttacaataattttcatgtatattttcctccgttaaaaatcctgtgggtgtatcttatccacatactttccgtccagaacgtcctttaaatacttgccgtactggttctttttaagaatctcataggtctccataacctgttccctggtaatccagcccctgagataggcaatttcctccaggcacgctatcttgcggtgctggtgtgtctccacggtcttaacaaaattcgtggcctccaccagcgactcatgggttcctgtatccagccatgtaaatccctgtcccaggagaatcacgtccagctcgcccttctccaggtaaatgcggtttaaatccgtgatttccagctcgcctctggctgagggctttaagtttttcgcgtactccaccacccggttatcatagaaataaagaccggtgacacagtagttggactttggcttctccggcttctcctcaatggaaatggccttgccgtccccgtcaaactccactatgccgaagcgctccggatcatccacatagtaaccgaacaccgtggcgcccttttccttggacgccgcggtgcgcaggcgcttggtcagcccctgtccgtggaaaatattatcacccagaaccattgccacagaatccccgccaataaattcctcaccgatgataaaagcctgggccagcccgtccgggcttggctgtaccgcatagctcagctcaatgccaaactggtggccgtcgcccaaaagagcctcaaatcttggcgtatcatccggagtggagataatcaggatgtccctgattcccgcattcataaggacagacagcggataatatatcattggtttgtcgtaaatcggaagcagctgtttggaagttaccttggttaacggatagagccgcgtcccgcttcctccggccagtataatccctttcatatttcctcctcggtccgctgtaagcgtgaatagaccgcttagcggacgtctttacctgattttttctttgtccaatatatcatattatctctattttttcaaataaactgataaatatttcgttattattaagaagatggcaatatcatgattactgaataatttccactccgttacccacgtcacccatttcgcccacagggttgtcacggatgtccagatactccaggaattccgcctgcttcagagggcccaggtccgttatatagtagtccttaaggccgagtcttttaaggttctttaaccccgcggcaaaattcaggtctgccagctcgttgccgtccaggtacaactcctccagattggaaaagcgggacaggatattcatatgttaccccagcttcacgtcatcataccacacactggtcattccgccgtaggattctacataataattcttatgaagctccatatttctgagtcccagcacccgcaggctgggattttcctttgaggaagtccaggtttctcagatttccctgtgaattccatacagagtaaaatgtaagccgctccacaccggtcagagatgagagggcatccgccccgtccacattacagctgtgtatggaaagctccttcagtcccctaagccccctgacagagaaaatggccataaaacccttgatttccagcttttccaggccggtgaggggcgacaggtccgggtctggctgggacgtcatcttgtcaattcttaatgacgtcagccattgcagtgttgccgcagttacctaaggcttatctgtccgggttccggcatcaggagcagcaagagagggacagccctctcaccgggtgctgtccctctctctttaattcccttagttttctctatttatcttctatccccgcctgccgttaaccgccttcataaaccgcccggcaatctccagcggccgggtgatggccccgcccacgatgactgcccaagcgcccatatccagcattttcacagcctcatccggcgtgtgcacacggccttccccgataaccgggataggaagttctgacgcaaggcgcctgaccagttcaaaatccggtccctccagcttgggggtgtagtccgtgtatccgctcatggtggtgctcaccaggtcaatgccgcttttccatgccttaagaccctcctggtaatcggagatatcggccatcagaatctgatccggatatttttttttgatgctctgtatgtattcccacgggctcaggccgtctccccgcctcctgtccgtacagtcaatggcaatgatgtcggcccctgcctctgccaaggcatccacctcccccatggtaggcgtaatataaccgtcaaagccctcatacacctgctttatcagaccgatgacgggaagccctgtctccctcttgattcccagcacatcccgcaccgtgttggcacgtatcataggacttccggcctccctggccgccctggccatataaggcatcagggatcgctccggatcataaagaggttccccgggcagggcctggcaggaaatgatgagctttcctttgatacggttaaaaagttctgtcttgtccatttcgttccaatcctttcactccggctatcacggcctttcatcggccacagccaccttcaccacacattttttgatagattcaggctcttccagacatccgcccggcccatgagcctccccggccatgcacaggatgaacctgccgggtcccataacgcagcgtccccctgccccgcccctggctgccgccttctgaaagtccggttggtattctccgatgggagtcacaccgtcaagggctgtctctatgacctcgcacccctcaatgtctatctggatgtccatataatctctgtgcacttcatagctctcatccgtcagctggcgggtcctggcttccatcacctgcaggaataccctgtccccgtcaatcaccgtctttcccaggggaagggtgtttatatccgatgccatcagataatcaatggccttatcaagattcctgttcatgcccctgtaatttcctatattagtcagcaagtcgtatatcatatcagcagtatctctcctttgcgtcttctatcatggcggctgcctccccggcaatggcccggtcgctgccgcataagtctgtcagcggtttcctgactccgcctatatcaattcccctgctgatgcgcagcacttcctttatcatggcgtacatattgcatgttcccgaacagagcttatatatgatttcatccgcttcatactggatggccctggcctctgctatcctgttttccgacaccagctcatatatctttaaaaacagctccggcatggctccgtaggtaccgccgattcccccgtccgcccccatggccagaccggacaccagctgttcatccggaccgttgaacacgatgaagtcctgccgtgtcttcatggcctccgccttaaacatctggatgtcctgtaccggcatggatgagttcttcacgcctgccacctgcctgtttaaaagcattgtctttaaaagattcatggtcagggccgtaccggccagctgtggtatgttatagataatgaaatccgtctcaggcgctgcctccgatatatcattccagtacccggcaacagaatattcaggcagcttgaaataaatgggcggtatggccgcaatcccgtccacacccaagtcctgggcatgggctgccagaatgcggctgtctcttgtattgttgcaggcaacatgggcaataactgtgagacagcccgcggcctcgtccatcacagcctccagcgtcttcttcctgtcctccacagactggtagatacattctcccgaagatccgcccacatagacgcccttcaccccctggtccacgaagtacctggtcagcgcccgcaccccgtcctcacttacctctcctgccttgtcgtagcaggcgtaaaatgccgggataattcccctgtatttgtcaagcttcattcttatttcacccccgttatctcagacagcttcacctttctgttctcaaaccgggacttggtgcaggcgtctgccgtggcaatggcgttcctggcagcctcccctgtaagcagggccttaaactcctcgtccggctgggccccatgcatgatatggttgaaatactccatctcatcatacatgatgctgtgaagccacataggcggcttcttccccggtttgccgtacatgatggctccgtccatctccgtgccgtgatagattctggtgcggtcgtcgtcctcctcctgcgtcttgtgcatgaggaaatgctcctccttatcccccttcttaagggttccgccgcagttaaacatatccaggcggatggcgccctctgttccctgaatcagcacataatgttccggccagtggaaagcggagccgtactccagaacagcgtaccggttatcaccgtattccatggtgataaacagcatatcgtcctcatccccgaactgttccccgcagtgggccacattgccgcctgccatggtcacttcatcagggcagccgcccataaggaactggatacagtccagctcatggatgtgatggtagagatggcctcctgatttggcccttattttcttccagctgacagagggctgaatatcctcccaaccgttcctggcagagtggcagtacagcaccttgccgatgactccctcattaatcatctttttggctgtgcgcacacccctgaaaaagttcatcacatggcctgccataaaggtgacgttgtgggcaacgcatgcctccaccatctccacgcagtcctgataggacagggcaatgggcttttcacagaatacgtgcaccccatgctccgccgccttgatgaccggttccttgtgaaggtaattgggcgatgccactatcaccgcgtccacgtcctcacggctgtataaccgatccagatccgtctccacgtcacagcccagctcagccgccactgtccccgcattctccgggtcatagacagccactaccctggcgccctcctgctccttcatgatgcgggccagctccgccccaaaatatcccgttccaaccactgcatatccaattgtcttcatgactgttctcctttaccgtccatattatttcagttcataatttcgctgagctttaccttcctgtcttccctgagggacagggtgcaggcgtctgccgtagctatggaattcctggcagcctcaccagtgagcaggggaaggaactcgtccgtcacccgggcgccgtgaagcacattgttcagaaactccatctcctcatccataatgcccctgagccacaggaagggctttcttcccggccttccaaactggttgccgttgtcccgctccgtctccctgtaaatccgggttctgtcatcgtcctcttcctttgtgcggtgcaccaggaaatgttcctccttttgcccggtcttaagggtcatgccgcagttgcacatatcaattttaatggctcccatggtaccctgtatcaacagatagtgctcctgccagcggaaagcggaaccatattccagaaccgcatagcggctgcccggatactccatggttatgaacagcatgtcgtcctcatccccgaaccggtcgtccctgtgggcaacattgccgcctgccatggtcactgtttcaggacagcctcccataagaaactgaacgcagtccagctcatggatgtggtggtacaggtgtcctcctgatttggatcgtgtctttttccaggtttcggatgccccggttccctcccacgcattgcgggccccgtggcagtagagaatatccccgataacgccctgtcctatgagttccttggcctttctcacgcccctgaaaaagttcatcacatgaccggccatgaacaccacatggttttcctgacacgcatccaccatctcccggcagtcctcaaagcttaatgcaatgggcttttcacagaacacatgaagtccatgccccgcggcggccagcacgggctccttgtgcagatagttgggagtggctacaatcacggcctgtatatccttcctggataccagcgattccaggctgtcctctgcatcgcatcccagctccgccgccacggtgcctccattttcagggtcatagacggcccgtatctgcgccccctgttttgtattcatgatacgtgccagctccgccccgaaatagccggagcctatcacgccgtatccaatgattcctgttaaagcttccataaaatataacaccttttacctttctgttaaattcattaggatttcacagcgccatccgacatgccgcccgcaatcttattctgtatgagacagaagaaaatcacagagggaagcaccaccagagcagatgctgccatcatgtcgccccagtccagtatctcagctccgtccagggagcgcagggcaaccgcaaccgtcatcttgctggtattattcatcaaaatcaacgcatacagaaactcattccaggtattgatgaaggtgtagatggccgtggccaccacgccgggcgccaccagcggaagcaccacccggacaaaggtctgcatcttattggccccgtcgattctggccgcctcctcgatttccaggggtacggtcctgaaaaatccggtcaggagccacaccgcatatggcacggagaaggacaggtacacgataaccaggccaatccttgtgttaataagctccagctttcccataaccacggagtagggaatggccagaaggatgggcggaaatatgtaagtggtcaccagcaccttggacatggccgatcccagccgcgtaaagaacctgacgattccataggccgccagcgcagccaccgtaatggcaatcagggtggtcaccagagaaatgatgacactgtttttgatgttcacgaaaaacttaaggtcattgataacatgggcataatagtcaaaagtccatgtcttaggccagaaggccgtgggattacctgtcagttccccctttcccttcagggaggatatgataatccataccagcgggaaaatggagataaaggtcagaataatcaggtatatatggctgataatatttcctgctttaaactttttcatttactgtcctccttttcccacttattgatgaccgcaaagtagatgccgcatataatcatcaggaatataaacagcagcacggttactgccgatgatcgtccgataagcttggtgctccatcccatattgtaggcatagagcggtatggtctgggtggtgcccgccggcccgccgcctgtaatcaggtaaatcaggtcaaagttgttaaaaatccacactgtccttaaaaccaccagcagtcccaccaccatcttgatatggggcactgtgacatagtagaacgactgccacggcctggccccgtcaatctgggcagcctcgtactggtccctgggaaccgtttccagagccgagagcacatttaccataatcatgggcgctccgaaccatatattaatcagcaccaggcttacaaaggccagcgtaccgctggtcaaaaactgcggcgccgcctcacagatacccagcttcaccaggatgtttggcaggaagccgtatactccgttgagaatccacttccaggaaaatgcgatgacaatggatggaaatgcccaggggatgatgagaagggtcttataaacgcccttgcacaccttaatccgcttcagggccagggcagcggtaaatcccacccctatctgtcccatcagggacaggaccgtccatttcagagagttgaaaaatgaaagccagaaaccgctgtcctttaacacctcggcataattcttaaagccaatgaatttataggccggcttaatcaggttcttgtttgtaaagctgtatactatgctggaacagatgggatatatgaacaatgcaattacaatgacgattgcaggaagcacaaacaaccaccttgtataacttttcttccccaagatttcctcctccttctcagtattagagcgtgtctcaaaatgcatccgccttttcagacacgctccgggacggcttattcagctgtctcaaacagtgcgttcagtttatcttccgctgtttttgcagcagtctttacatctgtcccgttggtaatgatatcctggaacatatcctcaatcacatggttgttctgcatgattccggcctggacattaggaccgtgctcataaccgaaggctgtaccgatatcggctgccgcggtcagcacttcctctgcatgtgtaaactgcctgatggtatcgtcatccctgtaggcgtccgtgtcagcaattcccttgatggcgggaagcatgcccaccggagttgcgtgcaggaattcaacatatgtatcctcgtcataaagggttttcataaatgccttgcagatttcgggatgcttggaagccttccacacgaccataggcgtgttggtggtcatgattccctcgtccgggtcgtccgcgtggatctttggaatcgggtagcagtccacatactggagcaggtccggtgagttggctgcaacgcctgaaatctggaagccggagttaaaatcaaatgcggttttgccctggtaatacagggttgcctggtccagtacatcaaagttaatggaatccttaggcgagcagtcattgtacaccttcaaccagtaattgatgccgtcaatggccagatcgcttgtcaggttggctttcaggtcatcggtcagcaggctgccgccgccgcttctcacatagaaatccaggaaaaaggttgcctggaagtcattggttccgcatgggaaagacaatccgtagacgccgtcctttgtaagtgccttggctgtgtcgtaaagctcatcccaggtcttggggacttccagaccgtttttctccagcaggtccttcctgatccacatcacatgggcgtgtctgtaaagaggaacagaatagttattgccgtccaccgtaccctcggaaatggctgcctcagcaaatttgtcacggccgataccgtcaatcaggtcattgatgggcagcagggcgtctgcgttaatcatctccgcaacctgggccggaagggcggtactcatatcaggtacattgccggatgcaagtccggtggtccacttggtgtaaaagtcattccatgagaacgtctcaatattgattttcacatccgggttctcttccatgaatttgtccgccgccttctggatggtctccagtcttggcccctgggtaaaggaatgccagaaggtaatttcacccgaaagcgctcccttagtcccgctgtcagttccatcctggcttcccgcctcctgtacccgtgtctgtcctcccgctttcccggaaccggaagcatcggcggacgacccggaactgccgcatccggccaacagggctgctgcaagtgctgccgcaataataaaacttacatgactctttttcataccatttctcctttttctgaattatttgcgtccgtcattttgctgtttctataggtattatattgattttctttatgcatttcaacattctggacaacttataatagcataaaacaaccattatactatttttttgtcttgttttgattttaagaggtgcgggtaactgtcggggtaaggggatgagcactgtccgggtgattgcacgggggggtctgcgtatctctggaaaacagaaaaaggacagggtcggaacctgattccggatacccgtccttttttcttatccttgtttcttatctccgccccctgtcccggcttcctgattctgagtgtactgcgtttccggcacaatccattcttttttaatctgccacaaggcagcctggacgcttttcgccccggatttctcccctgcccgtatctgttcatgatggcgaaacagcctgggccagctgtccatgattttctgcttcatctcaggataaaacccggtgagcacagcatccatttccctgaccccgcactgctttaaatatgcctgaaaagcccgatcgtccgcctcgtcttcccccagatatttcaggcacagaatcttattccagtcatacatatcaaaaaacacagcctcgtccctgggaacgcagagcgtcaatgtcctggttcctggcgactggtccaggctgtacaggttcatgaaggaccagtagggaaattccgccccctcaggcctgggaaccagcttcacggcctccttcacaaaccatttgtacacagtcaggaaaatgggaccgctttccccatatttcctgcggacatattcctcccgcgaaaaacagcggccgtccctctctatggcctttaaaaccgcatctgcctgcgccgcatataaaatcaccttatcacctgtgtcacccattcttttcttatctcccatatattcccatattttgaatcattgcccaaaattacgctgtcatcaaaaagccggtcccagctggcgataatttcccgcttaagatatggatagaaccgggacatgtatgccttggcgtcgcttactccgtactgctccatcatatcctgatggcgtctggcgtccgcctcatcctttgggatataggagtaattgaggatacttccccatttttctatattgacagaggtaatacaagccgggtccagggtcagttccagtatgacggcacccggactgggaagcatgaccgcctcgctggtaaaggaaacccacaccggatactccacatccccgggcttttgggccgcgtccgggctgtgccttaccagccagtcatatacctccagcaccagtcccgcatgttcctgcaggtcactccggatatactcccgcctggcaatgtatctgcctgtttcattcagctccttcagcacgttttcatgctgctttgtccataccttaatctgttccatccggtcatccttcctctctccattgatttggcgcccttgctttagtgccactgttttagtgccactgcccttgcacggttcctgctgcgccgtttcgccggtctcacggcccctgctttgcttcctcgtcaccgtctctcccccaccgctactcctgtgacatcttcctgtaccggcccggcgtcatcccaaatgcctgcctgaatacccgtgtaaaatggttggcatcctcgaatcccacatcgtgggcaatacagttcacaggatcattggacaccagcagcagtcttgctgccgtggtcaggcgtacctggcgtataaactcagtggcggtctttcctgtggcctccttaaacagacgccggaaggtggtctcagccacttccgccatgccgcttaatttatctgaagtatattcctctgtgggatttaacatgatatagtcaatgacagtctgtatccttgggtcggtctggaccgtggatttcttcacccgctttcgtatctgctccaggttatactccagcccgttaatatccgccttcacatcatcgggctcatcggagttcagaatatcaatcaggctggcaatcagagtatcaagagctcctcttacgtgaaatgacttcgactttttgtccgtgcgcacccacttgtagatatcactgaaataaggctcgattccctcacccacatccatcaccaggggaaagttatagtactccctgagaaaattggccccctcatagaacacggatgtggtgaaacggatactgtaaaaagcaaacgtatcctccagcgccttacatgacagccagcagccctccggtatataggacacctgccccttcctcacaatgaccgtctccccatctaccacaaactcagcgctcccgtcaatgatgtagcgcagcatattgtatggtatggcgctctccggataagtccaggtccgcccaaaggaatatttatctatatatagaaaattaaatcggatggtattcataaatgaggaaagcgactgcatgatgtgcaccccctttaactgtatctttttataacttccagcgcactgtccccttagggtttagtaatctgtgctgcacccggccctttatgatttgattgtatcaaatcacgcccccaatagccagacccataacaggaaattttatatggccggtatattcctggccgtttccctctcactgcccgattcccatccgttcaatcagctgttcaatcccctcagggctgtctgcaaatgttttcacaggagctccggccattttcccgcactcctcctccgtaatggtgccatgccgccagacaggcccctgttccagctccacggtatagttccagctaacctgccccaggttatcggtcagggcaatcagcacacaggcatacgctttcatacgctcctcaaatacggctgaattaggcgtgctctcctcaaagttaagcgtccagccgcagggctctacggaggtctgcagttcattcttaaaacttcccagttcccttgatatccccaatgtgcctgagagccttccgtctgccgaggcatcgcctatatatggattcctggccctgtacagttcattggccaggctgctgaccacggttccgctgctcttaattgtaatgccctgaatatacaaatcctttcccccgccgggaagtctaagttccaggttaaacgttccgctcctgttccagaatgacggcagacaggaatagatgaccagcctctttgccccatcctcctgcgccagcttatatcccctgtaaacagcagccgaatcaatcatgattccgcccacattcacctgttccccattgacatccgtataggtgaccatataggactccgtaggatatcctatcacaaacagcttcataaaaaggacagtccccataactagtacagcattgccaaaataataatgaatagacgttgcttttttattgtagtcggtgcataataattctatcactaaagaatggatgggttattatgcgaaggaaaacaattgatactatcccggttttatctgatgccatgaaaaacatattatctgctttttcaaaaagccgctcccttccgtcaggactggtcaaaagagccagcattgtcctgcttgcgtcacagggggaactcaaccagaatattgcaccacaggtcgggcttcattataataatgttgccacctggcgcagtcggttcctcgcggcgctcccagccttgcggaggattgaaatggacgacccgaaaaagcttgaagatgagatacgggcagtcctgtccgataaaaaacgccccggtgccccgtctgtttttacgccggaccagatcatgcggatcatcgaccttgcctgcagcagcccaaatgattttgggtacgaagtaagccagtggagtctcccgctgttagtggcagaaattaaaaagcaggggatcgctgaacagatttctgagaaatctgtcagccgttttttaaaaatgaggtagatttacatccccacaaaatccgttactggcttcattcttcggaaaagacggaagccccggaatcttttgcgcggaaagtaaacgaaatctgcggcctgtaccagagtgcccaggaacaaagccgggaaggtgcacacattgtttccacggatgaaatgaccggggtacaagcgctggaacataaatatcctgacaagctcccattacccggccagtgcgccaaaatggagtttgagtatatccgccatggcacgaccagcctcatcgggttctttgatgttgcaacgggccgtatggaaatgccgtatttaaactccacacgcacagaagaggattttgtggaagccgtgaaagcattggtagggacagacccgcaagccccatggacatttatatgcgatggcctaaacacccataaatcggaagcccttgtccgctttgtggcagaagcctgtgcccttggcgtggaactgggcaaaaaagggaaaacagggatccttaaaagtatggaaagccgagcggatttcctgcatgacccttcccaccggatccgctttgtctatactccgaaacacagttcctggatgaaccagattgagatatggtttggcatcattaaccggaagctgctgaagcggaaaagctacctatcaatagaagaactggaagcaagcatcctgcgctttattgaacaatacaatcttacagcacacccatttaagtggacatatgccgggataccattagtaatttaatcactgatatttaagcaatgctgtactaggaacacccccgcggctcccagaaccacgtttctcacgttcctccttctcaccttcttcagataatcaatttccgatggcttccctgctgtttgggataccccttccatatctgctttcatccgctcatacatttccctgcaggtgccgcattcctccagatggacccggatttcgcggttcgttgtttcagacgtcaggccgtccgcatacatgggcattaaatcccgaataatttcacatggtatcctttggttcatatttttcctgcctccttaacgactctctctttcccgcggtaataggttactcttgcccagttctcgctgcgccccatgatttctccaatctgcccaaaggtaaggtttcccaccagactgaggtacataaccatatatcatttttccgtgtttcttataaatctcttccatggaatccatatacgcatttcctcctcattcgcgtctggggaaaaaagacccagtctgaacctaagatatgatatcccctggtatctggctgggtaataattggctggagcctaatttgctggagcctaatttgctggagcctcattggatgaatcctattggttggatcctgttatttggagtcctttgattcgagcctgttaatttgatttatgctgtgcttccaaaatgagaatttctctcatcccttaggtatatccagtatctgcccctcatatatcaagtctggattctttacagaaccggaattaggctggtaaataatatcccatttcagaggatctcccagctgccttttggcaatactccagggaagtaatcttgaaattgcgccggacctctattttcttaccattctttccccttaactggaaggcttcgctgggagaagatgttttctccacgtcaacctgatagtaaagcggttcaaatattccgccgtccgcccgcacttccttttcgccgttatccgccagaaactcataggacagctggcagccctccttcatattaaggtaccaggtgccgccgtggaccgaattcctggcggaaaacccatccccctctgaccgcagtaaaaaatctcatattcctggccgtcaggcagagcgcaaagaccgctgtaatccgccatttcatgtatctccttaaaggtatagattctctcctgaaaattatccttcccggaaccgtccccgtcctgggctgccgataccggatagctgaacagtggaacagctgaaacggaaatagaaaatgccaaaccgaacacagttaaaccttttaaaaaatcagatacccattcatagcgcctctcctttccctgccagaatatcatgcaggtacctcaatataccaatataaaatatttcgtcccgtaggctgttttttaatgggacaaatcataattttgcgatatcctgaacttacgaaatatctttaaatttcacccgcctgccacattccacacgttatcacaagtatactattttcttcgggcagactcaacacgttttcgtagatagtttctctttcccgctccgcaatctcaccaaaatttttcaaaaaaagtgcccggcatcagccattaacgccaattccggacaccatttcttatctcaactgccaattttcccaactcactattttccagggacagctcccctacatttcgttcatcttcgccagctttgccgcctggtccgccgcaatcagattatccagcagttcctgaatatccccattcataatagaatcaatcttatacagtgtcagtttgattctgtggtccgtcacgcggccctgagggaagttgtaagtacgtatcttctcagaacggtcgccggtgccaatctgactgcggcgctcttctgcctctgagctctggcgtttttccagctcgatgtcgtacagcttggaacgcagcaggcggaatgccttctccttgttctgcagctgggatttctcggtctggctgtaaataacgattcccgtagggatatgggtcagacgaaccgcggaatctgttgtgttaacgcactgtccgccgttgcccgatgcgcgcataacgtcgatacggcagtcattcatgtcaatctgcacgtccacttcctcggcctcaggcataaccgccacagtggcggtggatgtatggatacggccgccggattctgtctcaggcacacgctggacgcggtgcacgccgctctcatatttaagcttggagtatgcgcccttaccggtaaccatggcaactacttccttgaaaccgccgataccgttttcattgaggctgacaatctccaccttccatctctggctgtccgcatagtttgaatacatgcggtaaagttcagccgcaaacaaagccgcctcatcgccgcctgcgcctgcccgtatttccagtatgatgttcttatcgtcgttagggtcttttggaagcaggagaatcttaagctcatgctccagatcctcaatccgtttcctggcgccggacagctcttccttggccatctcccgcatctcctcgtcgttctcttcctccagaagggccaggctgtcctccacgtcctgcttcgcctgcttgtactgcttataggcttccacaataggagccaggtcagcctgctccttcatgagcctggtaaaacgcttggtatcctgggtcacatccggatcacccagcataagcatcagttcttcataatgaatcaacatatcgtccagcttatcaaacatatctatctcctgctcctgcgattattccaattacaaccactacattatcctgttaccctgtgttctctccaaatccggcatcccggacagtccccatcagacatttaagtccgaactttaaatccagacctcacgccccggctctcaccacccggtcctgtcctgccaaatccttaaacgtcctcacgtccctgtatcccccggacctgaacaatccttccactgcctctgactggtcatatccaatttccatatagatacttccgccctccgccagatgattccgggcctcttcagccagtatgcggtaaaatgtcagcccgtccgagcttccgtccagggcaatcctgggctcatggtccctcacctcaggatcaaggccctctatgacccggctgggaatataaggcgggtttgagacaatgacatcaaaggtcctccccgtctccagaccacagaacatattgctctcaaacaattcaaacttgccctcatatccgcctaaaagcctgtcccggtttctgcctgccaccataagggcctcagccgacacatccagggccgacacatgtcggtatctgcccttaagagccagactgatggcaatgcacccggaaccagtacacatgtccagtatacgcttttccctgtccttctgttcctccaggaccagctccaccagtgtctccgtgtcctgccttggtatcagcacatgttcatttacaaggaactcaaaacccatgaactcctgcgtcccggtcagttgctggagaggggtccggccggccctgatttctatgagcctcctaaattcccggcattttccctctgtctcctcatccttctccaactccctgcccttcatggccaggaaggatgccaggttcaaatggaacacctccagaagcagatacctggcatccagctccgggtccggcaccccggccttattcagttcctgaacaccctgccacagcagctgctgcatggtcatgttttactgctccttcactgtcattgccgttgtcatcgtcattacggcgaccgccttcctgccatcccggaaaattctcatccaggtaagcacgccagtcaaacacagtctccactgccgcgatggccacctctatcatgctgtcatccggctccgtggtagtcagtccctgcatccacatgccggggcggctgagcacattcaccagcctggaatcatggcgtcccgcaaaacgcagaaactcataggacacgcctgcgatcacaggtatcagcacaatccggctcaccacgcgcagccagaccgtatccacccggatgaccatgaaaaacaggatgcttatgaccatgacaatcataatgaagctggttccgcaccgtttatgttccttggagcttcccctcacattgtccacggtaagctccagcccgtgctcaatacagttaatgcacttatgctcggaaccgtggtacataaaggtcctcttgatatcctccatacgggaaaccatcttgatataggctatgaagatgacgattcgtattacgccctccagtatggccatcaccgtatcggaatggatgaagcctctgcatatattggcaataaacaggggaagcaccatgaaaataccaattgccataacaaaggaaaatatcataaccactgtcatgagagcgctctccagcttctcgctaaagaccttatccagccacgcctcaagtttaccgggctctgcctcctcatcgtcctcaaaaaaactgcaggaccaggtgagggccctcatgcccactaccatggaatctataaaactgaaaatacctctgacaaagggaagacctaacattttatgcttcttggtcatactaaaataggtatcctttttcacctcaatatccccgtccggcttgcggaccgcaatggcgtagtcattgccgttctgcatcatgatgccctcgattacggcctgaccaccaattcctgaatatttcattcctttaacctttctcttgtacgaaaaagaaaccctctttccatgatttcccatgaattcagaaagggctgagcctgctcccaagctcaaccctcatctctttgcttattagttagcattcatgccatatttacgattgaacttatcaatacgtccacgagcctgagcagccttctgctgtccggtgtagaatgaatggcacttggaacaaacctcaacgtggatgtcctgctttgttgaacctgttacgaactcattaccacagttgcagacaacctttgcctggtaatagcttggatggattccttctttcatgattttcacctctctgatattatttgcggtttccgaccgcggcctgtgtatgccaatctgtctctgtacattacaggcagccggccgtatgccgtcacaagaacgcacagatatcagcaataactaagttaaacgcgccctcaccgtaaggttctgactcacgcgaacgctaaaactgccgtcaattcagacagcttacatagtatatcatagaaccccgggacttgcaagatatttttttgaaaatgtggacaaattacagtggtccccagaacctgtcactcagccgcttcatccttccagcattccggaagctccggctcccggaccctcaccggctccggataaaccgcgccgtaaagttccagctccacccgttcaatgatttccggcctcaccggacggttgacctccacaccttctatggggaaatccgtcacaggcactgtctctaccttttccagcctgcagacctcgtccattccctccagaacacggccgaacacaggataaatacccttgtggtccggacagtctctcagcggaaagaaaaactcgcagccggccagccctgcctcgccgtagccgcccatgcacacggatccgggatgggagtccaggggctccacatccgggttcagctcaaactcattgggtatcagataccggcattccttctttccaaaggccgtgtagctgacgtccacccagtttccgggcacaatccgctcaatggcatggtggtccaggtatcccctggaggctgtatagataaagctgttcactgtattgggcgctgactccggcaaaagctctatgacaattttcctgccgttggccatatgtaatgtcgcgattggattcatatatcctcctgttagccgtttaccggttaaccgattatctcaaattccttggaatagtggttaagcgcctcacatccatcttctgtcaccagcaccagatcctccacacggacacctgtatccccgggcagatagattcccggttcaatggagaatatcattcccggctctgctttctgggtattcacagaggacacgtctccgaactcatgctctcccagaccgataaaatgccccagcctgtgggtaaagaaaggtccgtatccctgctcagcaatcaggtccctggccgccccgtccagctcgcacagcggaacacccggtcgtatctttgagatagctgtctcattggcgctgcggacaatctcataaatacggcggtgctcgtcactggctttctggaaataaaaggtacgggtcatatcggaacaatacccgtctttgatacagcccacatcaaagagcactgagtcgcccggccttatgacggtgccgtccggtccgtgatgagggtccgccgcgttggcgccaaaggccaccagcggctcaaaggaaaatccgtccgctcccaggtccatatatatcttaagcatctggtccgcaacctgccgctccgtgacgccttcatgaatcagcttcttaaactccgccatggccctgtcattgatgccggaggcagcgcgcatcttatcctgctcctcctcatccttcacgccccttgtcctgtccacggcaatggaggaattcacaaagccagcggcagcccccatctccatgaggggcagcagaaaccgcgcctttaaatccttatcaacgcccagcgggttttccttatccagatagcctgccacgatctccgccgccgggtctgtatccgaataccagaccttctcaacacccacatcctcaggcacggtaaacagcttattcaggaaatacacatgatttccgtcctccctcagataaagggaataaaaccgttcaaagggctccacatacacgcctgtgagataataaatggacatgggatccacaatcagcatctgtgtcagttccatctccttcagggcttccatgatacgctccactctcttctgcttcatgataacatcctcctcttctaaaactgctttctcagcttggggtccagcaaatccctaaggccgtcgccaatgaaattagcgcctacagccattgtgaagattgccagtcccggaaaaccagccacccagaacttattgaaatagtcagctccatctgaaaccatcatgccccactccggcgtgggcggcgcagatcccagtcccagaaagcttaaggtagagaacatcagaatctggtttccgatgtccgtggtagccataatcagaaccgaactgatgctgttgggaatgacttccttcatcaggatccggattttggaggcgcccagaacctcggaagccgccacatattcattttcctttacactcagcaccacgctccgcatcatacgggcataggtgggccatgccaccacaatcagggcaaacatggtgttgaacaggttggaacccataaccgcattgataatcattgccagaatcagggaggggaaggacaaaatcatttctgaaaaacgcatcattgcattgtccaccaaaccgcccacatagcctgctatggctccgtaaaacgtgccgatgaagcctgctatgaccacggtgagacagcctgccagcagggaatacctgcctccgtagagcacccggctgaaaatgtccctgccaaaattgtccgtgccgaaccagtgctccggagacggagcctttaaccgctgccccaggtcctgcacaatagggtcatagggagccagcgccggcgccaggatggccgccgcaatccacgccaggcagattatcacgcccagcgtgaacaggtaattggatttaaataacctttttaaagactgtaccatcagctgcacctcactctcgggtcaatgattccgtataaaatatccaccactgtattgatgaccatgtaatttaaggcaatcagaagggccaccccgatgatggagggaaaatccacagaaagcacggattcataggcaaactgccccacacccggccagttgaaaatggtttccaccagcaccatgccgcccagcaggttgcccaggcccaggccgatgacagtgagcacgggaatcagggcattgcccagggcatggcggataatcagccccggtcttgacagtcccttggcctttgccgtacggatatagtccgtggacatgacgtccagaaggttggaacgggctgtcctggtaatcagacccatggtaaatgccgcaagcacggttccgggaagaatcaggtggctgaccgcgtccaatgccttgggaatatttccctccagaaggctgtcaatgacatacatgcccgtgaccgtagccggcgccgtaaaggcgttgctcaggcggccgggccccggcagcagcttcagcttgtaatagaagaaatacaataccagcagcgcaaaccagaaactgggaatgctgacacctgtaacagatatggcccggaccgtctggtccaggatgctgttgcgcctgatggcggatataatgccgaacaggacccccaatatggcagcaatcacaatggcaaacaaagccagttcaatggtggccggataacacctggccagctctgacagcacaggtttgtttgtgcgcatggaagttcccaggtcaaactgcagaagattcttcatgtacaggatgtactgcacgggcaaaggctggtccaggccgtatttcgccctgtaggcagccacgatttccgggtcgttaagggctctctggctcaagtttgccacggtggggtctcccggtatcattttggtcagtatgaaaaccagggtggcgacgccaaacagcatgactaccagatacaccagtctttttcctataaatttcagctgttccatacgatacctctcttttcttatgtttcaatccatacttaatataaaatacaagcttatgttaaaatccagtctcatacagatattcccgtcaacggtatcccccttggatggacgttcacggcaatacctgccgccgcttaagctcctgtccgcgcccgggcctgcgcagtacagtacagattacggagccagcgggcaggaagatatctgcctgcccgcaaaacagctccgtatataaaatcattacttcacatgaatcaaagtcagatccagagcataggggtccgatatggccactccctccagcctggtgttatagccgatatgggacggagcctgtgccgccatgataaagggcccattctcgtacattgcatcctggatttcctccagaacagcgatacgcgcgtcattgtccgttgcagacatggttttttcatacatggccgcaagctccggatccatgtcggcactccaacctgccctctttccgactacgccgcccggaaggaattccagctgcacgttggggtcgttataatcagttccccagtacataaccgtaaagcccagggttccgtcgcggtaagcatcgccgtatcccgccgcccatggctgagatacgatattcacattgattcccacctgtgacaggtcatccgttatcttctgggccaggtctgtcagtaggattccctccatatccagatctgtcacagtcagatccacatcaaatccatccgggtatcctgcctctgccagaagtgccttagcttcttccagattcgtatagtcagccggtctctcgcccttgcttcccatgaatcccacctggatgatatcataaggagtgatggtgccgctgccgcagatagtctggatgccggtgtaatccagggccctgcggatggcgttctgaacctggggattggacacagggccgccgtaggcttcatccatgttcatcatcacaaatccaactgtcttggttgctccgttgataatggaaatattctcagcgccttccagctcggacatggtgtcgtctgtcatgttcatagccacatcaatatctccgccggacagtgtcatcatctgtgtgtttgcatcaggctgtatcttgatgatgtacttgtcaacattggtagcttctccccaatagttaggattcttttccaaaaccacttcctggtccggaatatagctggtcatcacatacatgccggaacctgcgctggctgtatccagataggactgggctgtgtcagtggacgatgcatcctctgcatccgtgccgccgtgctccttcacaaccgcgctgtccagaacagccgtggagctgtaggtcagcttggacagaatggcactgtcagcctgggtcagatggaacaccaccgtgtaatcatcaggcgcttccatgctctcaatggtatcacagataaaggatggatttccctgaaggttcttgcagcggttgatgctgaaaagaacatccgcgctggtcatgggattgccgctggcaaatgtcacatcctgtttcagctttaccgtcagtgtcaggccgtcctctgagaattcataggtatcagccagacaaggctccggcgcgctgtcattgctgtagaacttaaacaggttctcgtagcaggcattgacaatgagaggcggatacttctcatatacataccccgggtccagggtggaaaatccggagcccatggctaccacaaccgtattggagccggctgcctgtgaagccccctcagcagcggcgtctgtcttgccggccgatgtgccgtccgcgccattgcctccgcacgcgctgcaggcaagtgaaaccgcaaggcacagagcagcagtcaataacttctttttcataatagacctcctctaggtttattgagatgccagtattctggcagtgtctccatattgcaatattttttctggtgcagtgtttccttaagcaaaggccgctctaataaagatggcaggccacaaaatgcccctccgccactttctttaattcaggtacttccctgcggcacctgtcacaggccttgggacagcgtgtgtggaaccggcagccggagggcggatccgagggactgggcacctccccctccagatggatgcgctctgttttcacattctggtccacctggggaatggctgacagcaatgcctcggtataaggatggtaacgcttttcatacagcttatcataatctgcaatctccaccatatttcccagatacatgacgcccacccggtcgctgacctggtagaccacgttcagattatgggaaatgaagaaataggtcagccccagcttttcctttaactcctgaagcaggttcagcacctgggcctggaccgatacgtccagtgccgatacagcctcatcgcagatgataatgtccggctccagggccagcgctctggctatgccgatacgctgcttctgtcctcctgacagctcatggggatacctgctcaggcagtacaaatccattcccaccaggttaaggagcttcataatgcaggcttccacatccatcttccccttcatcccgtgtatctcaaagggttccatcagaatctggcggacagttcgcctgggattcaggcaggcggacgggtcctggaatataatctggaccttcctgcgcattttctttaaatctgctccctttagccctgctatgtccgttccgcccatataaatgtggccctctgttggttttaagaggcggacaagggccctgcccagggtactcttgccgcagccgctctcccccaccacgccaaaggtctcccccttcatgatgtggaagcttacgtcgtccactgccttcacggtcccggacttcttatcctttcccttaaaatatacctttacatggtcggccttaaccagcacttccctattgctcttgtcttcgtttatgtctctgttcggattctgcgccatacattaagcctccttccccgcggcctggtcttcaaacagccagcagcggaccttccgctcctctgaaagccgcttcatgggcgggctgactgtcctgcaccgctctgtggcatggggacatctgggccagaagctgcaccccttaatccgctccgtgggattaggcaccatgccctctatggcggacaacggcttcctgtcctttgtgatgaccggtatggcatttaaaaggccgatggtatagggatgcttgggatccctgaacagttccccggccggtgcctgctccacgatatgacccgtatacatgacaatgaccgtatcgcacagctcgcttaccactcccaaatcatgagtaatgaacaggaccgaggaatgaagctcctcattcatctcgcgaatcaaatccagaatctgggcctggatggtcacatccagagccgtggtcggctcatccgcaatcagaatctggggctggcaggccaaagccatggctatcatcacacgctgcctcattccacccgacatctggtggggatactcgtgggcccttacctcaggattggcgattcccactgccctcatcatgcggatggcttcctccatggcttcctttttcttcatgccccggtgcaggcgcagggattccgcaatctgttttccgcacttgataatgggatttaaggaggtcattggttcctgaaaaatcatggaaatctcatttcccctgattttctgcatatcccgctcagaggtcttcaccaaatcccttccgagatacaaaatctcccctcctgtaatctgtcccggagggttgggaatcagctgcatcattccaagagaggaaacactcttgccgcttccgctctctcccacgatacccagcttttcacccttatgtaatacataactcagatggtccaccgcctgaacggtgccttccgctgtcctgaattccacacataaatcttttacttccaatatgatatctgtctgtgtcattttatccgccctttgttttattacatcaaagcgtcaacgcggtgccaatgtatttacccgcagttttctgcatatatactcaaaacgataccacattttctgggataattcaatatatagattgacctgttttgcccggaaacaggccaaaaccagcacagaaacgcaaaaacaggacgctgccaaggctgttttaacagcttatttacagcgtcccgctcttacgtttgttatatcttaccgttcacattccagggcttcttccaataaatggcatccacattacactctttcatacattcgccgcactgtatgcactccctgtctcccacctgtctgatatccattttacaggtccgcacacaacgcccgcagtcaatgcaggcgtccctgtcaatattcacccccagcagagccgcgggtgcaaacagggaatagatggcacccagaggacagaggaaccggcaaaagcttctgtatacaaaacaggcgcttaccagtataactgccatcacaaggaccttccagttaaaaagggctcctgccaggccgcccagtgactcgtccaaaagcaccaggggaattcctccctccagggttcccgcaggacatatgtatttgcagaaggcaggaaccggcaggccggaggccgccttgaataccacaggcaggatgatgacaaacactgccagaatcacgtatttcaccctggacagctcccgtgtgacgcggttcttttttatcttgggtacaggtatcttatagagaagctcctgtaccagcccaaagggacagatgaaaccgcatatagtccttcccatggtaaccccaaaaagcaggagaactcccaatatatagaagggaagcttcctgtccatggcggacagggcgttctgcagggtgcctaacggacaggaaccaacggctcccggacacgaatagcagttaagtccgggaacgcacaatccttttgactttcccttatagatggacgcctccgcaaatcccttcaggttcagattatataataatgccgcacaaagctgtatcaaacgccgtttcatcgctgctgccctctcatggtcatggtgttctgccgctgccttctcatccgattccgatacattccaggcacactctcactgccttgcggaaggcgtcctggtatcctccctgggcagctccgatacacagaaatactacgcccaggacaaggaggataactgttatcttattctgtctgcaccaatccatcatatcaacgctccaagtcttacaccccaagggcttccttatatctctcatacatcgtgtccgcgtccagggccccggttgatatatgggccaccttgccctccgcgtccagcaccactgtatacggaatggaattggtgggatacagcatggatatggaatactcctcgtccagcactaccgggaaggtgtatccgttctcctccacaaagtccttcaccgtctcggcgtcatctccgcaattcaccgcgataatgccgatcttatccccaaaatcatccttcaggcgctcaaatgccggcatctccttgacgcacgggccgcaccaggttgcccagaaattgatgataacaggtttgccctgtaattcggacagcgtaatgctggttccgtccatgagttctcctgtaaaatcaggagctgccaccccttccttgatgggcatgcccggcttaaactcaatcatgctgtccccctggcctgctgccgcctttgcatctgcctggctgctgcctgcggactgctcccggcctgtttccccggcctctccggcttcccgggtctttcccggctcagactccttgttccctgtatcctccgcttccccggttccagagccgtttttctcagtttctgcgctgctcttctcagcccccgcgccttccttctcagtcccttgggcctgctccgttttctgagcagccttatcctggtccgctgtctggctgcatcccgttatctgcaaagccaggaaaagggctagacaaatgcccgaaacactccttttcactgcctttttatctctgtaaaattgttcttttctcatgtgttattcctcccctttcaactaatggaatagacaatcgagtaggaggaaggcgattatttcgccttccgacctctcacaccaccgtacgtaccgttcggtatacggcggttcaatcaacttaacatgtaacagccttttcggcgtagtagtcttccatggatacaagaccaaacttagctagtctctctttactgatacaaatgtggagattccagcttctgcacactctggcatatcctttggcatatgaaatgccatgtgccgcatttggcggcagaccaagtttgataagattcttttccctgttctttggcgttttccagtgtttccatatgcacatgcgcagtcgataccgaatctgtccgtccatttttgcgcacagccttttcatgcttccgattttgaaataatttatccaccctcggataagccggttgagtttcccaattttataaccattgcccactccccagctcctgcttgtatatttcttcatctgcgccttgaactttgctgccgctttcgggtgtggtctggctttgtaccctttggcaaatgagtcatagtaaaatccaaaccccagatacttaatgccctttggtttatcaaccctgctcttttccgcgttcactttcagtccaagcttttcctctataaaccgagccacgctcttcattacccgctctgccgcctgtctgctcccgaccattataataaggtcatctgcataccggacgaaatccagcctccttgcttccagttctttgtccagctcatttaacatgatatttgctaacagcggcgagatatttccaccctgcggtgtgccgactaccgtatcttcatactcatcatcaatcattacgccgctgaccagaatctttcttaccaccgatatgacatctccgtcctttattgtccgtccgaaaatcgtcatcagcttgtcatggtctactgtgtcaaagaatttcgctaggtcgatatccactatccagttgtgtccgtcattcatcatttccaatgctttaaggactgcctgctgtgcacaccgcttgggtctgaatccatagctgtggtcgtgaaactgctcctcaaatatcggggtaagcacctgtgccaccgcctgctgtacaaagcggtctactgctgttggcactccaagatttcttgtaccaccatcgggtttgggtatctccaccctgcggactggcttcggcttatacttcctcgtccgcaactgttccttaatgttttcgccgttttccgaaagatatgcgccaagttcttcaacggtcatcccgtccacgcctgccgctcctttattccttacgacttgcagatacgccgcatttagattatccctgcttaatatctgctccatgagactgcttgtgtccatgcgttgtttcctttctgccccttttgcctttgccgcctttgaagtcatcgacaggcgtatgctccggctacgaagtggaacgtacttcaactgattgattgttcagcccttcgctccgtccccattacaggaacttcctcactactatggcttctgctgacttctcacaattcgttgttactacggctaatgagaccgcctgtgagacctccccagttaaggtgcgtgttcttttcctccatgtacctgccgcatttactcgtacttccggcaaccttttggacttcagtgccttttgccaccttatccgtatttccgagccttatatgcggttcctgtccgtcaggtcagaggtttgcttacagcttctttcagattccgtctcacggcggacacccttgctgttcggctatgtgcttcgttgttgcctacgcgcacttgggactttcacccattagaaaacgcccatgctgggcaaacaaaacccagagaatgccgcttgtgtcattctctgggttttactctaacataattattattttctgtccacccggctttatggggtttctatgaaagttttattaagctttcatgaagatgcctgctacatctcatctaccacgggaaccacttcccgctcgctgtagtggtgcgcttcctcaagcatcatatcctttaccttcataagccttgtctgggagcttcgctcattctcatccagcttcatggtgatatagcggatgtttgactgggtatcgggaatcatcacatgctccagcgcgtttacacggcggcgggtcttttcaatctccgctgccatgagctggcaggatttttcgcactcagccagacgcagcatgtcaggcagtaaatctgccagactctttaccgcatcatccaggtcactggaagtaaatgcaaagccgtaggaatagatgtcgttagggtctgaagtcctggtcttatacttgaacacaggaatctccacactcatgacgttctttgtctcagtttccagatagacctcctgcttgggagccatcagggctacgttcagggcctcgtctgtcatgccggaacgtgccagcacgaaattttggttagccgcagcgatgcctgcctccaccttctcgcggagggccttgttctcacgcaccaggtccaggaactgacgcatcaattcatcccgcttgtctttcagaagcttgtgtccgcggatggctgttgccagctttttcttaaggcgggtaagctccatacgggtgggatttacatgttttgcacccatgttatgtcaacttcctttctgccggccggaaaccccggcgcgcgtcctttccgcacatagcggagggacgcacgcctgcatgttccctgccgggctgtgactgccggttattttgcttcgtaatataaatcaaggaatttgtccttaatacgtttcagctcgctccttgggaggatgcgcagaagcttccagccgatttccatggtctcttcgatatcacggtcagcatagtagccctgggatacatactccttctcaaactcatcagcaaacttggcatacagtttatccatatcagtcagggctgcctcgcccagaatgatcatcagttcctttgcgtccttaccacgggcataggctgcaaagagctggttcataacgtctgcatggtctgcgcgtgtcttgccttcaccgatacccttatccttaagacgggacagggatggcagtacatcaattggaggtgttacattcttacggtacagctcacggctcaggataatctgtccctcagtgatgtagcctgtaaggtcaggaataggatgtgtcttatcatcctcaggcatggtaagaatgggaatcatggtgatggatccgttcttgcccttctgacgtccggctctctcatacagggaagccaggtcagtgtacatatatccgggataaccgcggcgtccgggaacttccttacgggctgcggaaatctcacgcagtgaatctgcgtagtttgtaatatcagtcagaataaccagtacgtgcatgttcttttcaaatgccaggtactctgctgctgtcagcgccatacgcggagtcgcgatacgctctacggcagggtcgtttgccaggttgatgaacatgacgcttcggtcgatagcgccggtctcacggaagctctccataaagaagttagcctcctcaaaggtgatacccatggcagcaaacacaacggcgaatgactcgtcggtgccgcgcacctttgcctgacgcgcaatctgggcagccaggttggcgtggggaagaccggatgccgagaaaataggcagcttctgaccacggaccagggtgttcagtccatctatggcagaaacaccggtctggataaactcctcaggataacttctggcggccgggttcatgggcaggccgttgatatccatgcgcttctcaggcaggatgtcgggaccgccgtcaatgggcttgcccatgccgtcaaacatacggctgagcatatcctcagacacgcctaactccatggtacgtcctaagaaacgcaccttactggagtccaggttgatacctgtagacgcctcgtacagctgtaccatggcattgccgccgtctatctccagtaccttgcagcggcgtctctcgccgttaaccagctcgatttctcccatctcatcgtaggttactccctgtacgccgcggaccagcataataggacctgctacctcttcaattgttctatattccttgggcattagaagtcctcctttctgctcatctcactgtaaatctctgactccagggtcttgatgacatcctcgtaaaccttatccaggtcagcttcctctgtatatttgaaacggccaatggcctcacgcacaggaaggcttacaagacgctcaatattcacgccctgtgccagagcctctcctgccttgtcatagtatgccatcatcagcatcatcatcatgtgctgtttctttaaggacgtaaatgtatcaatctcatggaaggcgttctggtgaaggaagtcctcacggatggaacgggccgcttccagtttcagacggtcaggcgcagataatgcatccatacctaccagctgtacgatttcattcagctcagactcttcctgcagcagccgcatgagacgcgcgcgcagctcggtccagtcgctctccacctctgcgttaaaccatttttccatggtgtccacatacagggaatagctggtcagccagttgatggccgggaagtgtctcttatatgccaggtcggcatccagggaccagaatacctttacgatacgcagggtagcctgtgtaaccggctcggaaatatcgccgccggcaggggatactgctccgataacggaaagagcgccctcgcggttgtcctggcccagggagataacacggccggcacgctcgtaaaactgtgccagacgggaacccaggtatgcggggtaaccttcctcaccaggcatctcctccagacgtcctgacatctcacgaagagcctcggcccaacgtgatgtggagtctgccatcagggctacggagtaacccatgtcgcggaaatactccgcaatggtaatacctgtatagatagatgcctcacgggcagcaacaggcatatcggaggtattggcaatcagcacagtacgctccatcagagatttgcctgtctttggatccttcagttccgggaactcgttcagaacgtccgtcatctcgtttccacgctcgccgcagccaatgtaaaccacgatgtccgcgtcagcccacttagccagctgatgctgtacaaccgttttaccggacccgaaaggtcccggaacagccgcaacaccgccctttgcgattgggaacagacagtcaataacacgctgtcctgttacaagaggcatatccggggacagctttctctgatagggacggcccttacgtacaggccacttctgcatcagcgaaaccggatgctcctgtcccttctcgtctgtcacaacagccactgtatcggtaaccgtatactctccgccgctgatataggtaagagtgccgcttacgccaacaggaatcattattttctgctgtaccacctcggtctcctgaaccgtaccgatgatgtcgccgccgcctaccttgtcacccacatttgcagtgggtacgaagatccacttcttctcacgcttcagggagggaacctccacgccgcggttcaaaaggtttccgcctgttttctccataatggcatccaggggacgctggataccgtcgtatatacttccaatcaggccaggccccagctccacgctcataggtacgcctgtggattccaccggctccccgggtcccagtccggatgtctcctcgtatacctggacggaagccttatcgccatggatctctataatttcgccaatcagacgctgctcgctgactcgaaccacgtcgaacatgttcgcgtcgcgcatgccttctgcgatgaccagcggaccggctacttttttaattacgcctttgctcatcttttacctccattgttattgcccattaaatataatatccgagccaactgcctgctccactgacttcttaactgccaggataccttttcccgtattgcctgatatgccgggaatcagtatgatggccggaaggccagcctcgcggtagcggttgatctccggttcaatctgggcggccagggcctctgtgatgtaaatcaccgcgtagccgctttctgccagatccttaaccttctttcctgcctccgccgggtctgtcaaaggaaacggttccagacccagactggcgaaaccgtagatactgtcccggtcgcccataactgcaatcttatacatacatctcccttatcctttcccggatggactcctcgggaagatggtttaatttcccggaaagcacaatccgaactgatttaatctcgttctcccgtgccagaatataagctgccagcggacccagaccaaaggcgctgtactgctggggcttaatcttacgaatcagcagattgtcgcaccaccgctcaaaagctgaaggtgagcgccgcaattcttccactgcatctgcataggccgtggtttccaggtaggatccgatggaatccacgccttctatggctgcctgagccagacgggcaacgttgatgctgccgcatggcgccagcgcctgttccagaaataccctgtccttgccggtacgggatgcccgcaccgccgtctttatatctgccgccgcaactgtcagctccgcgtagagttccaggaactcattgccggaggatttaccggctgcgtagattgcatccagggctgctttgtcgattatgatgtcgcagagctgtccgtcctgggtgtgaaggagcgccttgtaggcttcctccgcaggcgttctcatggccgccggaagattctggaattccctggtctgaaccgcttctcggatgagcttcacatccacagtcccctgctccataaagattcccgggtattcatcacccatgcggacctccttgatggccgccttcagattgtggtagtcgttggcgtacaggaatacatcaaataccgacatatccttcaccagctcattaatcagctcccaggtcttcctcttctcaatggccaggatatctccggcatttgtgatgccgtcctctccccagcccttctccataagaagctggatacactcgtcatagtcttttgcagccgtcagctgctctaaaaatgcaccggatagcagggacaattctttggaacggatgcgggctactgcataaacatactgtttgtctgccatttaattagttcctccctacgttcatgaaaacagaatctcctgcactttatcctgtaatacctcatgggccgcgtcgaagagagcgtcaatggaacagttctcctcaattcctccataagtaagcacaaaaccgccgtctatatcccgggtgtctcccgatatatgcagcactgcccctttgtccttaagcgaggcatttaacctgtcctcaaagccttcgggcaggcgttccaggtccttctttgagagcaggagctcgccttcgccgggctgtgcggatttaactgccagtttcagaatcatatcaaagtaggcaccggtctcaagccccttgagttcagccttagccatcccaatggtcgcaccgatgagcctctgcttttcagccagaatagcaccccgcttcttaagttcggctgccgtgcgtcctctttccagaatgttggctaccgcctgtttggagcgcctctcaatatcaacgcactccctctgcgcatccgcacgggcctgtgccagaatctcatctgccttggaacgggcttctgccctggtgcgttccgccgccttctgggattcttctttaatctggctgatgatcttatctaatcccgccatgccatgttctcctttccttaagtcaccttatttggtatgctgattaaatgttaagtcccgcaataccaaagatggaaaggatggagatcagcagtgccaggatggcgtatgtctcaaccatggccgggaaaatcatagctttaccaaactgctcaggtctcttggcaaccaggccgatactcgctgctgccgccttgccctgtgatgcgccggaaatccagcccacaatgcccataggaaggcatgctgccaggtataaagcgccctttattaaggaaaggtcagcgcttccgcccataataccaatctgtgtcagtgtgatgaatgcaatcagcagtccgtatataccctgtgtaccgggaagcagctgtaaaaccagaaccttactgaacttgttgggatcctctgtaacaactccggctgcagcctgacctgcaatacctactccaatagcagaacctactcctgcaaaaagcgctgcgattgcagctcctaataatgctaaagcaactcccatatttcccataactaaatgtcctccttgattttataatatttggtgtgaacggcaaagggctcaaatttccttccgccgccttcataaaactttccaaaaaactctacatactgcagacggttagtatggacatatgcgcccaaggcattaattgccaggttcaggctgtgtccgattacgaataccagtatgaatatgattgctcccggaatggaagcgcccatcatacttcccatcttgttaaatactgtggatataacgctggtagccagacccagggccagaagtctggaataggacaggatgtcgctcaggtatgagctcactccgtatgccccgtaaaggcccttaagtatcctcttaacccagtttttggattcccgtccgctggtaagtacaatacccacaaaaccaatggctgccgcgtaagcagctacagtacccgcaactgccggaagcgtaaaggtaagacccagcatctcggtaaacataggcatggtcagcagataaacaatgccgccgccaaccagcatataccagaatatggcgtcatatataccgtcagccaggctgccgttcttcacacaggagtagaatttgattccaagtcctatgaaaaggtgaagaataccaagtccaaatgcaaataccagaagcttcataggaaggcttactggctcaaaccagagaggagcgagcctgatatccggccggttgaagaatgtggtcgcgataacattgacagcatctccgaaaaagctgccgaacatgaagccccagaacgttgtggagataccacagtacatgaacatcttcatgaacttcttcattccggcttccatgttcttgaatttggtgaggcaatatgcggtacctgccaccatgataagaccgtaagcagcgtctgagagcatgagcccgaactgtacatagtagaacagtgccactatcatggacgggtcaatctctcccttggaaggaacgctgtaactctcaataacgccctccacaggttccgcgaacttattgttgtggagcagaattggtacatcctcctcatcacccggttccgtgtactctacaaccacctcatatttttcctgaagcagcttctcaagcttggcagccgcgctctcaggtacgtatccggttataaagaatacacgtcttgactgggccataccgtttaatacaccgtatttctcagcccgcatggtgtagtaatccataacaaactttatgagctcccggtccggagccatctccgctacagccttttccgcttttttaatctccgccttttcctttgcgagctcttcttccagctgctgctggcgtttagcaggcactgtctggctgaggggcggttttacaaaattcattttcttaagcgcatcctccactgcttccgcatccggtttcgcgcagacaatgaaaagacaggtctgctccttggatgcacttacaatggtcacgtcaattgtctctgcctgaggtgccagctccccaagctgttctgttacctgttccagggtaatctcatcctggatggaaccgatgaatgccgcagttttctttgttcccttaaaatcaaggggcaggtcaaaggacctccatggcaccagtgcttccatttgctgttccagcttcggaaccgcggcactgtgctcgcctatctgcttagcaagttcctgtaagcggtaggcttttttcatgaccatgtcgtgtttgcctgcattggcctcatattcgtccagggaaagtacttccctgccttcgaacgaggacagcatgcccttctcctcaggcgcgtacctgtccagaatattaatggcctgctctgctatattggcatttcgttcaaatacggttttggaagacgtcacgtccattctgcccaacatgtcatcttcctgcagcacattgctgatttcaagtaccccttggcgctgcagaagctcaagggtgcccttgcggtcctttttaagaccacaaatcagcacttttttcataggcactactgccaaccttaagcgcctcccttcctatagcagttctgataagataacttcaactgccttttgttgtttctcagctacagctttctgcaatgcttccaaatccttgccttcctcggcgccggctgcctgcatcatctgctcgctctgagccttggcatcctcctcggcccccactgcgctttctctggcagatttcgtcatctctgccttcatctgcgccgcctgagcctttgcctctgccacaattgcctccgcctcttttacagcttccttctcggctgcttccgcggccgtttctgcctgacggattgcgtcaatcgtctcctgggccaatccaaatccccctttctgtaccggaatcccgttagctatcctgccggaatatatggttagtttgcgcagatatgccaccgggaatacgatggaccatacgtttgtgttgcaaaatgacaacttatccagtatttgtccatagctttcctattatttttgtacaatatgaatagattataacccatgcataaaaatttatcaatccactttctcaatatttcatgaaaaaattttagactttctaaatatttttgtacagcatacaaaaaacttctatccatattaaaataattgtccctttaaacatcaattccggcgggacatatttgttacattaataacaaatttatttattaaaataggctgcagttccaacgccttccatctgcgtcataagctacagcctatttaataacatcataacattttatcctgttatttgaaacagtaattttttaacatctttttaacgcccggccattgccgccaatttcaggctaatccgcaataatcatccgtttcttaccgccgccgttcatcaggctgtagtatgcgggaagcataagcagcgaaagaatggtggatgcggtcaggccgccgatattaacaagagcaaggccctgtgtggtggaaccgctgtcgcccagagcaagggccatgggtaccatggacacaaccgtggtcagggtggtcatgagaataggtctcagccgggtagcccccgcctccaccagggcggtatttaaatccatctctctgcggtactggttcaccgtatccacatagagaataccgttgttaacaaccgtaccaaccagcatcaggaatcccagaagggacgtcatgctgatggcgctgtctgccagccacaggagcccgaacgcacctatgagacagaacgggatggtggtcattaccatgattgagaacttgggtgactcgaactgggccgccatgaccacgaataccaggaagatagccagggcaattgcctggaacagtgccgtgaactcctctgtcatggattcatccatctggttctgggcaatggtcacattggcgttgtcacttacaaccggctgcaccacctcgcttaaaagccggctctttgtgtttttatctgaattctcggtatagacaccgctgatggtggcgcggtactgcttatcctgcctggtgatggacgcagggctgtctgcaaagtgaatgtcagccacatctgtcagtgcaacggaactgccctttggcgtctggagggtgattgtctcaatctggtccagagtcttatagcgctccttaggatactccacctttacgtcaatatcatttccgttaatattaagggaggtgggagtggttccgctgagcatgttattcagggtaccgccaatctgggccggcgtcagtcctgccgccctggccttgatgggattcaccgtaaccttcactacagaggccgcattttccagggatgagtggaccttggtcagctccggacgtttgcttaagttttccgccacatggtcgctgaccgccttcaggtcatcgtaattcgtactctgaaggtctactgagtattcatcatccgatcccatcatggcacttacctgtgagtaggcttccaccgttatattggtatctgagattccgcccaactgctgtttccagagacggaccacctggtctgtctccatttttctgtccttcttaaggtagacagtaatgctggggtcagagctcatgctcagtcccgaactgcctgccagggtaatgtaggattccacatcttcctgctgggagataatatcctctatctgtttcatgacacggtctaccttgtcaatcttcatacccggctttacttccgcggtaatggatatctggccctggtcatcctcagccatcatctccacccgcaggaacttggcaatgaagaaggagaacaggaggagcgccacggaggccagcatgacaagccctctcttgttcagaagctttgtcatgattccccggtaggcttcctgcatcttctcaacaggtctggacaggggagccgcctttctctccaccggtttataaatcatgtagcacagaggcaccactgtaatagctgatatgagagatgccgtcatacagaatacgatggtaaagcccaagggccggaacatctggcccgtcatgccgcccagcatggccagcggcaggaacaccacgcaggtggtcagcgtggaaccgataactgactggtataccacgccggtaccgtttagggctgccttggaaaattcccggaaaccggtatcatccgtggccctgaaacagctctccagcacaacggtggagttatccaccatcataccgacgcccagcaccagggcgctcagagtgataacattgaggctgaagcccatgagctgcatcaatataagagacgacaggatggatacgggaatggagctgcctacaatcatagacgccttcaagtccccgaaaaacagccatatgatgaccatggaaatgatgatggccagaatcattgtctcgataaccgagctcagggatgacatgatagaatccttatcatcgtctactatggtaatctgcaggctgggatccttggcggtaagctcgttcaccacccgcttcacatcttttgagacatccagcgtagccgcgtcctgctgcttgctgatagttaatgccacaatatcctcaggaagtccgttctcagccttatagcgcgcgatgctctccacatcatccgcgcccatatacacctttgccacatcgctcagatatacggtctggttaccggatacggtcagcggaatatcattgagactgtccatggtctcaaagggctgctcggttgacacagacagcttctggtcgcccacctgcgtatcgcctgccggataagtgatatccgatcccgcaatatcgctggcaatggagctcatggatacgccgtactgtttcagcttctccggcatcagctccaccttgatatatttctggagaccgccggtgatggaaacctcggccgccgttgacagcttctcaaattcaggtacaacctcattgttcacataattgtagaggtcgtcgtcctccccatggctgactgccatgatcacatttggcttcaggctggtattcagctccagcatgatggggtcatccgcatcctccggaagctctgccttagccaggtccatctgcttcttcaggtcatcatatgcatcgttcatgtcagtgccatacttgtatttcagcatgacgatggacatgttctcctttgactgggaggatatggtatccagaccgctcagggtactggccctgtcctcgatgggtttcgtaaccagctcgctgacgtcgtcagggctggcgccggagtaaacggtcatcacaatcatcatggacatgttcatgtccggcatcagctccagcggtgatttcatcaccgaggacaaaccgaacacaatcagacacaggattgcgagaaccgtactgaccggcctttttaagacaagttttgttaagcccattttcctgcctccttctactgtgcctgactctggtctgcggccggactttcagctttgtctgtctgactggtttcctggataacctgcatatttatctgtgcatcggcttccgttccattcatctctaaggttgccggcgcctcggtctccagtgtcactttggttccctcctttaattcggaggtccaggtggtgaggatccggtcatccagggtaatgcctgaaagcaccgcgatattctcactgtcatagatgcccacttccaccggcacctcgtggatgatgccgctgtcataagtatatacataggcatcgcctgatttataatatacacagttatttggaatcagcatggcatttctggcggatgcggaaggcacccgcagctccacactggttccggctgccatggcctcattgtcatccacagatgcctttatcttgaacaggccgacggatgcctcagccatattgctgacttcaatgacattgccgccgtattctgttccctccttgatgaccgtgatggggtcacctgcgttcagatgattcttaaccttctcggttacatagaaagttacattgttgccgctgtcgcctgcgatgacgcagagctggttagagtttccaaccgtgtcatgtacctccacattaagctgttccacccgtccgtttatgggtgacgtcacatggctgaattccatctggttttcatatgcgatcttggcggactcatactgaagcctcttagcctcagcggcagtctgatatccctcaaactctttatcagatacaaagcctgaagcatgaagcggggccatacgggccagggtagactgggcgtcatcccacgccacctttgccgcgtccatggagtttttggatgtatccacctgttttgtatcgatctctaacagcacctgtcctgccgcaaccacatccccggccttcacgttgacagctgtcacgtcgcctcctgccttgggatatatgtacacaatatcggccggctcaatggtgcctaccaggtctgttgtcagcagtatgtcgcccatctgcggcgtctgtaccgttaccaccgggtccggagtggggacaacaggctcttccttcttgaaaacccgggcaatcacaatgactgcgatgattacaatcacgattccccaaataatgcgcgtccttgcttttttcatcttctcctctttcctttcatgtcctttttaatatgagaatctgtcatagcgccggcgctgtccttagagggaatacagcgccagaaaaaaacaagggaaatgagctgccttggtccacagcccttccccaaattacggcttctttcttttttaccaccatcttgtattttagacagttgcccccctttttgtctaacaccaaaatgcggataattaacaactcattgttgttaattataattatttttcaaaaatttaataaaactttcaagtcttttctcattttctttacgccatacaatgattacactggcgtgagcctggctattggagttgggcatgggatgcatgaccagccgttccccgtagttatgatagaactccttaaagccgatatgaatcccttcattggcaataattgccagctccaggctgtttacattttcataataccgggccttctgaaggatatgttcctgcttggcaatcagttcaaacagacgcagctcggctcctgcaaaaaaattcttgaagagacaaagcatggtctctcccttaaaatcctccatgactatttcttccttctgagccaggggattttccttggacattacatagtataagggcaggttctttaccaccaccagcccgcacttctccttcagctgctcgtaggacggggtaaagcttacagtcatcatcaaatccggatttccgttggttatatccttaatattggtaaactcattgatttcaaattccacatccgggtcaagagccatataatcagccagtatgttgccggccatctctatgataccgctcattcccaccacggacaggttaatccggcgtttggccctctccccttcctccctggccatatccacggagtcatatatctccttgggaatatctttccagcgccataacagaagctccccgctgcgggtcagccttacatccctggtggtcctgtcaaaaaggcgcagctccagctccttttccagggacgctatctggcggctcagcccctgctgcgatatatacagatggttggccgcctccgtaaaattaagggtcctggctgcttccaggaaacattcaatctgatggatggtcatggatatactccttttgtatgcatttcagtatagttatatgctatccgccgtttcctgatcctcggcgtcctgatcctcggcgtcttgatcctcggcgtccggctctgccccgcccagattcagaaccgccgacgggtccagggcatccctcagggcatcgcccacaaaattaatggcaaccaccaggaccactatcaggaatccgggcggaatccagagccacggctgttttgtgagcacggtcagggactgggcgctgttcagcatattgcccaggctggcagtgggcggctgcactcccattccaaggaagcttaaggaagcctcatccagcatggaaagggccatcactaaggtggcgtacaccagaatcggcgcaactgtattgggaagtatctctgaaaacaggatatgtctggcaggcatccccgccacaatgctgctctttacaaaattagtctcccgtaggctcagcacattgcccctgaccagacgggcgatgccgggccagtccacaaatccgagaatcagtatgatgctccagagccccggttcaaagatggctgccgccaccagcaccagcagaatatatggaaaggacatgaccatatccgtaaaacgcatgatggctatgtccagccagcctccgaagtatccccccagcagccccaggctgactcctatggccgtggatatggctgtggccagcacgcccaccagcagggatatacgtgttgcatataaaaggcgggaaaacatgtcccgtccaatctggtccgttcccagcaggaacccggcgcctggcggggcgccgaagggccctgcgatggcgtccgggtcatagggcgctatgacgggcgccagaatggccgccgcgcagataactgccagcaccaccagactgatacaggccaggcggtggtggagaaaccgccgccttacggtctgccagtaattttctcttccgatatccccataagggttctttctgttcattttcattctatctatgcttactcctgtcaagtgcttgcgccggtctgtcagtcatactgaatagccggatttacgatggcgtacagaatatccgtcaccaggttggctgccagcaccaccacggcggaaagcaggcagacgcccatgataaccggataatcccggttcaggatggcgctcatggtcataagtcccagtccgggccaggaaaacagctgctccacaatgaccgcgccgccaaacagcgccggtatctgcatgccgataactgtcacaatgggcaccagggcattgcgcagggcatgcttatatatgaccttcctgctcccgattcccttggccctggctgtgcgcagataatcctgctggagtatttccagcatggcgctgcgaatatagcggatattggtccctgccatggagacagacagcaccagcacgggcattaccatgtggaccgccacatccgccgagccgcccgcagtgcccagggtagtcatccctccggagggcaggatgcccaggttcacggtaaagaggtacaccagcagcagggacaggaaaaatcccggtatgctgcttccgaaaaaggaggctgtcaccacggcgtaatcccccttggaatactgatggatggcgctgtagattccggcaggcaccgacattataaggcttacaatcaacgacacccccatcagaagaagggtaggtcccagatggcttccaatcatggcgctgaccgcctcgtaggatttcacggaataccccatgtttccggaaagaagctgccccagccagataaagtactgtatatagaaaggtttgtccaatcccatggctgcctccttggcggcgatggcttcctgggaaatgcgggctccctgaagcatttccagggggctgcccgcaaaacacatgatggcgtaatcgatgatggtgatgccaagcagggtgggaatggcaatcagaatacgcttcagtatatattttgtcatgcctgctcaacctccttctctaattccttataccggatacaggctgtcaggtggctgcttccgggtgccgccggtttcagctccatttccccgctcatacactctcccctgcagtgggggcatctggggtggaagggacatcctgaaggcgtattcacattggacgccgtctcaccgcccacaattccctcagaccgcttcctgcgctttcgcggatcagctatgggcactgcctcgaacagagccctggaataaggatgaaggggatggtcaaacagctccttccggccggcaatctctacaatctttcccaggtacatgacggcaatccggtcgctgacatagttcacagctcccaggccgtggccgatgaagatacaggtaagccccagctccttctgcaaatccctgagcaggttcaatatctgggcctgtatggacacatcaagtgcgctgaccggttcatcgcataccagcagcctgggatttagggaaagtgctctggcaatgcctacgcgctgcctctgtccgccggagaattcatggggatatcttcccagacagtttttcggaagtcctaccatgtccagcagcttttccacgtgggagtatacgttcccgcgtttggccagtccgtgatacagcatgggttccgacagtatctcaaatacatgcttcctgggatttaaggatgaataggaatcctggaatatcatctgcagccgggtgcggaagggcttcatctgggcctggctcatattgcccaggtcattgccgtcatagatgacatgccctcccgtgggatgctccagtcctaccagctggcgccccaacgtggatttgccgcagccggattctcccaccagccccagggtttccccctcaaacagctgaaaggatacgccgtccacagcccgcaccacaccggagggatgggagaacatgcctgattttgacgtataatattttttcagtccctccaccgaaagcagcgggacatgagatttatcagccatctgccggcacctccttcgccctgcagcaccgcacaatatgggaagcccctacaggcacctcctgctgcggcttcatgcacattgctgttctgaaggggcatctccttgcaaaacggcatccccgaatcctgtcgtagtgttccggcacaattccctctatggactccagccttctgtcctcctcatccctgataccgggtacggaacgcagcagggccctggtgtagggatgggccggatggtcaaacagctccagcaccctggcctgctctatgagctgtcccgcatacattaccagcacccggtcagccatctgagccaccaatcccatgtcatgggtgatgagcagcaccgccatgcccatctcctccttaagctccagaatcaggtccatgatttgggcctgaatcgtcacatccagagccgtggtaggctcgtcggcaatcagaagggacggattgcaggaaagggccatggcaatcatgacacgctggcgcatgcctcctgacagcagatgggggtattttttcatcacggaaagggtgtccggcagccccacccttttaaggagggacgatgccctctccctggcctcctcctttcccaaccccatatgggcgcggatgctctccgtcatctggctcccgatggtaaatacagggttaagggaggtaagagggtcctggaatatcatggtcaggcggtctcccctgactccgtccaactccctctctgtcatggagagcaaatcccttccctcgaacaggatctggccgtcagtcaccttcccccctttgcctaaaagccccataacagacagggaggtaacgcttttgccgcagcccgactcccctactatacagactatctcccccgaatccacatggaatcccacgtggtccacacttatattcttccccccgtcaccagaaaattcaacttccagattcgtgacttcaaggatatgtgacatactgtttcctcatttcttgatattaatggcggatttcccatgaatgaagatacccagagagcatatgccctccgggaatccgttcattctttccaattatggggttgtcctgccgggatgccttccaatgtgacacattctatcgggataaattctattgggtcacatcccactgctccacatgattgaggaagccatagacgctgggcttaacccctgtcaggcgtttattggccgccgccatggtcctgataatgtaggcggaaaacatgggcacatcctcctggaccttccggtccacgatcccatacagctccttcagcttatccttgtcatttgtcagggccacatttgacaatgcctcctccacctccggcctggtatagccggtccagctgccctcgccgcctaaaagccaggctatgtccgcataaggatccaccggcggataggtatactgtacggccagcacatcaaaatcaccgctggaggcagtgctcatcagcgtattgatgtccatggtctggatatctgccttaatgcccaccgctgcccactgggctgctataacagaagccgcgttcacaaaggtgctgtcgcctgagtcaatgcagaaacgtatgcttttgctctggtcccatccgctctccgccagcaggctctttgccttttccggatcataggaaacaggcaccagggaactgtcaaaatacgggctggccgatgacagaaatccgtccgccacttctccgttgccctttaagagctgctccaggagctggctgcggtccaccgcgtacaacatggcctggcgcacctttgcgtcggtgattctggctgtattgatgaatacggactggttggtgatgggagccccgtaggaaacctccacgttctccagcgccgccacactctcatagtcctccaggggaatggtgctcatggtgttctgggtaatgtcaatttccccggacttaagcccggcatagagctggcttccttccacaatttttatgttgagacgctcaatcaccggagcgcccttccagtagtctttgttggcctcataagacacataatggtcccggtcaaactcagtcaccttatagggaccgctcaccacgtccggatggctgaaccacgggtctgatgccagcgccttctcgccgatatcaccaatcacatgctttggaaggggcatgagatagcgggcataggagctgttaaaggttatgagtgacatgggagccttggtggtaaaacgcacggtcttgtcatccaccctggcaatgccttccacatggtcggctccctcttccacaaacccgtcgtcgcccacgccttcaaatacatagtacatcatggccgggtttccgataaccgggctgcaaagcctgagggccgtgtacaccacgtcatccgcggtaaccggagttccgtcggaccagaccgccttatcatcaatatgcaccagaaaattcctctcgtcctccgctgacacggaatctgccagcattccttcaaactccatattctggtccagttccaccaacggcaggaacatgagacctgtggcatatttattcatctccacgccgtccatcagcagggggttcagcgtattgagagagctggtcacaccaatattgacgatttttccgctgtcagaggccgctgcctgggtctgtcccaatcccgtctgtcctgattccgtctggcccgacggccggctgccgcctttgcccccgcatcccgccgctgacaggaccatgaccgcagataaaaccagggcaagacatctgcctgccattctccccgctgttccttttgtatgtttcataagcctcctccttaaatccccggagcacccgtatacgcgctccggacgctggcaccgcataccgtcaataccgacaacatgacctccgtttctgcaaaacgctgtgccgcgcaacaaaaccacactattcatagcaaattagtatggttttatttatatcattacacgcaataaatgtcaatagctctggccccccggcttttaaaataaagtggaaatttacaccaaactgttatagaaagatattctacactcctaatttcccttttgattcattccgcattgtggtaaatgcctgatgggtacggaacggattggcggcgctaccatcttcatcatgggcaaggccaggctgctgaaggtcaaaggagggggctgcggggattaagcgcagggaaaaacaggaacacaaaaacgggactccatacttcatatatggaatcccgtaatctttttacccatcaatccctgctaaactaagaattaatcacaggtatacggcatcagagcaatgtgacgtgcgcgcttgatagctacggtcagggctctctggtgctttgcacagttgcctgtgatacggcggggaaggatttttcctctctcggatacgtatctctttaacttgttaacatccttgtaatcgatggttccgttcttatctccacagaatacacaaactttttttcttctgcgtattccgcctggtcttctcatcttagcgccatctggtctatctgttttattaaatgccattggtgttgtcctcctttattattaaccatgaacatcctagttaaatggaagtccttcgtcctccactccatcaggaatattcataaacccatcaccaatcgcactggtaggagccggtctctgagacggagctgcctgggcatatcctcccatttcagacgccgcacccttactgtctgcgaattcctggtcatccaaaatgacctcggtggtgtatactttctgaccttctttatttacatagctacctgtctggattctgcctgacacgagcacccgcattccctgacggaaatacttctcggcaaactcggcggcgcggtcaaatgcaacacagttgataaaatcggctgtctgctgctccgcggaactgtcctggttcctgcggccccttctgtccaccgcaagggtgtacctggctatagccatggaacgctctccctgtgaatatctgacttccgggtctcttgtcaatcttcccattaagataactctgttcatacggtcacacttccttttctctcccgccataggcggtctgggtatctcttatgcctctgccttaacgcataagtatctgattactggttccataatacgaacgtgagcttctacttcattcgggcatacagaatcagactcgaactgtatgaagtagtagtaagcttcgtgcatcttctgaatctcgtaagcaagtctcttcttgccccattcatctacgtttgttacagtgccgccgaaacgggtgatgtaaccctttaccttttcgattgctgctgcacgctgctcgtcttccagcttcacattcagaacaacggttaattcatacttgttcatcttgctttacctccttgtggtctctggcccctgctttcagtaacaggagcaaggatataatatgtcacggagtattattttaacaaatttcatggacaaatgcaagatatttttttgttttcttacaattttcatgacggatttcacggtatcttccggggcagccgcctaagagtcctcttttgccttggtaagtcctctggtatttttctccaccagcctgcgggcaatcatgatctgatgtccgcatcccatgcatttgagccggaaatcagctcccaccctgaggatttcccactggctgctgccgcaggggtggggctttttaagctttactatatccccaacttcataatttaacctttcgttcatgccatatctccatttctgtatatgggtctgaccgctgcctgtcaccctttcagtatgccttctatctcagccagctcctcacggctgaatgccaggttgtcaagagcctttacattatcctccaactgggcaatgctgctggcccctatgaggacgctggtgacttccttcctgcgaagcacccaggccagggccatccgggccagggactgtccgcgctctccggccaccctgtccagagccctgattttaaccagcttgtcctctgtcaggtatcttccgcctatcgtggaacctttctttgatgccctggagccttccggtatcccatccaggtatcttcctgtcagggcgccctgtgccagagggctgtagcatatgcagcccacgccctcacggtccagaagctccagaaggccgtcctccgcccagcgctcgaacatattataccgcggctggtgaagaagacagggggttttgttttccctcagtatgcggatggctgcctccgcttcctctgcctgataattggagatccccacatacagggcctttccctggcgcacgatgtccgacagggcgcccatggtctcctccaggggcgtctccgggtcaggacggtgatggtaaaacacatccacatactccagtcccatacgctttaagctggaatccagactggccataaggtacttcctggagccccagttgccgtacggtcccggccagaaatcaaatcccgcctttgtggagataaacagctcatccctgtaccttcccagaccatcccgaagagcggatccgaaattttcctctgcactgcccactgccggaaatccataattgtttgccaggtcaaaatgggtgatacccatatcaaaggccctgaaaagaacagcctcctgttcctccaggctcttttcaagtccaaaattctgccacagtcccagggatatccttggaagcaggacgccgcttctgccgctgcgcatatattccatactgtcatatctgttctctgctgcctgatacatctgtgattccttcctttcttaatcaaccacagtcccaaggacctccccgataggaacgctgatgaccagatccgcctgggagtccctggaagtggctgctttattgatgagcaccagtttattgcctctgtaataatcaatcagccctgccgcggggtataccaccagggatgtccctcctatgatgagtatgtctgcattcctgatataatccacggatttctgcagggtcctgttatccagtccttcctcgtacaggaccacgtccggcttaatcacaccgccgcagctgcaatggggcactccgtcactttttacaatgtaatccaaatcataaaactgtccgcacctggtacagtaattcctatgtacgctgccgtgaagctccagcacttccctgcttcccgccatctggtggaggccgtcgatgttctgggtgatgaccgccttaagctttcctctctcctccagccgggccagggccttatgggccccgttggggagagccccggcaaacagcatcctgtccttataaaagcggtaaaattcctccggataccgcatataaaagctgtggcttatgatggtctcaggcgggtatttgtactgctggttatagagcccgtccacactgcggaaatccggaatcccgctttccgtggatactccggctccgccaaagaacacaatattatcgctgccgtcaatccattcctttaactgccgccatttttcgttcataccattacccctcctgattctgccaatccataccgtgttcacgtttacacaacctcatccagatacacgccgtccagggcctgcacatacgcgcaccaaaaaggcaccacattcggttgcccatctgccagctcctccaggacgctgtatccaaacagccaggatgccagctgttctatggtaatatccaaaacctccgtggaaaccagtgtccccggataatcaggctcctccgcgcattccccggcatgaacctccgacagggtcaaacctctctttgtaagggatgagccgtttccgtcgattttccatctccacaaaccgctgttgcccggtatcagcgtgtcatggatattgaccatcacatccatggcagggcagggacacccttcatccaggacaatggcttccataaaggaccgcacatcggtgatgcgggccatgattgccggtctgggcggatattggccgctgtccggttccagccattcgtccctgcccgcgtacaggaacctctgctcccgcttctcacgcccccaaaaggactggaacgcctgcagggcccctgtaccgtcgtaccatccatatacgcttcccgcctcgctgtccagctcagactggagcatctccatataatcccggtcgcgcagtgcatatacctggaatctggaggaaagccaatgatttatccagccggccagcggggaacagagatttccgtccagccgaagctccctcctgtgaaggcgctcctttgcctcaggtcccagcctgtaccgcggctggtcaaatatataccggaacccaaagggcctgtaaatatccggcgaggccggcataaggtagcagaagggctttctgtcctggtgcatgtctcccagcatcctcatgagcacatccctcatatgtccgcggtgtcggctgtcggcagccgtagccacgccaacgatataatccagcttccacatcttctttcccacattaaccctgtatgggttcatgtgggccatggttacgatacgtcccgtgtcgtcctccttcaccaatacggcgctctgacatagctttttatcaaaataatagtctgcaaattcccgggaatcctccgggaacgcttcctgccaaaggggcctgcacgccccaaactcactcttctccaaataccggatcatcgttccctcaccatatattttctcgcaaatccaatgggataatagctcatcttggcctttctaagaccctccatccccacatcgtcctcccggttcacaagttcagcctcgggaaattcatttatcaggaactgctggttgataaactggtacagtcccctgatttcagggttggccttctcaatatgaatgacagccatgttctcccgtacattaaggctcccaatagtaaacgcctccagctgtccgtcaatgtataccccggccatcctcacgtaaaggttggaacagtttttaagtatatcgtgtattcccgccacctcataatccagtgacagctccatggcgcccacttcctccctgtgctgcctccagcgctccataaactgccacacctcatgccggtcggaacagcacagacgcctgtactcatacctgccttcatacgtgcgcttaaagccgttaagatggtttctcttcttgacgaacttcttcccttccagctttctcagctcctcgccgctgtagagatagtcctttaaatccacctgctcttccacctcaaagagggccgggtccagattcaggtactgtaccgcttcctcatcggccagggagatatagaagggcttgtgaagcacctccgaaaaataatccaccatctgctgaaagaagtaaggcaggtcttcctccctgcacagaggcatggcggttgaaacctggccgtccttttccataagccacaaagcagcccttccctcgctcaccgcgcactgtacatggtaatagtccttccacaaaaaactgtccagaaacacgctgtcacatgttttattgggcctcatcccataaaaaggccgaagcctgtctatatccccggccaccaccggcttaaattccaattccatagcatagcaccttcttttcgtttaactctagatagtataccataaaaccgggttctataacagtttttttgcatcacaggaaaaagacctggaagcagtttccagatctctttcactttccggacttcattttcccaaagccgtccggcctcttccggcaggatcctccattacagtccctgggcaatctctttcaccagcagcagcctctgcccctgtttcacctggtcgtccgccagttcgttggtggatatgatattgcccacggttgtatggaattttttcgctatttcccacagactgtcttccggctgcacgatgtatcccacgattcccggcagctcctgaagcttctgcaaatccatgggatggatggctgcccctgtaatcaccggttcacacaccggctgcagaaccagaaaatccagggcaatcacggccttcacttccaccatgtccccgcccatcatcacggcgcttaactgttccagtcccgcatccagctggtatacgctgtcctcccggattcctctggcctccgccacgcagtggaagggcacctgctccacagaggactggaccggcgatgtgtcgtcgctggtaagatataaaagagtcacttccagcacaccgtcaatctccaggcagtcatccccgatttccacctcatccagcttgatggtcccctcgttatggcagatctggagaatccgttcagcctggggcagactcagcttctccgccaccttggatttgcacacattcctggtcagaatctggtcaaaacaggcatctgaacggttcagctctatttcccggttgttggagtacatatcgcttaaaagctccaccacctcctcctcatagagctttatatccagctccagcaccgcgtccacgtccatttcccgcatttccccgtcgtagtcaggcttggcttcaatatccttatgggccaggcgcactgtcaccatggggatctggtcctccttcacatcgctcatttccatgtcccctgaaaatgggatggtctcctccagccactggacaggcatattttcatcctctgccccgtaaataacaaaaacactgagttcgccgtccaggtggagcctgccgtccaatggtttcacggtcacgtcccgcagcttcatctcccgccataacagccggccaatgttgggcttgcctccggtaaggctaagttcctccttaatccggtatgtatccttgcgcctgacagcaatggcagccgcattggccgtgcgcttaagcgtctccacctgcacctgtcccgctccgtccgtgtcagacatgccggcccccgcgggacggctgttattttctatgtccacatccacagcagcttccacgtccctcagggtctccacccgcacctgaagggtaatgatggcctggactcccagcttcctggaattaatcatatccgtgttcagatcttccagcatccagttaagccccacgtaatccttttcctccaggccctggacattgaccacctcctcaaagggaatattgccgcccagggtctggagcccgccgctctccttccggtacagcacctggaattccagctttccctttaccgccaccttatcaccctggttcttcactgtctcaatctgtatttcgccggtgtccagcatgacctgctccatatcatccagggtatccggtacaataaagtcatcgtccagggtaatctgtgtggtcacgttgcccttccattggttcatatgtatctgcttctttatcaattccataaaaaacacctgccatctctcatagtcttttagaaaaatctatgcggacagcaggtgatttatgctctttttctatctttcatcgtattcgtccatgaagtggcggcgcaccccgtccttcacgtagccaaggcaggcgtccagattaatgttctccacgcttttcatgatattggcgtctatgaaggggctggtctttctgagggatcggatgagctccttcatctcctggcgcttggaggtgtgcacgatatcagccgcctcccctgccatccctcttgcagcctgttccttagcaatccgctccgtaaaccggcaggcacactgcaggaaatgcaggccgttgtaatccttccaggccagtatatcttcttcctttacatagtacagggggcggattaactccatgccctggaaattcgtgctgtgaagcttgggcatcatggtattaatctggcctccgtaaaggattcccataagaatggtctcaatcacgtcgtcaaaatggtgtcccagcgctatcttattgcatcccagttccctggcgtgggcgtacagataccctcttctcattctggcgcacaggtagcagggggactgctccacatccaccacaatgtcaaatatatccgaatcaaagatacgcaccggtatattcatgagggctgcattatcttcaatcagcttcctgttgtccggattgtatccggggtccatgacaatgaactccagctcaaaatccgtctggctctgccgctttaactgctgaaggcatttggccagaagcatggaatcctttccgccggatatgcagacagccaccttgtcgccgtcttttatcatctcataatcctgaagccccttcacaaaggggcgccatatttccctgcggaactgttttatgatgctccgctctatatttacatggggtgcttcctgtttcatgtgccgtgtgtcttctcctgggtaggttatttttccggattgggccgtcagccgggctcatgtccgggcatcttttaaggcgcccttaaggaattcaatctccttctccatctgctccatccgccgtttcattgtctcgtattcctccagcgtcaggcttttctttacctttggtatggtaacgccatcctttttgattggacgggcaggtatgcccacagcggtcacattatcctccagcggcttcagcagaacggcattggccgcaatggagcagttatcgcccacctcaaaagcgcccagaatcttggcgcccgcgcctaccatcacattattgcccagagtgggatggcgtttgcctttcttggttcccacgccgcccagggtaactccctggtaaatggtacagttatctcccacaaccgtggtctcgccgataaccactccgcatccatggtcaatcaggatgccgtggcccagctgggcgccggggtgaatctcgatgagggtgaaaaacctggcaatctgggaaatcagcctggcaacaaaaaacatcctgtgcttatagaaccagtgggcaaaccggtgccatataagggcatggactccctggtacagaagaagtacctccagggcattgcgggcagcggggtcacgttcctgtacggcctttatgtcaagccatatgtccttgaatatcatatttactccagcctttctttaacaagttaacacaatgctacggtaatacgacattttcctaaaaaggttaaatatcgtatagtatagcatatgatattcaaattaaaaagagctttttacactttggggcctgtttcataactcttttcaggcttttgcctcccccttgccccgcccatgctactggaataccacaggattttccagatactctgtcctgattacaatatatggaaatgactgttccgtaccggcattctcccccttttcggggccctttaactctgtattgaccacaatggagttgtcagtcagatagagctcattgacgctgatgctgtagccgcctgtgggctgtacgccgtatcccaccgctatgtacagattctgctcatcgctgtatgtgagcttaaacgactgctgctgtttctcggcaatcagattcttaagctcatccggcacatccatatcacccaccactgagaaatccaggtccctgaccttatccccgctgtccttagacgcggagcagccggccagccacagagtcatggcaaacagcatcatgagcccaaggtacactttacccttaatagttcctttcatgttaaaacctcccggaatatatgatacaattactatcaatatattccgggaggccctgattatgcgtttaaacgcatgtttgcgcatattcagaccttataatacccaaaccgctgttatacgattttccgaatccatccctcaggcgcttcgatggttcccatctgaatgcctgtaagagtatcatacagcttctttgtaacaggtcccatggcgtccatgccgcttgggaagcagatttcccttccatggtccacaatcttgcccacaggggagataacggctgctgttccgcacagtccgcactctgcgaaatcgcccagttcagaaagcttcacaggcctctgggtcaccttaaggcccagataatgctctgccacgtgcacaagggagcgcctggtaatggatgggaggatggaatcagacttaggcgtcaccacctcgccgtcctttgtgacaaacaggaaattggctccccccgtctcctcaatataggtcctggtaccgggatccaggaacacgttctcgtcatatcccgctgcatgggctgtgacagaagcgtgaaggctcatggcgtagttcagtccggcctttacgtggccggtgccgttgggcgccgcccggtcaaagtcgctgacgcaaagggtcagaggttttgctcctcccttaaagtaaggccctacaggcgttccaaaaagcctgaactgatactcctgggaaggcttaacaccgatgacaggacctgaggcaaacatatagggcctgaggtaaagggtggctccgcttccgtacggaggtacccatgctgcgttggccttcaccacctggtccactgcctccagaaatctctccttggggaagggcggcatctccagcctcctggcggaatccatcatacgctccgcattcaggtcaggacggaatgtgacaatgcttccatcctcagtggtataagccttaagtccctcaaaaatctcctggcagtactgaaggatgcccgcgcattcattaatcaccacattggggtcagaggtcatcgctcccccgtcccatgctccgtctttataattcgccacatagcgcttgtccgtcggcatataggaaaatccgatatttccccagtccaggtctttcttttccatagtctgttcctccattcgggtagatataagatgtattttgaacacaattataatcgtattaatcctcaaaatcaatgggttccctgcaaatatactatacaattcctgcatatcagccataacctcggccggaattcatacatgcataaacgccctcaggccgcattgcgaaaccagcaaaactgtgttaagttataaaataggaataaacgaacacaaggagatgtgcatacatggccaagaaaaatgcccgcaacacccgggggaagattgtaaacgcagcatggaagctgttttatgaacagggatatgaagataccacggtggaggaaatcattgagctctcccagacatccaagggctcattttaccactatttcgacggaaaggatgctctcctcagtaccctgagcctgctctttgatgaaaaatacgaagaactcatggatactcttacgcccaagatgtcagccatggacaaacttctctttctaaacagcgagctcttcggcatgattgagaacagcatatccctggaccttctggcccgcctgctctccactcagctggtcaccaccggtgaaaagcacctgctggatcacaaccgcacctactataaactgctccgcaggatcatcgcccatggccaggaatccggggagctgaacgcagaaaccagcgtcaatgaaatggtcaagctttacgccctgtccgaacgcgccctgttatacgactggtgtctgtgcgccggcgaatattccctgcgcaggtacagcgcctcagtcatgcccgcgttcctaagccatttcctgcccgggcggggatgattgcggcagtaccctactgccatactgccactgctatactgccgctgccatcaccatattcagtcccatctccggccccggccttaaacggccgggaccgcgttctctatatgtctaaatatttcttctcatatatattccaattatcgtctagaatttttttcttataaatacgttgttttattcatattttataataattattctagtatgtagtctatacttcgttctgtattgcgttctcctcatcctcatgctataatgtcagcattatgtcggttttccgcaaaggaacacataacaggagggtaaaatgagtactggacaaataggaatcctggcagccatcaccgtgtatctggcggccatggtatatgtaggtttttatttcagcaaaaagggcggcggtgattctgccgacgaattctatctgggaggccgcaaactgggcgcactggtaactgccatgagcgccgaggcttcggatatgagcagctggcttctcatgggcctgccgggagttgcatacctgaccggcatcgcggatgcgggctggaccgccattggtctggccgtgggtacatatctcaactggctgattgttgccaggcgcctgcgccgttattccgttgcatgcggggccatcaccatacccgactttttctcccgccgctaccgggatgacaggaacatactgatgtgcattgccgccatcgtaatcctgattttctttattccctataccgcgtcgggctttaaggcggtgggaaccctgttcaacagcctgttcggcgtaaattaccatgtggcaatgatcgcaggcgctgtggtcatcatcggatacacagtcatgggagggtttatggcagtgtccaccacggacctgattcagagtattgtcatgagcattgcgctggttatcattgtattctttggcatccaagttgcaggcggctggaatgccgtggctgacaacgcccgttccctggcaggataccttagcatgacccatgtccacaacatggctgacaacacagcgtccccttatggtattataaccatactgtctaccatggcatggggattggggtattttggaatgccccatatccttcttcgcttcatggccatcagccatgaggataagcttaagacgtcacggcgtattgcctccatttgggttgtcatctccatgtttgtagccatcctgatcggcatcatcggaaacggcgcctctgtggcaggagggattcccatgttctcatccagctctgaatccgagaccgtaatcatccgtctggcggatttgctgggacgccacggaatcctgctgtccgttgtggcaggagtggtgctggcaggaatcctggcctgtaccatgtccacggccgactcccagctgctgacagccgcgtcaggcgtgtcccagaacctgctccaggatttcctgaagattaaaatggatacaaaagcgtccatgacagcggcccgtatcaccgtggttggcattgccctggtagccatccttctggcctggaatcccgacagctccgtatttaccattgtctcctttgcctgggccggtttcggcgcgtccttcgggccggtgatgctctttgccctgttctggaagcgcagcaatctgaagggcgccctggcaggcatgatttccggaggcgtcatggtgtttgtatggaaatacggcgtgcgccccttaggcggcgcctggaacatctatgaactgcttcccgccttcatcgtggcctgcattgccattgtggccgtgtcgcttatgacagaagctccatccgtggaaatctgcgatgagtatgattccgtgggaagatagggctgaatcaaataccaaaaccgcaattttcagataagactgtttccatctgaaaactgcggtttttcattttcctattggcttctcatttgcggcttatccgcctggtacaggcttctctcccgtacgttcttactcctcctgcttgctgcagattgccagcctgtgctggtacttctccctggtagccagccctccccggatatggcgctctgacttattcacatccagcacgattctggcctgggccgccaaggtcggattgatgtgctcaagcctgtcagttacatccttatgtaccgtggatttgcttattccaaacttcttcgccgtctgccttaccgtggcattgtggtctatgatgtaattggcgatggctaccgcacgttcttcaatatactccttcaaaatgagtctcctgaggatttttttacatcatatgcagaaaatcccgggattagcacaccctgtacggctattgagggaaatattttatcttgttcctgaatattttttatttatctgcgccaagctcctgtcccaatgatattgtccagcccgtcttcatccataccggaaaaatacgcttctacctctttctcatatttcttcatggcctgggacactcctttctctgccttcttgttcccgcttaccttgtagagcagttccgccgccatatagacaatatcattctcatctgtacaggctccgtcctccgatatgtactgcctcacgatctgctccgctccctcaaaatcgcccacgccggtcctggcataaatcagtgccgtagcccccataatattgccgctctcctttttataccaatcctcacaaaactccagggcctctttcttttttccttccgccccaaaagatgatgctatataaaagcggaaatcagacggcttttcctcttcccacgaaaacatgcttataagctccccgcagattctgcgaatcttctcgtactgttttcccgtatccagataatccagatagtcctgcagccagccgcatacatcgtactcataatccgtcccgtcatccagcaggtacaattccttcgcgtaattgctgttttggcttctgccttcacggacaatctcaaccaatacttcatatgccttgtcccaggcatcctcatttgttacatctcccgccagataagtataacacttcgatgtcaggcgttcaaatttttccataagcctttcataaataaagtcctccttagcataagtactgaaatcacagttttcttcatcataccatatcttgtctctttctcctactcccaactttattatgtccatatccttccaacagaaaaatgctgtttctgccgcgaaaacgcgaagaaacagcatatcccgattctcctttgcccttattccctgcctttatttcttactcctaccccttacttcccatcaatatctcaaccgtttccttaagtgtctccgcttcccccacattacccgggaatatgacatagggtatccccgggaaacggctctcagcacccgtacgccacaccggtataccagggcgtacctgccccaaaacagtggccttttttaccttaagggcctttgttcccacatcgctggatgtgattcccccttttgccaccacaaaccccggcgtcaccttaagtccgcccaccagggactggactgcgtcagatatctttacagaccgcgtaagggctgcctccgggctgtcattttccagagacaaaagctttctcttggtgtataccgccacggtaacgccctgctccaacagttcttcctccctgcggacaaccgattgaatctcttcctgaaatttttcctcatccagcaccagatccgaattaaattccaggaaccggattccgggcactgccttcaattcctccagctggctggttgtctttttagtatgggagccaaccacaataatgccgcctgtcttcctgtctccagccaccatctcttccctggaaagcagcggtctgtcactgaccgccccaaactccttcacaaagcccgcggccgtgcggaacataaacctgcgtccctgcttcatggcatcataaagggcaatgcagaacaccttcaggtcacaggcatccactgcgtttaccacgattttcccaaaatcatggagcgccagtagtttatccgtaatggcggaataatccaggctgcgcagctcctccagggaaatatccagcacttcccgggccggatatctgcctcctgtcttttcctccacgtaatcctttaaattggagcaatggtatccaaaggtcttatcttgtgcaaattcagtctcccccgcagggacaagctcatttccatacttcacataatgcacatttccaatggtaaagcgcccgccctccttaaaatagggacaaatgatttccccgtcaacagccctgttcctgtgcttttcctctgcccgggccagcagctctgtctccagaggataatgccccctcagggtggaatctcccctgctgacaatcacataatcaattcctgtttcctccgacacctttgccgcggtttccccgatttccaggtgggccctggtggtgtgttccacggtaaatcccctggaatttgtcagtatgtaaaacagctttcccttctcttcaaagcctctcttaatgctgtcataggaccaatctgtgtacacggaaatatcatggaccgtctgcactccggtggggtcatcgtccagtactatgattttatgtctgtcttcccggcatttttcttccaacagggcctgcacggctgctatatccactttggggtaccggtctaatacagatgcattcaacatggtctgtttctcctctctctcttatcttccaatgcccagcagagccctggcctcctcaggccgcatgggctctttatccatggcccggagaagcttcacagtcttttccacaaggggagcattggaggtcacctgggtctgtgggttcagataattgctgtcctcaaatccaatcctcacggtcctggcccccatgcccacggcgccggccagcagcgaaaaatcctttctgtgggcctgtgtgatgccccacatggcattggaaggaatcatctgtatcatggctgccagcgcctgaggcgttgccggggcttccccctcatggcccagcacgatactgaacagaaccgggtccgcgaagtcatactttttcatcagctgcgtcatggtccatgtgtggcctatctcaaaggtctccacctccggagtctttttctgcttcaggatttcctggatacagtactccacgtcgccgatgggattacagtacacatccctacccagattcgtggatcccacattcagggagcaggcttccaccatctcagaatacagaggagcgcagcgctcctgtatattcaggtcagacactccgcccgtggacacttcgatgatgatatccgaatcccggcgaatcatggccagcgtctcctccagcaaggacatatccggcgtcagacggccttccctgtcccttacatggaggtgcaccatggcagccccttccttataacactcatacacatcctccgctatcttctccggtataatgaccttgtccgctgccgctaccggagcaacgtttaccagaaccttattatctgtacatgtcatttatctaatctccttttttacaatttcttatgtcctgccatttacgaaaacagaacctgtgcaatcagcaccagcggttcttcccctgcctgagatatttcatgggtatctcctggctgggccgcgatgatatccccctcttccaggtattgctcctgcccgttaatggtgtgcagggcctgtccctttacaatgaccattgtctccatctcattttcgtgggtatgagtaccgattgatactccccggttcagggtatggcgcacataggcccttccctttccccgcatttcctctggtcccagaagaagcttctccatccagaccgttccctttccgcccatacagccctctataggcgttttctccaaatcacattttcttctatatatcataatcatcctccttccaatcccaaagaaccggggaccgcgcccctggatagtctgttgtaacaaaaaatggctgccgcatccttgccccggacatatgatctgtcctgtacaaaacgtcatgcagcaaccaccttcatgtgccgcgcccttgtctgccaggcgcggcacatcgctattcatctttttacttttgcccaatactggtaatgttcctctacaatcgcatatatgccggccgaatccctgtcctgcaaaagctttacgattctgcggtgaaggtccaggaagttttccacttccccgtccaggaatatccggtctatggttgccatacgggaacggcgggtgattttgtccacatagctgcagatggactgaagcatcacattttctgtgattcccacaatggccatatggaactgcacatccgcctcatagaggctgcgcgcctggggcttctccatatatgcctggtattccagctcctccatggccttctctatggcttccatctgagtctgctccagggatttggacttcagtttatccacagccagctgaagaaggcccacgtcaatcacctttctcagctccacaatctggctggtggagtccttctgcaaaataataccgtaaagcaccggataaatcatcctgctgtcatattcctggctaacaaaggtgccctccgcccgcttgatatgtaccacgccatatgcctctaacaccttaatggcttcccggaccgaatttcttccaacccccattgactccgacaattctgcttctgtagggatcttatcccctgggtttagctctccatttatgatagcgttggtaatgttgtctacaattttattaactactgactgtcctccgacaggttcctttaaaaaactggtcttttccatgctgaacctccttgctgtgaacacttatctataagtatacatcatatgttggttcagcgcaatcttctgttccctgcctatgaaggaatcaggcacagggacaaggccggtatgtatgtgatgcacagcagagccagaagggacattagaagcagcggcaccattctccggcatatttcctcaaacttaacctttccgatatcagccgcgacatacagattgggtcctacaggaggcgttacctggccaatggacaggttcaataccaggatgacacccagctgaatcatgttgatatccagggccttggcaatgggcatgataatgggaaccaggatatagagagcgctggtgttatccatgacgcagccggcgcacaggaatacgatgttgatgataaacagcatgatgtacctgttgtctgtaagggccagggccatttccgtaagggaggccgcaatcccctgctgggtcagaacccaggagaaaatgcctgcgttcatgatgatgagaagaatcatgcccgttgtcttggcagtggagaacagtgtctccttaagctctgtcagacgcagctccttatagatgaagattcccacaatcaggctgtaaacaacggcaaccgccgctgcctccgtaggtgtaaaaagtcccgaataaatacctcccagaacgatgaccgggcttaaaagtccccatattgtatccaggaacagcctgccgatttcctttaaggacgccctctgggtatcccccttccatccgttcttcttagactttatgaacaccataatacagagcatgaagccaaatataagtcccggtacaatacctgacaggaacaaatcgccgatggattcccctgtaatcatgccatagataatgaatgtaatactgggaggaataaccgttcccagagagcccgatatcgcggaaagggcgctggaaaatcctgcgtcgtatccctgggccgccatggccggaatcagaatggatcccatggctgcaacggttgctgtgccggatccggagatggccgcaaagaacagggctgccaccactgccacataacccagtccgccgtggaccggtccgatgatgctgtccgccaggttgataaggcgtttggaaatacctcccttgtccataattgcgcctgcaaggacgaaaagcggtatggtcagaagggaaaacttctgaacggtggcctgcatcatggatggaataacacccagcggagcgcctgaaaatatcagggtcagcgcgctggacacgcccaggacaatggcaatgggaatgccgaatccaatcatcactgccatggaaccaaataaaatcgctgccggcatattagtttccctcctttgctaatctgatttcatactgtaccatacgggcgatggagaaaaccgctgacaaaggaatggcgattccgatggtccactgaggcatctccagaacacctgtaagcaaatggtagtgatactgcctgtaaaccatctgcgccccccatataatccagattccatagttggcagagcataaaagaagcctgcagatacggtaaaccttacgccccgttccggtgaatttatcagtcaggtaattaaagcccatgtgggaatcggtcttaaacacactggccgcggccaggcagcagacccacacaaacatagtggtcaccagctcctgagtaaatgacatgttgaaccatgtaatctttcttgagaacacattcataaatgtgacaaaggtcataacaagcaatgccgctgaacagagatattcctcaagattctcccagaaatcctttaaaaatcctttttccttcataacacccctcctaattcttataaccgccggtaaacaagtcgattacatcctgtcccacagacttggcataatcatcatagattccggcgcaggccttctggaactcagccttctgctcctctgtcagctccgtgatgacggtgccgccatccttcagcttctggatgatgacagcctcgttgtcagccagataatcatttccccagtccagggcttctgccgcgcactcctttaccagttcccggtcctcaggggacagcctgtccatggtcttacggctcatgacccagatggtggtatcccttaccccgtcccacagggtaacgtactgctggacctccgcgaatttggaagagtcaaataccgcgatgggattctcctgcccgtctatggtcttctgctggagggaggtgtacacctctgagaaatccatggcagtgggattggccccaaagtaattcctgtacaggtcaatgaaaatattggcgcccggcacacggatattcatgccctttaaatcctcaggctttgtgatctcctttttgctgttggatatctgcctggaaccggcgttattgatacccagcatttccatctccaggtcattgcaccagccgtttaccacctcatggaccttatcgctgtggcagaacgccagcaggtcgtctgaattagggaacagaaacggaagccagaaggaataaaacttcttatcataattggcaatgtttggcggtgcgcaggaatggatgtcaatgttgccggcctgtaccagctcaatggccttagtcaagtctccccctgacagtccgcagttggaataaatattgacttcaatccttccgccgcttttctcctccaccagcttcttaaactcctgggcagtcaggtcactgatggacccaggactctgtgtatgggtaaaatgaagcacgaccttcttatccccggcagaaccgcaggccgtcatggacaataccatggccgcagcgcatatgacggctgccgcctttcttaaccttttaaacatacttccctctcccttcgttgcgtgcacccggcctatgtgcttcaagtgcctgtgcgccatatgttctttattacattagtcccttcttaacaagtgcgtccttcagtgcagcagcgccgaatctcgggctggataatactgctttaccatacttttcatgaatatactcctcacagtaggccatggagccctgggcaaagagaatcacatccaccttgtccgcaatggttcccgcgtactcactcataaggtccttaaactgttcctggtccaggccaaagccgccgtccaccagcgcgtccaccagctccacctggcggttcatctccctggcaacccttaagatggtgttcttcgtgggattcagtgtggtgggaagagttgccatgaccccgattctctttccctgtctcactgcttcccggcacatctcctcatccacacgcacaatgggaattcccgtgtatctggctatatcctgggcagcgtccgccacctcgcctacggaggaacaaagatttaaaatagcgtccgctccttctgaaacagctgtcatatacatgcccaccagcctggccgccaaaggagccgtcacataacctgcgtccctgacctctgccagaatggaaggatcctggtaactggccacctcagtctcccggggaaggacatcccccacttccttttctactaattcaatcaactctggtgtggtgcttgtgtaaaccaatgctactttcatgaattatcctcctgttatacttccattataaccaacgttcaacatcctatgttttatgtttaaaatatactacatcctacgttggttgtaaattgtgaaaatgcacatgattataacacctcttttatgcagttttacttattaaaaatgcaaaaaacatggaaagaacctgcaaatcaggatctcttccatgttttttcaacctacaatgtgtttgccaatcatgcattaagatattttttaagcactgctctcactgctcccggccctgcggcctcctccctgaacatttcctctaccgtctctccgattcctgcctcataaaggtcgattccaaaaatattagcattggacaggatactctttaactgtcccctgtatgtttccggccggcctaccacaattccctccagagcttttgtcagctccggcaccatgggatccgccgagagttcaaatttctttccctcatcatccacagccagaaggtacctgcaccagccggcaatggcaagcggaatagccgtaagcttcccggcatctccatacttcgacacataagccttgatggtctctccatagcgaattcctaccttctgggacgtgtctgtggcaatcctttgcggcgtgtcaggcatgaaggggttcggtatcctcacatctataacctcgttcacaaaattctccggggatagtatacccggatcagtcacaaccggcatcccctctccgggaccaatcaggcgcaccagtttattcagcagcggatccttcatttcatccgcaatcagggtatatcccaatacacatccatatactgccagggcggtatgaagcggattcagacatgtggtaaccttcattcgttccaccttattgaccgtatcccgatccgtcatatagacccctgccttctccagagccggccttccattggggaaacagtcttctatgacaaggtactggggaccctctgcatttacaaagggcgcaatatacgtgtttctggaagtaatgaccggagtcatatcttccactcctgagttctccaattcagccagaacggagtcagccgggcgcggcgtgattttatcaatcatggaccacggaaaggatacctgctcgcgatcggacaaatatgcgataaacccgtcctccacatactctctcctgttccattcctttgccatggtggtaacggattcctgaagcttttctccgttgtgggaacaattgtccatggataccactgccagaggcgcttttccggctttatatctttcgtataaaaggctgcacatgacagccatggccgatatggcattttccggcccattgtcaatatccgcctggataaatggaaaatatgctccatccgccctctttaaagcgtatcccttttccgtaatggtaaaagaagcaatctgaagccccggatcagcaaaaatatccttcagccgcttccagtcccgcgtctccccagcctgggctttcagggcctctgtaagagagccgatgaccttcttgtccgtggaaccgtccgccttcaacgcaacccccagcacaaggttgtcatatggcttgtaaattttttcgatgacgtcaaagtcaaaggtttcggcacatgtaattcctttgccgctcaccccttctgaaatcagcacatccgctatgccgccgataaaaatgcggaaaatgttgcccgcaccaaagtgcacccacacaggtttttcgcgagtcgcttctgccacagcctccacatcataggaagggaggctgatgccggcctcctcccacaccttcctgtccttaattccttccaatgtcagcttcatgagtatatcctcctttctgttatttccctaagaaaaatgcagccggtactgttaccaaaggcgggaacagtatcaaaagaagaaggatgataacctccgccagcagaaacggccacactgcctttacgatcctctccatattaatctttccggcactgcacgccacattcagcacagtccctacaggaggagtaagaagtcccataacagtattcaatatgaacaccactccgaaatatactacgtcaatgcctgctgccctaaccgccggcagcagaaccggggtcaatatcataatagtgggtgtcacgtccatagatgtgcctaccagcaggacaattcctgcaataaccaacataagaagggttggatgggctataaatggagccaggattcctgtcacgatagacggtatatttcccactgtcataagccaggaggataccatggctgcagcggccaggaacataatcacggaagaggacttagccgcggataccaaacagtccatcagcatggataacttcagttccctgtacacaaacagtcctataatcagggcatacactgctgttatgactcctgcctctgtaggcgtaaacttaccgctcctcaatccaaccaaaatgaatacgggaagaagcagagcccagaatccgtctgtcagggattttactacctgcctccggctctgcctgggagctgttggcagtttatccttcttagcaacgaaaaaccacaaaatgcacagtgaagcagacaggtagactgccggtgctatgcctgccataaagaggcttgtcactgatacactggcctgtacaccgaagataatcatgggaacggagggcggcatgataggagataaaatattacctgctgcgataagcccggtgctcttatccctgttatacccggcccttaccatcatagggatgaggatagctccaagcgcagccgtggatgccacggcagacccaaccatgctggcaaagagaaggatggccagaatggatacatatccaagtccgcctcttacgtgtcctaccatagcattggcggcattgacaatacgtttggtaatccctcccctgttcataaattctcctgccaatatgaagaaaggaactgccatcatggaaaatgaatcagcacctgagaacaggttctgggacagaatctgagaattaaagccgttcatgaacagcatcatgcagacgccgctgaacaataatgaaaaacaaatgggcaggccgattgccatggacccaaccagtgatgccagaaatacaaccaaagtcatgtttatttacctccctgctcattaagacgcttcacatattcttcatcagacagttcctccgcctgttccattgcctcggtggcaatatcatcgtcatcattgtgcatggtaacgatgtccgttatctcctcaggatgcttcagggcatacactatattagtggccgccaggatggcaatagaaataccggttatgatgcctccaaagtaaagtacagaatagggaataccaagagctgcggtcctggactgtgtattctggagaaccatcttaaatgccccatgaaccagaatgcacatgatagcagcaatcaggagcctggacacaagatacaaggccagctgaacctttgggctgaccctggacagcagggtatccactcccaaatgtgcattggaatgcatggcgctgatagcgccaatatatgtaacatatacaaaaaggtatcttgccagctcttccgaccatgtaagtccggagttaaaaaaagtcctcagtaccacgttcaggaatacaaacagcaccataaggccggtcagaatccctgtaaagcagtcaatcgcgtgaaacagcttatcaattaatcggttcatagtcctctccttacttgatttcttcaatcatttttctaatatctccggcccattggtacttttcgtccagataatcatatacaggctgtatctttaccttcatggcctcccggtcctcatcagacaggtctgtaactgtcagaccgttatcctccataaattgcttatcgccagccagctgagctatgtatagatcccatgcgtagtccgatgtctcatctgccacctgacgaaatatctccctgtcagcctcatctatactgtcccagaactggtcccctgcaaaaagctccaaagatgccactatgtgattggtatcatagatataatcctgaacctcataccatccttcattcttaaccgttgacagaggattgtcctgaccatccgcaactccttgttccagagccgtaaacacctctcccatatccatgatgaccacgttggctcccaggctctcagccagcttcacatgaattggattattcggcatcctcagcttctgtcccttgaaatcatccagccccgccagcttcttattagaagaaaatgcccttgctccgtttgggaaccacgacatcagagtcaccggctgctctgcctccagctcttctgcaatataacttcccagctgcccctggtaacatcttctggcatgctccacatcccgaaacacaaatggaaaatcagggatagccattacaggcgtctcagaccacataggagtccccaccacacacatctcgatgattccgcttttggtatagtcgtaggtgaccttctcacttcccagtactccggagtcatatatctggatatcatattttccctctgtcagttcctccagtcttggtttaaatacctccctcatcgccatggaagccggtgtctggctggaaacgcagactgcgattttcaccaattttcctttattcatacttccagcctgaccgccgcagcccgccagggtacccattactgctatagaagtaaagatacacaatccatgcttcacaaacttagcaagcttcataaatgaaaccctcctgaatataattaattaaagtttccgcacacgtcatttgataattatactagtaattctgattttgcgggatacgatatcttttgtgtatcgagtccttacttgtatggtagtatataaggcaaattcttgcaatatgtaaatttgtccaatatttatctttaattattgtgcatattttatatcttaattctatttcaacaaagtacttgacattttaccggcgctaaactagtatacaagtatgtaagttcttcacacacgtcaatcaaaaaggagaataagcagctatgaaagcagtacagattttaaaacccaagtcattacatataattgatcttgaaaaaccatccgtaactaaagataacaatgtattagtacgtatgacagccgccggtatctgtggttcagatatgggcatctaccacggcacaaatgcggctgcagcctaccccagaatcatcggacatgagatggtcggcgtagtagagaatacattttcttctgtcacctctctgcgtccgggtgatcgtgttattgtcaatcaggttacaagctgcggtcactgttatccctgccgcataggaagagggaatgtctgcgacagcctggctgtaaggggcgtgcatatcgacggaggataccaggaatatatggctgtgccgcaggaggactgctatccgcttcctgactccatctcagatacggacgccgtgatgatcgaacctgccaccattgccatccagtcctgcaccagagcggagcttaaaagggatgatatgcttcttatttttggatgcggcgctttagggagctccatcttaaaaattgcccggctgctctgcgactatatcatagtagcagatgtggtggatgagaaattagaaggagcgaaatctgcaggagccgcccacaccatcaatgtattaaaagaggatttggaggagaaggtaagggaatacacacacgggcacggcgccaccgtatccattgacgcggtctgcggaagtgattccctgattcgcctgctgaaagccaccggcaacgcaggccgggtcatcactatgggcttttccacatcccctactgaaatcaaccagttcctcatcacctcaaaggaactggatgtacggggttcccgccttcagaacaagatgtttggcagagccattgaattaatcaacgaaggaaaacttgacctgacaggaagcgtttcccacaccttccccctgctaaaagcccaggaggcctttgatttcgttgactcccacgatccatccatccgcaaggtggttctgacttttggcttttagcagtgtcctgaataaaaattaaaatgacagttttcaactaaataatgatagcctatccgttctttcggtagtatactagtacataatatatagtttgctggtatataaggagatttaagaaacaaggaggaacatatgaaagtactggacaggctgtctgctgaaaatgcccgcacctatgccctgagggttcttcaatataatatcattaatctggaactggtaccgggaagcgcggtgagcgagaatgagctttccgccgttctgcatctctcccgcactccggtacgtgaggctctcattgaactgagcaaagtaggtttggtggagatccagcctcaaagaggaagttatattgctaagattgactatgaactgattgaagaatcccggttcatgcgcctggtgctggagaacgccgtgttaaagctggcctgcgaaggtatttctcaggaatacatggacaaactgaaagaaaatctcaggatggaggataatatactgaaagaggagaaagcagaacggctctttgagctggataacgagttccacaaacttctcttccattccgttgacaaggcacgcacttatgaaattatccgtgcccagatggtacacttcgaccgtctcagggctctttcgctaaaaaccgttaagcctgataagaccgtggaggaccacgaaaatattctctatgccattgagcgccgcgacgcagagctggcagagatgttaatgacccggcatttgacccgccacagggtggagaagtcggagctggtaaaggcatatcctgaatactttgtaaaataaagaagaattctccccagaagatacggatgaaatataccggtatctcctggggatatttttattctcctgctccctgctattacatccaatcgctgcaaagtctttataatgtaatagaacattatattatattcttattgactatttttatataacgttatataatgtatttatcacacaaataaaaactacatatctctcaaaggaggccctatttttatggaactaaaaaaaattatcgaggaaatcaaagcagagcgcccggaaatcacctcagtcatctttgtaggatgcggcgcatctcaggcagagctttatccggccaagtacttcttagagggcaatgcaaaaaagctgaggaccagtctttacacagccaatgaatttgtacatgccactcctgcctgcgtgggcaaagaaagcattgtcattacctgctcccttggaggcaatacccccgagacagtggaagcctccaaaaaagccatgaatacgggcgctaaggtaattgccatcacacatacccccggttcaccactggctaacagcgcacactatgtggtactgcacggatttgagaagaattatgcggccaaactggaaaaaatgaccttctgtctgcagctggcagcagaaattctcaaccagtatgaagggtacgagcattatgaagatatgataaccggattcggcaagatctttgacttaatagaagacgcagtttccttcgcagttccttccgcaaagaagtttgcagaaaactacaaggatgctcctgttatttacgttatgagctccggagctacccatatggtggcctatgccttctccatctgcctcctaatggaaatgcagtggatcaattcaggctccttccatgacggtgaatttttccatggtccttttgaaatcgtagataaggatgcgcccttccttctgctgatgaacgacggcagtaccagagcattggattccagagccctggacttcctgaaccgcttccaggccaaaaccaccctgattgacgcgaaggattttggattagggtccgtaataccatccacggtcaaggattacttcaacccgatgctgattaccgccgtactgcggatatatgcagagcagctggcaatcctcaggaatcatcctttgacccagagaagatacatgtggaaactggaatactaattatctttcacatcggataggggagattttaacctccccttccacaccacgtagcgtaccgttcggtactacgcggttcaatagtttactcggactttcagatagtgggcagtcatatcgggataaccaagtctgtccactatgattcttttggtgagtgccgagttgagcattcccgccgctctccacactccctttcggcagttcgccatctcatgcaccttccactctggtaaatgtaacgcccgcaacattttatatcttgtgcgtaccttcttccattgtttccagtacaccgctcggattctgtggcgcagccactcatccgtctgttccatcaggcttttcatgtctgcatatcgataatagttaatccatccccttgcatagcttcggagtttttcttccctctcctgattgctccatttgttccctctggttgtcagctcccgtatccggttcttcatttttgccaccgacttcgggtgtatcctcatgcggcatttccctttatgccggtaaaagccgtagcccaggtattttatcttgctgacgtggctcactgtcgttttctgaagattgactttcagaaacagttttcctgtgatgaatggcacaatgttttccattgtcctctctgcgcttttcctgcttttgcacagaatcaggcagtcatccgcatacctcacatacttgtgtcccctgcgctccagttccttgtccaactcattcagcatgacatttccacataagggacttagcgggcctccctgcggcacgccctcggtcgttgcgtgaaatcctccgtcctccattactccggctttcaggtacttgtgtatcagcgagattaccctcccgtccttcaccgtcctcgacagcacctctatcagcttgctgtggttcaccgtgtcaaagtaggattgtaaatccatgctgaccacgtagacatatccttcgttgatatatttcctacatctttccagtgcgtcatgcgcccctctgccgggacggaatccgatgctgttgtcagagaactgttcttcatataagggcgtcagttcctgtgcgattgcctgttggattaccctgtctaccactgtgggtatccccagtttccttgtttttcctttctcctctttgggtatttctacccttcggactgggtttggcttgtatttgccttccctcacctgctcgaccaattcggactggtgttctctcaggtagggtagaagttcatccacctgcattccgtcaatcccaccaacgcctttgttcgttttgaccttcttataggcggcatttagattgtcgcttctaagaatcgtatctagcaggttgtccgtccgaaagtccgtgttggtgtcggggttcccggtaatcctttcatgggcgtactctcctgtttcccttccctgttccgcaggtatctctcgcaggtagtcctcaatatgaagttgtctgtacttaattccatgtccggtttccatttggtaacgacacctcctactgttcagtccttcccggtgcgtttgcgaccgcccggtactatgacctctgctgacttctcacggcaagctttactccgtgacagcgaatgttttatcgccactttcacgtccgtgagacctccccgggtactcacacgttctttcccacttatacctgccccgtttactgctggcgttccgtgcagttattggactttagtttgttaggcaacctcatccacgcttcacagcctatccggacaacttttacaggccagtggtttgcctccggcttccttcagaccccacctcacgatgacgcccttgccattggctgcacccttcccactgccgggcgggtcagggactttcacccgttagaacgtgcgcccgccgggcgcacctaaaagggcttccgtcagctgatgctttgccggaggcccttcttatggaggtaggactatgtctatatgactgtcatttccaaaacggaaccaatgagatagtcaaagggccattatctagcccttaaccgcaccagaggtaagacctcgcacaaactgtttctgcatacatagatacagtatgatcattggaagggatgcaatggtgatgcctgcaagcattaccacataatctgatctcatatcgcctttaaacgtcatcaaaccgataggaatggtcataatactcttactctccaggaacacattggcaaacagaaactcgttccacacgaaattcaggttcacaatggcgcaggatgcaaaaatcggcttgctgatagggactataatttttctgaatatctgaaagctgttgtagccgtcaatgactgccgcttcctccagttcctttggtatacacataaaataagcacgcatcagaaatacagtaaatggtatcctgaatgccacatacggcaggataaccgcccaatacgtattatacaggtgtgcggcctgaagtatcttatacagaggaaccagtgccacctgctccgagagggccatgccccctaatgtaatcaggaatatcagatttccgaatctgctgttgaatctggttatgccataggccagcagggagcttagaaacagaatggatataagggaaatggagcttacaatgacagaatttccaaagtacttgtaaagtcctttattccatgccgatatatagttggcaaactgtaccttcgcaggcagcgccagagaatcggtaaacagttccacattggtcttcagcgaattcataatcagccaggctgccggcagtataatcacaagcaccaacagtatgaagaatatattcaaaagtacggttactgctgttcgtttcttcatatgccgctcctttctacacttcgccagacctggtgatcttcatctgaatcagtgacagcaccatggttatcataaatataaatacaccggttacagccgccattcccaagtcgtcgtgaaggaatgcgttctgataaaggaacacccccaatacctgcgtactgtttcctggccctcctcccgtggtggaatatacctcggtaaacaacttgaacgctccaattaccgtaatgactgagcataccagaagctgctcctttgcaagaggcagtacgatatggagcgcgcgttttacaggccccgcgccatcaatagacgctgcctcaatataatcattgggcacattctgtatggccactaccatgagaagagtgatatatccggtaaactgccactgactcatggctatgatacagtatatggcaatcttggaatcccccagccatgaacgagccatatccccgtgtcctatagctctcaaaaatgagttcagcatgcccaggtccggctgatatatgaaggtaaacagaatacctactgctgtcagtgaaatcagggccggtatataatatatattcctgtacacattacggaaccgtcctgtagccttactctcaagaagaagcgcaagcaatgttccgaaacccacctgaacgacgagggaaataatacagtacagtccgttgttcttcagcatgatagggagggtatccttagtaaaaaaacggatgtaattactgatacccacaaattttgccgaagatgagtaggatgacaagctgaaaaagctgtatacaatattcgttatgaccggtatgtatacaaatacaagtaccataataagaccgggaatcatatacaaatatggagtgaatttcttcgttctcatagcttttacctactttcttatgttgcagggggatgtttccacatccccctatagattactctgacttggtctgcccggatacaagactctgggcttctttagcgactttctgtactcttgccattgcctccgcaggtgtaatatctccatttgtaaggtcggaagctgctgtgagatattcatcacatgttgttgaataaagagcgttgtcaaaccatggtcccatgattttggcttcatttacaaccttatagccgtccagcagtttcgtatcattgactccttctgtcacattttttgatgcgttgaaccagccgatggtctgtgcctgctccctgcctacttccggtcccaagaaccatttcaggaactcgatacattcgtccggatactgtgttttggacgaaaccacaaatccttccggaacgccggttaatatatcaggattgcctggaccttccactacaggaaatttgaacataccgtaatccaggtcggcgttcaggtctgtaatatatggaatctcaatgagttctgcatagtacattgctgacttgcccattgcaaaattggttctggccatgtctgctgctgtaccattcactgcatcgttgcaataaggaatcagctgctgatagcattttaatgcttcttcataaccaggatcggtgaactctccctgggcaggatcaaaatctttctctctcacctcatcgcttacaagcatctggttcaagctgccaatatagtgcgctgccggccacttttcctggtttccataagatatgggagtgataccggccgctttcagcttatcacacacttcaatgagctcattccatgtagccggtgccttcaggccgttctgttcaaatatttgtgtattgtagaagaaaagcttgcagtcaagtctgaatggaataccgtatgtaacaccgtccttcgtatagtttaccagctgggactccatgagagaatccttccactccttatctgcttcaaggtacggggtaagatccataatcaggttttctcttaaaaaccgttccgaaaactcgccgcaccagctaaagaaaatatcaggagcatcattaccgccaaccactaccttaattttttctttgtatggatcattctgggcactctcaactacgatgtcgatatcgggacgcgcctccgcatactcagcaatcttgctttcgataaagccattgaacggctcatcaggaaacctgtggaaaaactttatggtttttctctctcctggtgtctgagcagcctgagcaacacctgtgtcagctcctgcctccgacgaagccggcgcgtccttcttgctgtcaccgccgctgggggtaaatcccgcacaagctgtaagtgacattgccatggttcctgccaacagggcagccgccgctttcttaacaaactttctcataataaactcctttcgcctcttcataatactttttgtataatgctttactcatcctgaaacactttgccaaatccgaatgatccatccttctggcagttgcctgccgagtaaacggctgcgcggtacagactggttctgactgccaaatcctgatagtctgcagctgtcactgttcctctggctcccgatgctgccgggaagtccctggagtccttcatggcatccacataatttatcaggaaacaggtaatgaaggaatctcccgctcccatggtatccaccgcctctaccaaacatggggactgttcgtagagacgcccgtctaccattaccagcgctcccttggaccccctggtagcaataacaatatgtctgcatccgaatttccgaatcagagccatctttttctcaatctcatttctgggcatatcgccgcaggagatactggcacagtcaatatatggcgcgcattgtctcaaatactccttgtctgcactgtccgaaaaatccatggatacaaaggatgatgcctgacggattaacggaagttcatcttccacataactgaagatactggtatgtacaatgtcatagccggctatataagccctgtccattccagtcagctccagaggatgttcctttgataccccgcctttgttggagccgatgaacacccggtccccgtcgtccagacgcaccttagcgtatccgttctctcccggataaaaacggcagtgggagagatccagcccaagaccacggatcgtatcatatacatgggcggcagcctcatcatctccgaacactcccagatagccggcttcaattccgaacatctttgcatagactgcaaaattcaatgcgtttccgccggggtacatggtacggatatgcatatacttatccaccacgttatcgcccaatcccagtactcttaacatgtcctcacctctttgtcaatgtgttttaattatcatgtaatcattatatgacgttatgtatattttgtaaacataaaatgtggccgcaatctgattttcgtataattttcacatctatctcatgccgtttttgtgccttttgccaaaaaagcgaattccagttgcctatacgcagggaatccgctttattagtatatttgccgctcgctgtttacatcaaatcaacacgtcatataacctcttaacactttgtaaaacagagaatgtagggtccactctgtatcttccatctgttatctccagggacaggcccctttcctcaatctgtttcctgacacggcacacatctgtgtacgtcatatcttccaaatgaaaatgtggagctgctctccacagctccacatgctctacgccagccctggcagcgtcatctaagaatttctccagtggataatagccatattggatattcattaccgtcacctgggatttactgattgttatcactctctgtccgccttttctcaagcattaaccatgaccgtcattttatagcggtccggattaatcacacttttacagttgtggacaggatttccctcccgatcatagctgacatccttcacatagagcaggggtttgtcaagatccacgcccaaatacttgtgttcaatctcattggcctggcatattccaatcctcttaatgccattctccataattgtcccattctccgccaatatctgatagagggatcctgtgagatcatggcccaaaaggtatgcgaaacgggccggaaaatgattttcctccagcataacgggaatcccgtcacaggttcgcacccgcacaatcctaatgattttctcatgctcctgaatcttcagttcctctgcgtccaccatggtggcctctgccagttccgcagacaccaactgtgccccggccgtgtttccctccgccagacagctctgagtaaatcccatgaaaccattgatattgcggcaaagctttttctgcgacacaaaggttcctatgccctggcgctttaccagtatctcctcctccaccaataattccacggctttacgcactgttatcctgctgacgtcatactccctgctcagctctatctcagtaggtatcctgtcattttcttttaattctccgttgagtatctgattctggattacctccatcagctgctgatacaaagggacgcttgattccttgttcagttttcccatgattccgcctccattgattatgtctgtatcattattatacgatacatgaccatacatagcttaagtataccattgggaaagtattcgcgcaaccgtttcaaacatcccttttctccttgatttcaatgcatctttggaactgccggcatgctttccgaaggacctggtatgtttagtaatccagtctcctataatatctcctgatggccaaaggatgccgtctgttatgctccagatgggtggataccctctggaaggcagaacgcatgatgattgggcagagcattcccctgaactcatcgctaatccccttaagctcaaaatccttgctgtcaaacacagtcaccttagcgctgatcttgtggacaaaattttccaccctgtccataagcggacgtgtcttatcctcacccttgattaaaattacagaggtatccttgtcaataacctccaatgtcccgtggaagaaattagaggccgatatgggtcttgtacgcatccactgcatctcttccatgatacacataccatagcagacagcccagtcctccagattgccggaaccaaccagatactgaataggttcatcctgatatgctttcgcgtattccgccgctttgacatctgccttcttataaatctccaccacattttcaggcatattcttaagctcctcaaaaaacttcccgtaccgtgggaactggcctgcatgatacatgaagcgcagggtcacggtgtaccagaaatagtatccgccgcctgtggtggttatgagataatctgatttttcatagagcggactgccttccttctccacataccctataaccgttgctccgatttcatgggtcttatccaccgcagccaccacttccttcgtatcaccggaaatactctcaatgactaccaccgaatctttggaaaaatggggattgtccaccacacagaagtccgctgcgttttcgatgaacagcggaatggtagaaccttcttcccttactatgtgggccatctggttggcataaagcacggttcccccaattccgatgtagaaaatatttttatatcctctcctcactacctcatctactgctttctctgttgctcccacaatgccgagtccgtttttgtgctcctgcagaacctttgcctcatcaaaattaaacataacagctcctccttgacgtcatatattgttatgtataacatatcataacattatgcaaaatacaagatgaatttgctcattatgcgtaaaataatatttcaacagggcataaaaacatccccgcctggacatcaaaaaaagagctgcccgtccggacacgtcatcacatgacccgccggaacaaaaacagctctcttatttcaaacctactctaacgcaaacatccccatagcattcagcacatcctgctccatcgcatccactgccgcattagccaaatcatggaaatatttgacttccttctcctccagcagtttcttcactgccttcacgcccgcgttagacatgtaggagaaatagttgattttacggataccgcagcggatcgccctctgggtatccgccgcgctgatgccggatcccccgtgcattaccagcggaagccctgtcaattccttaattttcacaatccggtcaaaatccagctttggcttggtggcatagaatccgtggacggttcccaccgatgcagccagggcgtctattcccgtatcctttacatatctggccgccagctcagggtccgtataagcgtcgctcacatcgttgatggcaaagatttttccctcatggcctgtgacaatgccaatctcagcctccacgtccgcattgcaggcctttgccatgaccactacttccctggtcatagccacattttcctcgtaagcaagggatgagccatcatacataacagcggaaaagcctaaatccagggcttttctcacatagtccaggtcctcgccgtggtccagcatgacgcagacaggaaccctggcctccttcgccatacgcaccatgatggggccgatgatatgaataggcatctcgcactcgtgaagctgtgcgtgctggataataactggttcctcacgtttctctgccgcccgtatgaccgccataagaatttccagattcggcgtgtcaaaggcgcctatacagcattgcttctcttgcgcataccgcagaacatggttcatatttactaacatccggcattctccttacttttcctcatagagttcaacgatagcatcatcccagattacaaatgccaggcgcacgccagggccgcagtcagccggcccgaatatgattctctgagcctgggcggcatagtggtccagatcgtccaccttgtaagccacatggggctgcttggagagaatctccgggaagggcgtcccctcctcgaatttcaggtactctatcttaaaatcatagtcatccacattgcttacccagaacttcatgtcctcgttatatgtcatgccctcttttttgttcaggaccgggattcctatatgcatatattctgtcgccatgaccgatatcctcctcatctttctctcaaactgatttttccttgtgccatcagaacgttcttaaacaccctcttatttcttcatatacggcgtattgcacggcgcgttccagtagtgcagaagctcatcgtccatctttgccatgaacatctggaagccggcctgctcctgtacggtaagaagctctcccacataattggccacaatctcgacgttcttctccttcaggcaggatacgcacctgcggtaaatgatgaacagctccatcagtgtagtggcgccggttccgttgagaatcagcatgattttctcgccttccttgatatccaggtcagccagaaggccgtccagcatgatcttagctgtttcatcggctgacttcatggtctggcgtccgccgcccccttctccatgctgtcccatgccgatttccatttcatcctcgcccaagtcggcaagcaggcttcctgttgcgggatgggtcgctccagatacggctacggccagggtagccatgttatctgcaaaccgccgcgcaatggcagccacttcctccaggctctttccctcggcagccgctgctcccgctatcttataggtgggaatacatcccaccagtcccctcctgtcgtcggcgttggagcggggcgcattggcgatatcctcctgggtcactactttgatgacatttaatccttcctttgcgcatttcttcatggtcaggttgccggtaagcatgtcgcctgcatggtttaagactatgtagagaacgcccttgcccttgtctgccagctttatggcgtccaggcaggcctgcggtccgggagccgcgaagacatctcccaccacggagatatccaccattccctctcccacaaatccgctgatagccggctcatggccggatccgccctgggtcacaatggtaaccctgtcggcttcagccagcttattgttaatgatcatgcggttttcgcccagggtcaccagctccttgtgcgcctcggcaaagccttctaacagctcaggcgtcagattctcaggattgtttataaatttcttcatcttcataatttttacctctcccattttattttattgaccgcatccgtatgccgtctacttccgtatgccgtctactttcgtatgccgtctacttcagtccgtcgcaaagtcccgcaaaaaacagggatgtgctcactgcccccgcgtccggggtgccgatggtcttctccttatagcttctggccctgccatacttggacacatactgctcgctttcctttgcgcccttggccgctgcctccttcgcagcctccaggacagccatcacatcgtcttctgcgctttgagccgcttccacagcaggaatcagggcgtccatcatagtcttatcccccacgcccgcgttggtgatgtcttccatggccgacaagcattccgtaaacatttccttcagagtccctgcatcaatgggcttatttccttccaggggacctgacagtcctcctatcatggttccgtataatggacctgcgcttccgcctccgatttccatggtattatctcccaggtcctccaaaaaagtctccacgtcatcatcatcccagccatcaaggctcttctcaatcagaccggcaatcttgccaatggcgacgccgtggtccccgtcaccgaatctggaatcaatctcgctgagataatccttgttctcattccagacctgggcagcttttctgagcatctttgtaatttccgcttttgaaagtaacatatgtaacctcctctcatgcattttcccaaaattatccatgattttagattaacatttgttagtttatttgtcaattattcatcgtgcctttctctgttttttgccctaatgcacaaaaaatgcgcagtttctttagcaaaccgcgcatttatggttacgtatgtaacctatgtttcattggcccgcactgtgcaatcatacattctcattgtacaatcatcagctcttgccgcgcaccaggtctgacctcacatgtcccggcctttttatcgctcttcatccccgctcatcattccagcgcttccctgaccacatgctccggtgcaataaaatgtttcaggtaaccggtctttaaggctccccggaatgcctttgggctggtattggcagaacagatacccaccacatgcctagtcccggacagaagctccagtggaatctgaatggcgtaatccgtatctgaccggataatatgcccctggctgtccataaagtagtttaggatgcgtcccactgccttctgccgtataagctggtctccatatctggcctccgacgcaaaatccggtacagaaggaaaattcccgatattgaccagcgccacatccagtttttcccagacatgatatatctcgtggtagctgtccagctccctggtcagtttcagctcctgctcagaaagcacgcaggccggtgaatagataaatctgggctgggccccgctgtgctccgcaatggaacgaaccagctcattggagtggtaatttttaagtcccacaccgccgtttcctatgagcgggcagacaaatgttcctatgggaaccagcgtctccctctgttccatatgctttaccacatcaccgataatgtggccccatccaatgcccaggccggtgcctcccagccctgacagataagagatggccgcctctgccacagcctcattggtggtctgatcatttggtccgtcgggcacagccacaccgtcataaatcccgaaacagcgtcccaccagttccatgagggacagcgcaccgccggactcctcctgcggtgcgcttatccgtatagtgacgattcccttatcccgcgcctccttcaaaagcttgctgaccatggggcgggatataccgtattggtccgcaatctcactctgggtcctgtcctgctcgtaatacattctggccacatcgaccagacgctctgttttcttatccatactgcctcttattcatatcgctggtgccgctttggcatgtcacagaagcgtatactccagcatctcatacgccagcccgctgccctcattgatatcagcaggcagaagatccctggccacgcatttctcatcgtcatccggaacatccacgcgtttcagataagcataatccccgtcaatccgttccactctgtaatccacacgttcaaacatggctgcattccacctccgcttccctacttacggccgcagcactggcggtaacgcttgccgctgccgcagggacagggcgcatccgggtcaatgcgggctgtcttggcatccagctccacccggttataaccacagtttccaaccgtcctggtttccttccatacctgttccatgatttcatcgaatccgttcatcttttcctgggaatccaggttcagtccaaaatgctccatgatgtcttccactgctttcggcgttgtccccagccttacgtgatgatggatggaggaagctgcctcccgagcagtctcctcatcgcagccaaccatggccaggaaaaatgccttcagcgggcggatatgcttcttaagctccactgctccggttctggcaatctccttcacctgcagggcggaaggtatataaaactccttgcccttctgataattcaatacatctttataggcatctgcctgaatcagattccagtcaataaaccggccgtcccaataagcaaagtctgtccagacacctttcatctcacggcaaaggcgggtgatttcccctgcatccgcctcgcagccaactgccctgcagattgtctccacctgccccgcgtcagcggcgccgtaaaggtaaaccgctgccttgcaacaagcccatacctggctgcggtaatgacgatcagaccggaatttctctgtattcatctcatcatatgcctttgccacatctgcgggaacaactgctgtacccaggctggtaaacccgcagtaaccgccatagtgcaggaagttcagagcttccaggtctccctggtattctatacctccggctgctgcggccttctcaaactctgctgtggtctcatcgcttaaggtgccgaagaaccgccccatgcgctgggaatccagcagggcggcggccagagccggagccagcttattcttacccagctcatcgcatcccccaatatgatgaaccttggcaatgcgcagcagctcagtcttatcaaatctggaaaataattcctccagagtatggattacccttggagccggcttttgtgtttccggcttttcagcatcctggataccggttttctgtttgccggcggcatgttcctgtaccgcaggttcccggaccgcatcctcctgggcgttttccgctctgccttgtccaaatgccggatgtgcctttagattggcgtttacttcatccaggtcatactctcccattccctgctggcaggcccattcctccatcaagtcatggtcctcagcctcagggtcatccagcttatccaacaggtcatagtaaccgcctataccgccgcagtcctccggaatattgtctcccttatactttaacacctggggatagctgtattcatactccacttccttctccataagaatctggtgttcccatgtatccccgaagtcgtaggtatatataaaacgagggttctctgttattagagttccaatctgtgtgccttcctccagcacatcgcagccgcaggattccgccagatcgtcttcctcccacgtttcccttataagcagccccggtttcttaaactcaaacttgtgcaaatggtaatcacaccagccaaaggccccctgaatcacctgatggagctggcaaaatgtaaactgctccggcaccaccacgcgtctccatataggcggtttactgccttttatggtaattttcaactgataacctttcataaggccctccttcgaatttcaaatatttgtataagcaggcatcccgcgccgtaacaggctatatccttccagtcaaagacagaacccaggataatcctggccgcggcgttcccctgcagccccagtatctctgccagacggaaatactgcatcacctccacacaaaccgcaaagagaaacacatataacggcagccgcttcattcccactggtacgaacaccctgacaaaacagtacaccagtaccaccaccagcatgtcccctatataaggtctaatgatgcgatcatgaacatacagggcgataattaactcaattataaaaacaatgatacttgcggccagatatccccacctggccctgtattttctcccgctatccatcgggcctccctttggccgtctaccgtataccattgagttcctgatacatatccttggcaaatgtatctgtcatgccgcagatataatccgtcaccagcagcaaacgaagatacagccgttccgcatcatccctgtcccgggcgcacatggaatatatcatcttataattatcagatataagggaaaccagctttttctgcacctgggtcatgggcagatccgtatcgtagggaatcacagcgtccacaaaccggtccaaaagaaagtcaaatattgtctgggccgctatctccagcttcaggatgggtctggtgctgaacgcataccgcaaggcaatatcccccagtgcttccatcagcagttccacatccgtacccgcaaaaaggtcgctggtataggtaccttccataatagattcatagttgccggcaaaacattccgtaacgcccgaaatcatctggccctggacgctgataatccagttctgcaccgcatactggtccggtctgtcatatccctttcccacggcctttccatacttttcctccagccatgatacaatctggatatagtggtttgtctggctgccggccttatacgcttttaactcagccaaaaggcgttcataagaaatgcagcccttcttgaccgcgtcctcgatgtctgccgtcttataggcaatgtcatctgctgcttctaatatgaatgccaacggatgtctttttcccaatgtgccggttgacacctgcacatcctggaaattctccctgtcgccatggaaatatcccatcttcttggttcggatatcgccgctgtccttatcaatctccagggaagataccggatacttgataatagttcccaagagagcttttgtcaagttcatgccatgctcatccaccagaaaatgaagccttgtcaccaccctgaacgcctgggtatttccctcaaaatgacaaaaatcttgcaccatctggggctccagaatttccgcaagggttctccctctaaacgtaagcctctccaggttcttcttaaaccagtcctgaatagctgtctcaccaaagtggccaaagggaggattcccgatatcgtgaatcaatccggcgcactgaagaatgtcacataccgccgccttatgttctggcgtaaaagtttcatccttgataatagtgcggatgctctctgatatattctgtcccagtgatttggccagggatgaaacctccagagaatgagtcagcctggtacggatgaaatcactcctgtccagcggaaacacctgggttttatcctggaggcgccgaaaggatgcactgccgataatccggtgataatctttctcaaactctgtccgcaggtccgtggaggactgtttcttgtagctgcggatgcggtcgtcgcaaagcagtgtctgccaatccatacatacctccttactgctttcccgccggagtcctgtccattataatccatcaatcacggctgattacactggccgcggacaggacaaaacacgggatacgtttcattctagtatatcggaagtcgattcgcctgtcaaatctgcctttcatatgcgtttcaatccaagcttggccatttaacagagcgcgaccacatcttatacaaatgcgtattttgacctcatgtcagtgggggacactgttttttctccgcccgccgctgacgttacgtttgtttccggcaatttatccctccacctgtggaggcggaggattcttttgcttttttgctaaacatgcatctatatctattatcaacaaaatcgtgaaaaaagcaacaaaaaactgcatcttttgcagttgacagccattgttatttgtgataatttaaaatgagataagcaaatgaataggttcttcggggcagggtgtgattccctaccggcggtatagtccgcgacccgctgcatgcggctgatttggtgcgattccaaaaccgacagtatagtctggatgagagaagacaattttgttcatataaatattgagtatcctcccttatttatattgactatgaagttaatctcaggttccccggaacctgagattttttgtttcctggaacttcattcattgctgaatcaccgtatcgaaagcatttatcaaggaggttttgctatgaaaacaaaatggagtattcagaaacttatttacaccggtatgctggccgcagttgccggcgccctcatgtccctggaattttccgttccaatgatgccgcccttttacaagattgacttcagcgatgtgccgtccattattgccctgttcctcatggggccagcgtccgccgcctgggtggaaatcatcaaaatcatcatcaagcttctcacggtcggcaccaattccatgtatgtaggggaatttgccaatcttatcggggttgtattattcgtaatccccatgtgggcagtttacaaaaaaggcggaaagacccgccgggcagcaatcgcgtcattggcagtcagcgtccccatcaggaccttgtttgcctgtttctgcaatgcatttatcacccttcccctgtatgcagcggccatggggctccctctgaaccaggtgattaccatggtggctgcggtaaatccggccatcagcgatctgaccaccttcatctttatggccaccatccccttcaacctgattaagctggggctcaactgctttgtggggtatctgctgtacaccagactgctggcagtttatccggctgtgagaaccgcgtgaggaaatacatgaggaaacgctgtaaggaacgagggctgaaaaatccagtcaggaggttatatacacatgattcaaaattatagcgatttaacccggttagagatggaacaggtcaacaaggatgaaaccattgtactgattcccctgggtgcgctggagcagcacggaaaccaggctccgctgggtacggacgatatcatcgcagaggccatgacagactatatacgcagggagttggaagtggaaaattcagattttcccatgctgatatttccggtcatccccgtaggcttgagcacggagcacaggaatttctgcggctccatcacatttaaaccggatacctactaccatatgttatatgatatcagcaccagcctggtccgccacggttttaagaagctggcttttctggtgtgtcatggaggaaatgctcccattgtacaggtcttaagcagggagcttcgcagcgagttcggcatctcccctttcattctttcatccggggcctttagccatccggatgtgacggccacgatttcagaaggaaatatctgggacttccatggaggtgaaatggaaacctccatggtcatggccgtggacccgtccctggtaaagtcagagacctcagaggcgggaattcccactgcatttaaagacaatcaggcgctgaaaccttacggaaatgtatccattggctgggtatccgaggattggaaaacagaagacggcaaacccatcggaatcggcggggacccctcaggcgccacagctgaaaagggacggatcattctggaaaccagcgctaaggtgctggtgccggggcttaaagagattcgggcatggaagggataatggaagtatgcattctttgtacattctaacaagattatgaaagggatggggcatgccccatcttttttgttgtacggaattagttttacctaacctttttgcagttcaaaagggattgcggcgtttgcgaaaagggcagaggagagggcaactggatgtaattctgtaattggcggatttttaacttgctccgacgcgagagcggagacgctattatgtgaacggctatgagactaccccggaatttcaatccactccaccgcgagggtggagacctgttaactgtgcattatctgcctttaactgctatttcaatccactccaccgcgagggtggagacttataaaacaatcgcccatatcgcagactgcggatttcaatccactccaccgcgagggtggagacggaaacaagatggcagctccttttgttgccccaaatttcaatccactccaccgcgagggtggagaccggtatatactccggacgcaaagtggacaaccacgatttcaatccactccaccgcgagggtggagacatcagttcatcattgactggattgctgcgaatgaatttcaatccactccaccgcgagggtggagaccatacacatgcgcgtatacgcgcgcgagaatcgatttcaatccactccaccgcgagggtggagactaatcctccacgggcacatcattgttataggtatgatttcaatccactccaccgcgagggtggagaccatgctccgggtggcaaaggatacggacatcctatttcaatccactccaccgcgagggtggagacgagggccgctgccctgccggtgatacacgcctatgatttcaatccactccaccgcgagggtggagactatactcaatgacacggtccttattctgctgtagatttcaatccactccaccgcgagggtggagacctgggagaaatcataaaggagatgttgcaggatatttcaatccactccaccgcgagggtggagaccgggcaaaaccggacgagaagcagagagacatcttatttcaatccactccaccgcgagggtggagactcagagagctgcacatttttgggtagtaatcagaatttcaatccactccaccgcgagggtggagacgccgagcatatgagcctgggaaccgcaggacaacaatttcaatccactccaccgcgagggtggagactatggttaagcatccgctccgggagtgggaggtatttcaatccactccaccgcgagggtggagactttgcggagctgtattttttatacctatttttagatttcaatccactccaccgcgagggtggagacctttcaaaatcatatttatattctatcgataccgatttcaatccactccaccgcgagggtggagacgggataccacttctgtttcacggttgttatctcccaatttcaatccactccaccgcgagggtggagacccctttgtagtacgctcctcctttgcgcccaaagatttcaatccactccaccgcgagggtggagactgtagcggcggcaatgtctgctaaactatagcctatttcaatccactccaccgcgagggtggagacctttacgcggtgtgcgttggtttggaatgagccagatttcaatccactccaccgcgagggtggagacgtggatactgatatgcctatcatatttgacgtgacatttcaatccactccaccgcgagggtggagacatgcggttttgtatatctcagcagatttttgtcgtaatttcaatccactccaccgcgagggtggagaccccacatgcccaacacggcccagagatgtataataatttcaatccactccaccgcgagggtggagacagaaatactacacaataaccactactattcttcatcacatttccacaaacaaatcatatcccacccccctcaaatcacggccaaccatccctgcacactcgcaaatccgttctcattgtgcaaattttccggtgcgaatccccccgtaaatccatgtttgcttcaggttcgcaccaaaatactttataccgctttaccgcccgcggccaggtcagaatatcagcggttcttccacattaatccccttattcatcccaacatggttcacttttgtagtgtgtttattcccaaggttgtaaaacctaaggctgtccgtctgttcatcaattatatctgtcagtatcgcctttagctttatcagctgggcattatccaaaatacattcaaatacggagttctggacgcgggtgccataattgacacattgctttgcaacctttctcaacctggccctgcctgcggcggtttccgtattcacatcatatgtaatcagtaccagcatataccttcctcctccggcccatctgtcaggtgtctttctatttccagaaaaacggcgggtattcatctatatcgcctcgcagatatctggacagaagcatggcctgaacaaatggaatcattccccactccaccttctcattcagatatggatgggtaatcatctcctttttcttgttctgccattctgacagcaacagcttccgtgcctcatcccccataatgacagcgccgtcttctttccgggaaaaatcctttttgtttaccatcttccggttaatcagggtaagcacaaaacggtctgccagaaccggccgcagctcctccattaaatccaatgccagggaaaggcggcccggccggtccgtatgcatgaatcccacgtaagggtccaggccaactgtttccaatgctgacgcaactgtattggccagcagcgtgtacacaaatgacagcatggcattcacattatccaaaggcggccgcctgttccttcccttgaaatagaaatcatttttctgctgtaatatgagctggtcgaaaaccccaaagtaaatactggcatcctccccttcatacccccgcagctgagccatgtcccggctttcctctatgcgcctgagggattgtttcaggaatccggccgcatccttcaccttctctgtgtcaatctgaagtccatggtctctcacagctctctccagaacccatctggcattgtatacttttccaaggatacagtttctggctatcatcagacttgcgtcctgattcatggaaacctggtactgtttcctgcgcagaagtacgtttccccgcacacgtccggtcacacgggccagaaatcttccctgaggcgaaaggacgcaaagttatatgtcccgctccgcgcatccccccatgagggccgggctcattcccctgtatccaaaggacactattccctccagattatggagcggtatccgtcccagttccgtatcgttgtcatagattaccacattttccccgtccagcgacagataactgtcaggagaagtaacatacagggtgtttaataacttcctcatacatcctcctcaatcttcccacggatataatccctgacaggtgatgcttttcccagtttcggcatacatatatctttcatggagcaggcattacagctctttgaccatctgacctttggtgtatatcccttgtcataaagttcatgcatctcctgaaatatatcccttacccgttttcgcagttcatctgtaatctccaccacattcctgcggtgaatctctccgtaatacagcgcccccgcttcaatcctggctgacagcatttcctccaggcacatggcctgggccgccagctgcagtatatctgcttctgattcctttgggctcccctttttatattccaccggaaatacccggaacagtcccctgtgcccatggagtccgattccatcctccgccctgtgaaactctacaatatcgcattccccgctgacacccatactcctggaatacacaggcaatgccctgcttatcatcacatcgccccgcctttctgccaaatatggatcatgggcctttttgtggagcagctctccttctatggtatgctcattctctttccactgctgttcaatatgtataagggcccactggcgcctgcaaaaggtgaaatgctggataccggacaccatgaggaagtcatcctccctgtattccattatatcttctccgaaacttcaaccgtttccggaatctggtccctatggacggcaaccgtgtaatccccgtattttctgggatactccacttcctcattcttttttacttccacggcatcaaagagtttgtatgcagggcaatctcccaattccttactatgtttaaacacgatgagccggcggaccgccatttttcccctggctgcggaatggtcgatttcaaacatattgatgatggcatcccacaaaagttccagatcctcctctgaaaagcccgtggattttctggccagattagctgatatgtaaccctccgcgcggtacagggcgtagggaacgatattctttcttcccatttccgtactcttattttccgcgtccttttctgtggtgatagccacacgggtaatggtcacttcctgactcacaatggggtcaatgcttctggcaaatcccagctgtacaggcccacgcacctggccgcagtttaacgcagcctttacaaaggttgtcatgaccgcgccaaaggttcggatatcgaaaaagttacggcacataaaatcccggattttctggtctacctgagggtctttctttttgagttccttgattcccttttcatctgtcttaagctcaatgtacgcggtattgtcacttctgtttaaaggtacatcctcccggatatatattttatacccgggctcgtcttccttcagtgtctccacataattgcgtatcttacgttttaagcacacatccgtcacgataccgtatccgctctccggatcaatcctcggcagattgcctgcatccgggtcgccgtttggatttccgttctccacatcaaataacaccacaaattcatacctgttcttaatcacctctgccattttaatcctcctcctttatcttcttctcatatctcttctgagtctgatggtaatatcccaatatgaacattccctgctcctccagggtaagccgccttgggcaggctgccttctgcccctctgcgacagtcagccttccctgtaaatcacccagtattttttcataatatatctccttcgccccattgttcatcttcttcatgtggctgtttttcagcttaaataaaatgggaaagattgccgccggcgtcgcgcatgcagagttaaaatacttatcctttatggtggcgttaatccccggattggcgtcctcctggattgcctccagaaccgcaaactcccttcccaggacgtacgcggtattattactgtcttcattcagcgccatggttatttcctccttttcatttccatttttcagcagatatgctttgataatggctgcccttcccctggttatcttataaatccggctgtccccgtcgtcctgctctgcccgtatcctgccaagcacggcctgatacagggacgccggataccggctgccggatatgattgccctgtacactgccccggacatactgggaaccggctttttatccctggactttttattgacggtctcctgcagcatacgccacattcccagatactccacggcgtcggctgccggacgcactatttccattctgtcataatgttcttttatatgctttaatatatttccaaagctgtcctgatagaaaaaacgcactgccagcctggctgcattaggcgccagacctaatatataaaatttcctgtccatatcaagactgtcctggacatcctgagccgcaaccgcttttccctctgccaggttcttgaataccccatccactatttcctggttctccatcgttggctccgatacgcacgcaaatatattctggtatcgttcgtcgccttcctcggaccagtaaaccactgccgtgtcaccgatggttgtcctatgagtccggtccccaaggagataattgagcgccgtggtataggcataggccgcgtatgttcccaccggtgcgttaaagctctgttccttgccgtatgattcaaaggcaggtgcattaaaggaaaccagcgcagcaccgctggactgggccccctggacgccttttatggtgccgtgaatcctggctatttcctccctgcgccctgtcaccaggcagacgcccacaggtcctgtgcctgactgacggctgtattcttcccagcactgccttatatccgggtcctcatggacatattccccatccaccatgaacaccagattagaaccggatataatctcctccagttccggtatcaggcatgggttttccgctgcctgatccggcgcccagcggtcaaaaaaccggcacaccgccccggccgcggggctgctgatatgctctaaaatgtccttatgcttctttttggcgcactcaaaacattccctggaccgctccggtttccccttattatcaattcccagcatataaccggaatggtcgcacaggaaattggcggatacaccggaagaacgggaaaccatctggggtaccgtaaggctttgcggtaccgtgactgtctttttacctttctgccgctcctgcttaaggggaatgacgctcttaagctccccctgctctgaaatatccagcccgtacgctaccctggccctgcaccagcccggactggttatctttcccttccgctcaagggcttcataatattcaacaagcgcctggagaatcatcgcaccacctcacaattccttacatccagaacaccatccttcatgacggccctgaaaaacatgggtttaatgtcctctgtatctgagtaatcaaagtcaaacagcatataccccaaatccctctccgttccggcatatgcagtgtctacctcctcctcttcataaagggcaaactgggcaggaaattcccggcatccaaaatacggtctgtgatagcactcacccctgcggagccggcgcataataatgtccttaaacttaccctcattatcccctgggactgccttgggggtcatctcaaagtgagcctcaaccacatattccacatcccgcagaagaatggccgctctctgtacgatttcctccctgctgcttatatacagcggttttcctcccccgtttatagcagacaatacatttcctgccaataccttgctctttacctcatttcttcggatgctggtaaactggatgggttttctcacatagattttgtcaatcacccaccgcatccccggatgccagtagacggcctccagcataccccttgcggcggagggagtcataacatcatagctgcaccgttccaccttcatctcagggcggctgaaaagggcataatccccccacatccggacccgtactcctcggctcatcacttcactcctttccggcatacgccattttcatgaaggggactcaaaacatgacggcatcgccgcggcttacgtcaatcacaagtcctctctcccttgtatactgctccttattcctcagaacataaaattcctggtctatctgttcaaggcggccagcgccgtttaacgcttcaaaatcatgttcaaaaacatttacacagtactgtcccgcctgcctgataagctccctgttatgctctccccgccggatttgcatggcaatctgcgctgcttccggctctgtatcaattaaaatggtcctggtattactctcaatcaggcggaacccggaagccactgatgcaaatggaaacatgaaggaacggcttccctgctcaaactgctccaccacatcctttgcgtccaatccctcccctttataccggtacagcctggtgaaatattctccaatggcctccggcgatgatatatcttcatactttcccacaatctgccccgcaactgaaataggcagttttaattcctgtggtatatggatatcctcctcttcctccaaagtaaatacctgagtaatgcattcttccggatccctctttccctccctgttgcaccttccggcagcctggatcacgctgtcaattccggccagctccctgtatacggccggaaagtcaaaatccacgcctgcttccaccaggctggtggaaataagccggcacggttctcctgatgacagacggccgcgaatctccttcaaaagctccttcctgtgctttggatacatcaatgtggataaatgatacgttccccggtcctcaatggactcgtagatacgctgtacacgctttctgctgttcaggatacaaaggacctgatgccggccttccagctccttcaccagatgctcctgggatatccgtcctgccaggtgtatccttgttcttttgaaaaaatcatattgtccttttacaaccggacatagttccgccgcctccagttcctgtatctttgcaggaaagaagggctgcagggacggctgggtagccgtacagataacagccgtgcagtgataattacatataagctcgctgacagcccgaatacatggcatcagatatttcaccggcagcatttgtgcctcatcaaatatgatcacactgttggcaatgttatgcagtttgcggcataccgaagtcctggaggcaaagagtgattcaaaaaattggacatttgtagtgaccaccaccggcttatcccaattctcggcggccaactgttccaattttaactcccgggcgctctcattgtcctcatacgtcacattacaatggttttccagaacatttttctttcccaggatttccttaaatacctgggcgttctgttcgatgatactcgtatacgggatcacataaataatccggtcaagaccatgttccactgcgtggcgcagggcaaacccaagggaggatatggtcttgcctccgccggtaggtaccgtgagctggtacagtccctgcttccttctgcctgcctgcagacatgccttcagtatagccgtccttcttccatttacagatatcaaatcatcattggaaagccaggattccacatggctttccagacgcctgagaaggacgtccatacaatcatggtccccccttcccgcatcgtgtcccagcataaattgctccgtatccagataatctccgtccacaaggcatgaaaacagcattctgatgaaaaatgacaagctgaatcctcccttgcctatttgtctcaaaggcagcccgggaaaatccggcatctcaacttcatccttgtatgggctgtaatcctctaactgcttcttaagccttccctgaagcgtggcctcccctgccgtgtcgccgttccttcccccgtccagaagtcccgaatggtggccgctgatacagtaagcggcgcaataagcagccagcgggttggtcctggcatacagccccatcatctcctgggcccccgccgtggcatggtctgtaatggaaccgccttccagacgctttatgaatccctgggtatattttccaatgtcgtgcagaattccgcatccatacccccatgctccgcaccggaaagcctctgcgaacagttcagaacgcctggccgtccctgtcagatgctccttcactgtctgccttcgcatcttgtcgtcgctgatgtgcgcgtagtattgcatatgttccccccttccctttacattgtacaaattataacatatttttatcttaaattaaataaccttgtcaaatatcaccatgtccgtttttgtataaagataaatatttcttttattccgccataaccccagatacacctactcttcccccgcaaacagcggaaatccatcctcggccctgcactccccggcctgtaccatctgagtctcctcatccggatacccaatacagcaccccttccctctggcccgcgcgcacctggggtattcgggacagtcattatagcgtgactttccctttatatcaatttataataactgaaaatttgtcaaagtaaaaactattatgaaaacaatttaacaaataatgcttttttacatgaaaatgatatggtagttaatgtaatcggaagcaaggcttttataagccttatttataggagtgcaacaacacaaaacaaggaggtattacatgaacaaaccagaacttcagaacaggtatcagctttttatagggggacagtggcgtgacgcttctgatggtgaattctttagtgccctgccaatggagaaaagctggctgagtgtgctcaggctgccaaggaagacgtggatgatgctgtcagggaagcatggaaagcatttgagacatggaagaaggttcctaccagtgaacgcgctgccatcctgaataaaattgctgacatcatcgacgcgaatacagagcacctggctatggtagaatccctggacaacggcaagccaatccgcgaaaccatggccatcgatattccgctgagcgcaaaacacttccgctactttgcgggctgcatcacggcagaggaaggcagcgccaatatactggatgagcagttcctttccctgatattacgtgaaccgattggcgttgtaggacagattgttccccggaacttcccgttccttatggcagcgtggaagctggctccggtcccggcagccggatgctgcagcgtatctaaaccatccagcgacacatccctttccgtccttgaatttgcccgcctggtacaggatgtcattcctaaaggcgtattcaacgtgataaccggttccggatccaagtcaggccagtatatgcttgaccacaagggcttcagaaagctggcatttaccggctccaccgaggcaggacgtcaggtagccctggccgcagccggccgtcttatcccggcccccctggaattaggaggaaaatccgccaacatcttcttcctggactgcaactgggagcaggccattgacggtctccagttaggcatcctgttcaatcagggccaggtatgctgcgcgggctcccgtgtattcgtacatgagggtatttatgataagttccttgaggacgctgtaaaggcatttaacaatgttaaggtaggcgtatcatgggatcctgagacccagatgggcagccagatcaacgaacgccagccggaaaagattttaagctatgtggaaatcggcaggcaggaaggcgcccgcctgatctgcggcggggaacgcttaacagaaggcgaactggcaaagggctgcttcatgcgtcccaccctgctggctgacgtgaccaatgatatgcgtgttgcccaggaggagatcttcggaccggtggcctgtatccttaaattcaaggacgaggacgaggtcatccgcatggccaacgacaatgcttacggccttggcggcgctgtctggacccgcgacttaaaccgcgccatccgcgtatcccgcggcattgagacaggacgtatgtgggtcaatacatacaatcagattccggagggctcacccttcggcggctacaaggagtccggtattggccgtgagacccataaggttattctggagcactacacacagatgaagaatatcatgattaatctgtccgaggctcccagcggattctatcctgcaaagtaataccttatatccggtttgctgcgcagaccgctgaattcataaaacatattgtcctctcacctgacgtccgattttccaacatttatatttctagttccattcattccaaaccctctatattgcatcaatccataaatatggcgcattctaaaaacatccaaaaaggcattcaaaaaattatcccgtaaaatagtaccaaatatcacttgacatatattactgtaacttttataattacagatagcaactgatgtttatttgattacagtttgctcagaaaggaattgccatgaacaacagcctcaccggatttctcggtacctatgcctcgcctgaaagcctgggcatttaccgttttaccattgatttaagaaacggtgcaatgtcttatcccgaattatattatgaagcccctgattgtaagtttctttccctgaaggattctctgctggcttccccattaaaaagagagggccggtccgggatatgtcttttagatacggcccataataaagataatgcctctgcctcaccggcagcggaagtctttgaggagtcctcgccggcctgctacgtggtccgggatgaccgttatatatacacggctaactaccatgaaggtaccatactgatatacgggataaaatatgaggcaggttctcatggacatgaaaagcggcccgcccgcccgtaccttgaactggccaaaagaatcctcattgcgcccaaggccggatgccatcagattttatttcacagccactatatgatggttccctgcctgctgctggataaagtgatggtgtttgactgtcagaaggatttttcccttgtatctgagctggcctttgacacgggaaccggtccccgccacggaatttttgacagggaccataagcagttgttccttgtcagtgagctgagcaatcaggtctttgtctacagtctgacagaagatgctgccgcagggacggacagcagccataacagtatatcccttcctgacttttccatgaggctcctgcatatctgttccatcctgccttcggacgcagtatatgaggaaccgcctgcatcagctgccatacgtttatcgccggacgaacgctttttgtatgtgtccacccgatttgccgaggtcataacggtttttaagattgaccatggctgtcttgcgcaaatccagcaaacaggatgcggcggcatccatccccgcgacatggttcttacgccggacggccggtatctattggttgccaaccgcacacggggcggccttgtaagctttcagattaaccaggaaacaggtcggctcatggacatatgttcccgcgtacctgcgccggaagctgtttccattgttctttcccaacatactatctaacccggatttcacctgatcggaggtaacagaatgacaaaacttgatattggaatcgtaggactttccgttatgggcagaagccttgccctgaatatggctgaccacggatttaaggtgggcggttataaccgcagcgctgctgtcacacagcaggtcatgagtgaccatcctcatgagaacctgactcccttttatgacctgaacagactgacagacgccctctcacgtccccgtaaggtaatgctgatgatccaggccggcaaaccggtggacgccgtcatagaacagctggttccccttatggaagagggggacatgatactggacggagggaattcattttttgaggataccagaaggcgggcagccctgctggcagagaagggaatccactacctgggggtaggcatctccggaggggaggaaggcgcacggttcggtccctccatcatgcccggaggcaatgccggtgcttacgaatcagtgcgccccatactggaagccattgccgccagggccatggatgagccctgctgctcctacattggcccggacggggcaggacattatgtaaaaatggtccataacgggattgagtacgcggatatgcagctgattgcagaatcctatctgctgttaaaatatgtgggcgggttcaccaatcaggatctggctcatatctttaaatcctggaacgacggggagcttcacagctacctgattggcattactgccggtatcttccgggaggctgacgacctggcggacggagagctcattgaccgcatcaaagacagcgccaaacagaaaggaaccggaaggtgggccagcatagaagccctgaagcaaggcgtggatatctccatgattacctctgcctgcacggcccgcatcatgtccaaccatctggatgaaagagaaaaagcatgggagcttatccattccccggctgtcagcctctcccctgataaagaggcatttgcggccatggtccgcgaagccctgtatacagggaagatcatcgcttatgcccagggtttctccctgatgcaggatgcatccaggctgtacggctggaatctggacctggggaaaattgcttccatattccgcgcgggatgcatcatccaggctgttttcttaaatgacatcacccacgcatttgaagctgagccaaagccggaaagcctcatattcgaccgcttcttcctgtcccgcatcaatgagcatcaggacagcctgcgccaggctgtatccacaggcgtcatgaacggccttcccattcccgccctctgcaacgctgtgtcctacctggacgaattccgggcaaaggcagcaggcgccaatttaatccaggcccagcgcgactgctttggagcccacacctatgagagaacagaccgcgaaggcgtattccaccatgaatggaggtgggcaaatgataatcagcactaaccttaccatcttcggaggcaccggggatctcaccttccgcaagcttcttcccgctctttacaccatggatatcaccggaaagcttccccaagacagccgcatcaccatcattggccgccgcgactacgacagcagccattaccgtcggatttccagggactgggtggagaaattcacccggctctcctttgaggaaaaagcatttgaccgtttctcagaaaaaatagattattaccggatggatttttcccgtttggaagcatatcatgggctgaatcattattacagggaaaatgatatcagctcccacatcttttactttgctgtggctccccgttttttcagcgccatcacagagggacttaaactggtccatggttcctcctccggcaaagtgatactggaaaagccctttggagagaatctggccgcggccacagcccttaacacagagctggaggcattctttggcccggagcatatttaccgcatcgatcactacctcggaaaggaaatggtccgcaatatccaggcaatccggttttccaatcctatttttacagacgtgtggaattcccgctatattgaatctgtgcagatttccgccctggaggacatgggcgtggaaacccgcggcggttactatgatgccagcggcgccctgaaagatatggtacagaaccatctgttccagattctgtccatcatggccatggagcggccggaggaatttagtcccagagggctgcacgatgcccagctggatgtcttccgctgtttgcggccggcggatgaaacgtccatagaaagcactctggtcctgggacaatacgagggctaccgcggcgaacctcttgtaaaaccggattcacagacagaaacctatggagccctgcgccttttcattgacaatgaacgctggaaaggaacccccttttacatccggaccggaaaaaagacagggaaacgcgagattgaactggctgtcattttccgccggccttatccggacgtggagcccaacatactaatcattaagattcagccgacggaaggcgtttatctgcagtttaatattaaacgtcccggtgattctgaggatatcattccggccaagatggatttctgccagaactgcagtctcattcatcagctcaacaccccggaggcctatgaacgtcttatcactgcctgtatggcgggggagcgctcctggttctcacaatgggaccagatagagctgagctggaattacatcagccatctgaagaaactccatgcgggaaagcagcttccggtgtatccttataagcccggaacccatggaccggctgaagcgaaccgtatgctggaacagtacgggcatagctggctgtaggcggccgtgacggctgcaggccagccgcaaggcggcctgcacgttcatgtggcagccgcgtcccggacatgacaggaggcgctgacatggattaccccatggcagccgtccgtctcaaggccatgaccggcatattggaaacagggctatttgacgatatatgcgggaaaatcatagtccggactgaaaacggaaccgaagaacattttcataactgatatgcggattcagactttacagaaaaatcccgggctctgattcatgcagaatccgggaccttttaattatatatatgattaatctcggcagacagcgcaaacaatcagacaattcatcaaactgcctatgccgactttgccctagcagccgccttatcctccagcttggacacaaacaccgtacccgcaagatctcccaggcagttgttggtggtggttcccatgtcaaacaggcggtagaacgcagctatgattcccacaatctctgtaggcaggccaaatgcagttaccatgaccagaagctttacgataccgcttccggggataccgccgccgccagtggaaagaatggccgacatcaggatgattttcaccatggttcccagggtgacaggaacgccgatggtctggctgataaacaggataacacagccgtacagtgccacactggagcaggtggagatggtgtatacccacagctcggcactgtccttcaaaaacttgagcggattgattcctgccgtcacccagatgaccgtacagtaaaccagtaccacatgcaccaggcaggccagataataggtgcctacaagggttgccatgctggtaaagatgccggctccgtactttccgaaggaatctcccatcaggaagaatacgccgattggagataccagcataatcatgttaatcagcgaaaataccatatcattgagcacgttcatgcccttgattgccttctccttgtgctccggattcttcatccttaaaatcgccacgcccagcagaattgcgatgactacggtctgaaggatattgccgtccgcaaaggtctgagtaatgttggaagaaaacattcctgtaaagaaatcagctaccgtgatgtccgcgctgccagttacctccttagatgccagtcctgtaaaattggctatggcgccgggctttacaatggatgtaaccaggatgccgatggcgcaggcaaccagtgtggtgacaatataatatgccataatacggaagctgattcttcccagcgtcttcatatccttctgagaaacaacacccgtcacaatggtgacaagtaccattggcaccacaatcattttaatacaattcagccagatagttccgataaacccgactttggtcattggttccccgataacgattcccaaaaccgctcccaacaacatggctgcaaatatctgcgtcgataaacctatctttccattttctacagatgcaatataggtgcggtccaggcctgccttaaacgccaaagactcttgacttaataatagttcttttcttaattggcgtatcctgttgccaacttttatttttatatcgccagaaaactccatctccctcacctctcttacaggtaagagtaacgaaatgtgacttatttatcaacggactatgagtcacatatatctataccacataaatattttattccccggaaaatgaaaagtctcccaaagggacatccaccgcgttcacctcaaactcatcttgcatatatcccatgaaatttgcatatatcccatgaaatcataattggaagacacaaatcgagtaggaggaaggcgattatttcgccttccgacctctcacaccaccgtacgtaccgttcggtatacggcggttcaatcaacttaacatgtaacagccttttcggcgtagtagtcttccatggatacaagaccaaacttagctagtctctctttactgatacaaatgtggagattccagcttctgcacactctggcatatcctttggcatatgaaatgccatgtgccgcatttggcggcagaccaagtttgataagattcttttccctgttctttggcgttttccagtgtttccatatgcacatgcgcagtcgataccgaatctgtccgtccatttttgcgcacagccttttcatgcttccgattttgaaataatttatccaccctcggataagccggttgagtttcccaattttataaccattgcccactccccagctcctgcttgtatatttcttcatctgcgccttgaactttgctgccgctttcgggtgtggtctggctttgtaccctttggcaaatgagtcatagtaaaatccaaaccccagatacttaatgccctttggtttatcaaccctgctcttttccgcgttcactttcagtccaagcttttcctctataaaccgagccacgctcttcattacccgctctgccgcctgtctgctcccgaccattataataaggtcatctgcataccggacgaaatccagcctccttgcttccagttctttgtccagctcatttaacatgatatttgctaacagcggcgagatatttccaccctgcggtgtgccgactaccgtatcttcatactcatcatcaatcattacgccgctgaccagaatctttcttaccaccgatatgacatctccgtcctttattgtccgtccgaaaatcgtcatcagcttgtcatggtctactgtgtcaaagaatttcgctaggtcgatatccactatccagttgtgtccgtcattcatcatttccaatgctttaaggactgcctgctgtgcacaccgcttgggtctgaatccatagctgtggtcgtgaaactgctcctcaaatatcggggtaagcacctgtgccaccgcctgctgtacaaagcggtctactgctgttggcactccaagatttcttgtaccaccatcgggtttgggtatctccaccctgcggactggcttcggcttatacttcctcgtccgcaactgttccttaatgttttcgccgttttccgaaagatatgcgccaagttcttcaacggtcatcccgtccacgcctgccgctcctttattccttacgacttgcagatacgccgcatttagattatccctgcttaatatctgctccatgagactgcttgtgtccatgcgttgtttcctttctgccccttttgcctttgccgcctttgaagtcatcgacaggcgtatgctccggctacgaagtggaacgtacttcaactgattgattgttcagcccttcgctccgtccccattacaggaacttcctcactactatggcttctgctgacttctcacaattcgttgttactacggctaatgagaccgcctgtgagacctccccagttaaggtgcgtgttcttttcctccatgtacctgccgcatttactcgtacttccggcaaccttttggacttcagtgccttttgccaccttatccgtatttccgagccttatatgcggttcctgtccgtcaggtcagaggtttgcttacagcttctttcagattccgtctcacggcggacacccttgctgttcggctatgtgcttcgttgttgcctacgcgcacttgggactttcacccattagaaaacgcccatgctgggcaaacaaaatgcatgacacaccctccggtccatcatgcattttatttttcaactatacatttcttcccatttcatatgcctgcttcacagcaggtgtccccttgatttctcctgcctgccaggcaccagttccatatataattcccttctccctagctccagtcagacaatcctgcgtaaatccccggaatccttcaatggtgcgctccatcatcttccgttccgtatccgcggcggctactataaaataaaaatccttattctgaatttctgtatacctgggaaccgtgcggtcaatcaatgttttcatctgtgcatccatggtataaaagtacactggcgtggccaatacaatgacatccgcctccaccattttatccagtatctccgccatatcatccttttgaacacacttatgagtggtattacagacgccgcatcctatgcaatattcgatattcttactggccagaaaaatcttttccgcatgatttccagattcctgtgcgccgcggataaactcatcgcagagtgtatcggaattaccgcctttccttgggcttgctgatataactaatacatttttattcatatgtaaatctcctctcgttttgttatctctcatcattctatcatctggagctaacttcaagtcaagaagtttttatcgtccctttatcgttcctttatcgtccctcccataaacttaagttccacttcccatcattcacctcaatttccaccctgccccaatatggccctgcgcttcatccaataatacgcaaacccggtacaatccgccaaaaaccagccaataggcactgatacccatattcccacaacaccaatgcccggaatcgctgacaggatataagcgagaaccaccctggttcccaatgaaatgaccgtcagcaccacggacatctccggttttctcacagcgcggtacaggccgtacagcaggaacagacatccaataccgcagtaaaatgtcccctcaatccgaagatactgcactcccaccgccaatatctcagcctcctggggctgtacaaaaacaagcatcagctcccttgcgaacacacatacaataaacgatatcaccaggcaaaacaggacggaagctgtaacagcgcttttgattcctttttccacccggtcatgcctgcccgccccataattctgggctatgaaagtggaaaacgcgtttccgaaatcctgcaccggcatataggcaaaggaatctattttcactgctgctgcaaatgccgccataaccacagcgccaaagctgttgaccagtccctggaccatcaatataccgaaattcatcacagactgctgaacgcaggtcaaaaacgaaaaaccggatatttccgccagaaccttccggtccattttcatatagcttctgtttatcctgaattcaggcatctttaaatatgtatacagacagattccaatgcctgacacaaactgggaaacaacagtggctgcaccggcaccggcaacaccccatttaaagacaaggacaaataccaaatccaatcccacattcagcagggctgaaatgccaagaaacaccagcggtataaaagagttccctacggctctcagcagacaggcaaaatagttgtacaaaaacacagcgctgatgccaaaaaatatgacccacagatattctcgcataaagccatagatttccacgggtacacacaacaggtacataattgggtcaataaacaggaaaaccgcagtattcagaaccagagccactgccgctacaagtacaaacgacacgaacatgctggatttaagcattctctcattcttttcaccatagcgcagggaaaacacagccccgcttcccatgcacagccccagaagaatggaggtaagaaatgacatcagcgcataggcggccccaacagccgccagtgcctgtacccccagataccggcccacaatcagtgtatccgctatattataaaactgctgcaaaagatttcctgttatcatgggaagtgcgaaccgcagcatggttcctgtaatggaacctgtagtcaaatctctatgcatttcccttacttccttctatgaatgatcgaaatatctttcccgcatcagcgtcacccggagacatgaactccggatgccactgcacagcctgtatgtactccctgtcaggcgcgtatatcccttccaccagtccgtcctctgccacggccgtggccttaagccccggagccaactttttgattccctggtggtgataactgttcactcccatgctgttccttcccaggagtttgcataacggtccgtcttgcaccagttccacctgatggcagacacggctgtacggcggcttcatatgatgctctatgctgcacgtaccctgaaattcggagggcagatcctgaaacagagtgcctcccataagaacattaatcaattgcagaccccggcagattccaagtaccgccttgtggtcctcccacgccatgcggaacacgttttgttccagccggtccctctccatacaggcaggaccgcacaggccgctcttctcctcaccgtatagagatgggtccacatcatgtccgcctgtaaacagatacccgctgcacatgctgtttatctggcgtaaatccgcctggtcacagacaagcggcaatatcatgggaactgcgcctgcccggcggattccgtccatatatccgggtaccatccagatactgtccttttcctcgtcaaataatggtataattccaatcaccggtttcatgtgcacttacctcgtttctttctcactgctttcgcatcaatccatcctgctgcccctcatcatggacacagtataccacaaacttccattaatttacagataatctccctgttagtattctgattgatttggctggccctgattccctcctgttccgggtcctccccgcatacatccactcctattataccgcggcaggacgccgcctcttttatgcaggccagcacatcctccagctgcgtctctccctggtcccaattagtgactgcgcaggatcggttcagaatatccttatccagtgatatatagagaggcagcccggagtcctccatatagcggctgatacaccccggcaccttcagttcctcttcattgattccaactacccgattcccgtcagcttccgcttccatacagggcggccctgccagatagacccgcttcagccccgtatttgtatccaaagcagcctgaatccaaccgccgcaggacaggatattcccaaatataggcatctgcatatctgtatggtgatcgaacaccagcagttcaaattctccctctaccttatccagccatattttactcacataatggtaatttcctgaatccaggaaatgaattccggagggccccattgggcggattctctccttaatggctgcctccgcctcctcgtcacagtaacaattagtgccctgtatatctctaaggtccagccacacagcgcccaaatccccgtaaaattcctgtttttcatatgctcccgtaaaattcataatgacaatattgttattctcaagctttttattttcaagcaaacccattcactgcctgtcctttcatccatgattctatatatgcttttcctggcgccttcccaaaggctctttccaagaggctctttcccagaatctcttttacaaccattgtatcagaataacctcaaataagaaaccgcctgcaaataataattttataataatagtaattattattgattttatggaatttatatgatacaatacaactatcttacatattatcaattatacgtggtaaaatcaaactatagccgaaaaggcaaaagagacacaggaggggtacattttatggattcaaaagcatttttcaaattaagttacggcgtttacattatttccaccagcgcagacggcagggaaagcggctgtgtcatcaacactctgacccaggttacatcatctcccgccaggttatccattgctcttaacaaggaaaactatacatttaagctgattgagacatccggcactttctccgcggtggtactttccgacgatgtggaaatggatctgattagacgttttggtttccagtgcggcaaggatgtggagaaatacgacggcattccacatggacgggacagtctctataatccatatcccacagaaggcgtctgtgcccggttcacctgccgtgttgtatcctccatggacgtgggaacccatatgattattgtgggcgaggcagtggaggcagaagtcctggattcccagacaccggcgcttacctattccaattaccatctgaagaaaaacggaactactccgccaaaggctccttcctatcaggcggacactgacaaggttaccggatggcgctgctccgtatgcggatatattttggagtctgagacattgcctcctgactttatctgtccggtctgcggcaaggatgccagctatttcgtaaaactgtagcctccttattgttctgttacgtgaactgttacaaaatacccctgaaaacagctgattcatacccataagctgttttcaggggtattttatgtcctctggatatatcttacttctgaccggactcgttcctatcccggttttcttccttatcattggtaacgttgccgtctccgctgactggtatggcatctcccagataggtgggcttaggcattacaatggtataaatcaaatccttgggtctggccagcagttctctcaggtccctcattttctggccgccgtactgcctgggatctgactccacgccgtatgcctccatccccatggcctgcgccacataaagagcccggtacatatgatagcgctgggtaacaatgataatcttctttacctggaaaatgtccctggcccggtacatgctctcataggtggagaatcctgcgtgatccatgaaaatatccccggaaggaatgccctcatcaatggcatactgcttcatccggtttacctcgtcatagttcgcacgaccatggtctccgctcatgagaaggcggtccgacacaccgccctcatacagctctattcccttgtccagcctgtcccgaagcatgccggatggcgtgccgtcgggcctgacactgcagcccagtaccatgatacagtccacatctccaagggctgccgcatcatccgcgctgatgatattgggtttttctcgccggatcatgtacaggtttatgaggaacagaaccagacatcctgccagtcccaataccagaagtatcttaaccgcttttttcagaatcgctattttatccattccactcttccttctcttacggagcgccgacggggtcaaaaaaaccgctcttcccggcaaaatgcagagatttgcggcttttgatgcgtatgtcaggtcaatccttatttaacagcaattgcctcgatttcacacagaacgccctttggaagggtcttaactgccacacagcttctggctggtttggaagtgaaatacttagcatatacttcgttaaatgttgcaaaatcgcccatatctgccaggaagcaggtggtcttaaataccttgtcaaagccgctgcctgctgcttccaggatggcgcctacgttcttgcagctctgttcagcctgtcctgcgatgtcctctgcaacgctgccgtctgccggatttaccggtatctgaccggatgtgtagataactccattaacctcaaatccctgggagtatggtccgattgcgcctggtgccttttctgtgctgattacgttcattttaaatcctccttgttcttaggggaaatgcccgtacaatatgtattccccattatattgattttcattctcacgcgacatgcgcgaaccccaaaattattatatcggattattagagatgttgcaagataaggcggagattcttctttgtattttttgccgtgctattttttccatacaatgcctgcaaggaggtttcttcggaaaatgatactcttttttcagcataatgcatagatatgcaccaatgtattatgtaatatgtacgaattttaaattaattattgatttattttgtgtgatgtgtttatagttaggatgattaatagttaatatagttaacagtatacgactttacaactttttaagaaaaaaatatcgtacaggacactttggtgtataattagtttgccaacaaaatatacaaaggaaagtgaccctgtacgacaaactcattatacaacgaaaagaacctgattggtagacttcatcaatatttttccatctattttaaaaccttttcttcccctgccgcggagactttattcctactggctttatccatacttgccatggaatcggcggattccatccgttccctctaccgacattttttgtctgccatcacccaaaagtcactgactgctttttattatgcctgttcctactccaaagcagactattccagattcatgaatgtaacggcatccctggctttaaaactcattcctgactccctgaagtcacagccggtcttcttctgcattgatgataccatgatttctaaatttggaaggaaatttgaagatgtttcaaaaccttttgaccatgcagcacacaatggctccaactatctgaacggccattgctttgtcagcctcatgctttgtgtccccatatggagcaaccgtcggattgcttatctggcggtccctctcggttaccgcatgtggcagaaaaaacaatcgaaactggagcttgccgcagccatggtgcctcaggtcatgccctcttttgcttctcagaagaatgtcataatcctttgtgacagctggtacgccaagaaaaatctcgcctgtattgttgatgaatatccaaatcgggatttgatctgtaatgccagggctgactctgttatttatgaccttgccccatagccaaccggcagaagaggcaggcccgcaaagcatggggaacgcctttctattaaagaggacttcactctttctgctgaaaagataggggattactacatgggtgtacgccgggtccttaccaatatcttcgggcaaagggaggttcccgcctatgtaacttctacagagaaaaccggcggctccagacgcctgtttttcagtacgattattccagagcagatgcagatattctgcgcatggcaggaaaaggcgccgctaaaccagaccgggagtgagcgtatgcagttcatcccattattgtgttacacatttcgctggaatatcgaggtgagttattatgaacagaaaacgttctggtcgttatgcagctatatgttacgcagtcggaagggaatcgaaatgttggttaatctgatcaacatctcgtattgtgccatgaagatactgccatatcaggaagaatcattttcaaagtaccgtacagaaagtgtgcaggaatttcggtttgcccttagtgagcaaatccggcagcaggtattttatgccactttcgtgagaaatatcgaaaccagcataaaatccagtgtagttatgaaagctttaaaacagttaattcggcaacagtgctggcatttataaaagttgtaaagtcgtgtaaacaaaataaaccatatttttagacggaacacttactgaactttccaacaaatatttaggtaaggatttctccaaagaacttaccttggaagaaatccagcagtaacatatcaggagggtgaatgaaatggatgcacgttcaatcgaaatattaacctcatcattttggcctattttaaaagcgggaatctcttttacgatacctctgacattgatttcattcgcccttggaacaacgttagcggtcttcgtagccattatccacatatccaaagtgccggctttaaacaaaatctgtgagttatatgtctgggttatacgcggcactcctctgcttgtgcagttgttccttttatttttcggacttcccaaagtaggcgttgtcattaatccaatgccttcaggaatattggtttttaccttaagcatcggtgcttacagttcagaaataatcagggccgccatcctgtccatacccaaaggccagtggtaggcggccatgtcactgggaatgagctatccccagcagtttttaagaatcatacttccccaggcgtttaagatatccgtaccgcctctctttcacagctttattgcccttgttaaggatacatctctcgcggccaacataaccattccctagatgttcctgactacccagagaataactgccaggaattatgaacctcttctcatgtacattgaggtcggatttatttaccttatattttgtacggtcctgaattatgtgcagaaccggatagaaaataaactcatgctgactcctacggataagaaaaaaaatcaaagaaattacagatacacaggtctagggaggtgccatatgctgcagataaaacatttaaacaaatattttggagataatcatgtgctgaatgacatcagtctggaaatcgaatcgcacaagaccatggctatcataggttcctccggctcaggaaaatccacattgcttcggtgcatcaatcttctggaagatcaggctggtgtggacggtgtccaggtggaaaatatatgggatatcccctatctgcgcagtgagaatatcggatatgaaaccgccgctgccctggcagttggaatccatgcggtccgcaataaagtctccattccggttggagccgaatgccacatgaatggcgccgactgtgcaatggcctgcgcggtagcagccggagcaagctggatacgtgtattcgaatggtgtaatgcatttgtatcccaatccggcttcatcaatgccatgggcgccaatgtgtcccgcatgaggagccggctaaaggctgaccagattctggccctgtgtgatgtgaacgtcaaacacggaagtcattacatcatccacgaccggagcgtagcggaacaggccatggatatcgaatcccaggatggtgacgcagtcattgtcacaggatttgatacgggtaccccaccatccgtggaaaacatatcaaaatgcaaaaaatccacttcgcttcccatactcataggcagcggccttaacagcagtaatgtaaacgaactcctgacagccgcggccggtcacaccaaatttccatatgtgtcagatacctgcctgccccttcttctgttccagatgggcaagcaggtactctttcgtattcctctgaggttcctccaataccatatccagaagccgggccagcgtgctgcccacttccctgccaggcttcacccctgcacccataatgtcatgacccgagacagccagggtcttcaggctgatgcaatctccgttcctgcgaatttcctctgtcaaatctctgacttggcgcagccaccgcaattccccgtcattggacgccgcctcagaaaggcacatcttaagtgtgagcaaatcatcaaacagctccggctccatctggctcatggcacggcggatggatgccctggacggctccctgccatcctttatgacatccctcatgccatcttccataccgtcctgaaatcccaccttctttccctgccactccaccagaattcttaccctgtagatggtgtcattgtccagctttaaatccttcagtatatccgctgcctgggaagcactgcaattcctcaaaaaagcagcccagcgcatatgctttactgccggaattccggcgggaatggacggcacagcccaattccctgactccccggcataagccccgtgaaatttctctgacacatagggactgattccggtctcatacacccgcaggatataatccggatgggaactcagcagaagcttggtcagctccacctgaatccgttccttactcacatggaccatgttaggcgcaattgtcctgatggcctcataggtgcgttcttctatggagaagcccagctgggccgaaaaacggatggcccgcaggattctgagggcatcctctgtaaagcggtccatgggctcccccacgcaccggatgattcccttctccaaatcctccacacctccgaatttatctacaaatcccgtatggctgttataggccatggcattgatggtaaagtcccggcgttttaaatcctccaccaaatccggagtgaactccacactgttgggatggcgtccgtccgagtactctccgtcaatacggtaagttgttacctcatacccctccttccccatcatcacggtcactgtgccgtgctgtatgccggtatccacagtacgccggaacacctcctttacctgccccggcagggcgctggtggtgatatcccagtcccccggctccctgcccaaaagcatatccctgacgcatccgcctaccacgtatgcctcatatccgtgttcattcagtttattaataatctcctctgcgggaacgggtattctgatttccatgtctgtctgcttcctcatactatattcattttatgattaacactgccacggtcttattctatcagcttttcctgtccttttccagaaatattttaactacatattataacaacatattcagcgggtatggaaaatggcagatgcaggtccactcccgcatctgccatatctatttacttctttagtacgccttgccccaataaaccatcttcttcgccggcttcccgcagcaaacgcatttatcggacaggttctcctgctcaaagggtatgcatctggatgtggctccggccacctccttgattttctcctcacactccaggcagccgcaccacatggcttttacaaagcccggcttattgttgacggtatccacaaattcatcccaaccggccgctgtataggtgtgggcatccctgtgcttccttgccttctccagcatggcgtcatggatggtatccagcatttcacctgctcttgactccagttcatccagggatacgaagctcttctcatggttgtctctgcgcaccagcactgcctggttcttctctatatcctttggcccaatctccacacgaagaggcacgccgcgcatctcacagtcagcgaacttccagcccgggctcttgtccgtatcatccacctttacggcgaatcctgcctttgtaaggcgctccttcagctcatatgccttatccagcacgccttccttctgctgctgtaccggtaccaccataatctggaccggagcgattctcggaggaagcaccagaccgttgtcatcgccgtgcaccatgatgatggcgccgatgatacgggtgctcacgccccaggatgtctggtgtacatactttaatgtattatccttgtccgtaaactggatgttaaatgcctttgcaaatccgtcaccgaagttatggctggtacctgactgcagggcttttccatcatgcatcagagattctatggtgtaggttgcctctgctccggcaaacttctccttatcggttttctgacccttaatgacaggaatggccagcacttcctcacagaagtccgcatacaggttcagcatctgaattgttctggcctcggcctcctcggctgacgcatgggccgtatggccttcctgccacaaaaactccctggagcgcaagaacggacgtgtggtcttttcccatcgcacaacggaacaccactggttatagactctgggaaggtcgcggtaggagtggatgtcctttgcgtaaaaatcacagaacagagtctcagaggtaggccttacgcacatgcgctcctgaagttcctccagtcctccatgagttacccatgccacctcaggcgcaaatccttccacatggtccttttccttctctaacaggctctccggtatgaagataggcatgtatacgttctgcacccctgtctccttaaaccttctgtccatttccttctggatgttctcccagattgcatagccggccggcttaatcaccatgcatcccttgacgctggcataatcgcacagctccgccttctttaccacatccgtataccactgggcgaaatcctcatccatggatgtgatggcctctaccattttcttgttgtctgccatgatttttctccttttcgttatttacattgacccttgcatatcttacattatgaaataaaaagagccacccaatcccctgtgccgcgtgcacaagggaccgaatgactcggcggtaccacccttattaaccatcgggcttaaaacgtgtctgaaaattcattcccgccatctgcgcgccctcatggttctctcatcatccgttaacgccggacatacgctgcattcatcatacaggactccagggcgggttcagcatctgccaaccgtaaggacctctcacctgcggtcctctctctgtgacgtgcaatcacgcttactgttccctttccatgtcatatctatgaattggtcatttctttatgtaagaatgattttacgtcagttttgggactttgtcaaccacagaatcgccatatgaagattctgcggcagacaaaccctaaccgctcagacagtccccctctttctatgtctctctttctatgtctctctttctatgtctccctttccacctccttcgtccacgcctccaccatatcctctgtcagcagcaatcccagcggtcccagtatgaaaccaaaaaatccgaacaattccaatcccacatacacggacgccagcgtctcaaggggagacagccccacctgtccgcccatcatccgcacttccaggatctgacgcacaaaatagcacaccagataaagggcggtaagtgccagcgcctgcttccagtccccaacagccagccgaaggacagcccagggtatcagcaccgtgccggttccaaatatagggagagcatccagtataccgattccaatgcctgccatgatgtaatacggattgcggatcaggaacattcccccgatacacagccctgttgtaataaagagaatgattccctggcttctgaaccaggcctttcctgtctgcaccaggcggtttcctatcatattaaattccttgcggaagacggactggtcccggcggtcccgcaggtcctccatttcctgcaggcttaatatagctgccaaaaacaccaccaggcttacgatggctgcttttgccagacagctgagcacggacatggaattggccatgagaaagggcatggcagctgttttgcatgtatctaccatgtgatatagcatatccccggccatgtcggccacacatcccggcctcagccccatggcatgctccaccctgtggcagtttcctgtgagccacagatcaaactgttccagccataccggaagctgcaccataagcagtttcccctctgagcacagctttagggcgcccctgtagagcaccactcccaggacggacagaaccgccaggaattccacgccgccgatgacgccgatgggcatatgatgccgttttcccctcaccgtaatcctcatccggtaggacaggaacctggccgacggccgcagcacaagggccaggatataacccacgaaaaaaggagccacgaggggcagcagatatttaaatcctgcatacaccgctcccgtggttcctgttataattaataatttcttcagtttcttacccggcttttccatggactcacctgtttctgattcgtacttcatttgtaccctcatagtatgagccgatggccggaaaatattctgtttcctatgtacaagtgatgccggtaaattattcctttgttaccaggctgtccactgtatcctgtgttaccagctggttgtccaggattacataaggctcaacctgcttgccttccagataatcataggcagtgttaaggatggcctttcccaagaagaatggcggctctgcgatggttgcgtcaaccttgccggctttcattgcatccagtgtgtcgtcgatggcgtcacagccgatttttacgatttcatcggttctgcctgctgcttccattgcctctaatgcgcctaaaagcatctcgtcatttgcggcataaagtccgtcgatttccggattggcctgaagaatattctccataacgctcatgcccttggctctgtcaaaatcagccacctggcaggccacgatttccatgtccgggttgtccttcatcacttcgttgaagccctgggaacggttctgggcaacgttagttcccatgatgccctgaatctcaacaatcttgccttttccgcctaaggtgtcaaccaggtactgtcctgccatacggcctgacttgatagcgtcgtagccaatgtgtgaaacaacctcgccgccgttagcctcgcggtccatggtaaagacaggaatccctgcatcgttgcatgcctcgatggaggaaacgatagcgtcggaatcacatgtatcgatgatgatggcatccggcttctttgtaatcaggttctccacatccttcatctggatggtgggatcgtcctgggcgtcggtaatatacagttcaataccgtgctcgtcagcagccttctggacaccgtcctttacatccacaaagaatgggttggtctgtgtgttcatggcaagaccgatcacatacttctttccgcttccctcttctgaaccggtattttctgcctcagccgaggtatcctttgcctcatcctttgcctcatcctttgcttcttccttggactcctcctttgccgcctcagtagctgcggcggcggtagttacccctgagcctgagctgcatccggccatcagtgaacacgccattgctattgccaatacagttgccccaatttgtctcctcataatacaatctccttttcttaaataaatattttgtgacggttttgccgtttcatggataaacaggatgaaccggcagaaccgcaggtaccttatccttttcacccgtttccgggctttactgctctgcatttacactactttgtgttaactctgttttctatctgctattccgccttagccgacaggtcctttaccttcttgtccaccaggaccgcaatcagtatgacagcgcccttcacaatattggtggcatggggatttacgttcataagcgtcaggatattatcaataatacccataatcatggcgcccaccacagttgggagcacaaagcccacgccgccgcttaaggacgtaccgcccaggataacggcagcgatggcgtccatctcaatgccggtgccgctggtggactgtgccgaaccaagccttgctgtcagaatcacgcctgcaacgccgcacataagaccgttaagcgtataagccatccactctgtgaaacggacagaaataccggacagacgcgccgcctcccgattgcctccaaaggcatagatgctgcggccgtaactggtctgtgtcagcacatagtgggcaatgaggaataggatgataaggatgatgacgggaaccggcactccggcgactgttcccttgccaaaaaacttgtaggcatccactttaatgggaataggggagccttttgtatatacaagaatgcatccgcgaaggagagtcatcatgcccagggtggagataaagggaggaatctcacacactgccacaaagaaaccatttacggcgccgcatcctatgcctacggccagagccaccagaatggccgctcccgcattgcctgtggattccaggataccggaagccagaacgcctgccagtcccaggatggagcctacggaaaggtcgattcccccggtgagaatgacaaaggtcatgccgcatcccacgatacctgccactgtaatctgcttaaacacgttgaacaggttggccacgcttaagaagctgggggacaatatggttgcaaatacgcagattaccagtaaaatcagcacggagcggtagatattgagccggccgattaattttttcttatttacactattcattttcactgacacctccagatgcatgggctaagataatttcctgattcatctctgattttggtatttccaggaccgtatggccttccctcatgatgactacccggtcgctcatgccaatgacttcgggcaggtccgttgaaatcagtataatgctttttccggccttggtgagctcatccatgatttgataaatctccgccttggcccccacatccacgccgcgggttggctcgtccagaatcagtatggacgggttggcttccagcaccttggcaaataccaccttctgctggttgccgccgctgagtttaccggccagctgctgcaggctgctgattttaatgttgagccgtttaacctgtgcgttaatccgcttagtctccagcttcttatccagatgaatgaaatgggttatcttatccagtgatgacagggaaacattttccctgatattgcgtatgagcaccagcccttcctgcttcctgtcgtcggacacaaatccgattcccgcttttaaggccttctttgggctggaacagtctttcttttccccgtttatgtaaatctccccggagtccataggaagggctccgtatacgattttagacagctcgatggttcctgaacctaaaagtccggccactcccaggatttcacccctgtggagcctgatgttcacgttgtggactccttttccgcagatattcttaagctccagcaccgtctcgtcctccctgtaatccctctcaggatacaggttggtcacgctgcggcctaccatcatggaaaccacctcgtcgtaattggtgtggcctatgtccttggtagctatgtattttccgtccctgaacacggtcagacggtccgatatctggaaaatctcatccatgcggtgtgaaatatacagaatggaaatgccctccgccttaagctccgcaatgattttaaacagaatccgaatttcttcgtctgtcagggcagcggttggctcgtccatgatgatgaccttcgcgcctatggtcagacactttgcaatctccgtcatctgcgattccgccacggacaggttgcgcaccttggtacggcagtcaaacctaaggcccaaacggtccagctcctcctgggcatccttgtacagctttttccagtccactgcgccgtatgacgtcttaggaagccttcccagatacatgttctccgccacggacaggtcccgcaccatgttgaattcctggtatatcatggcgatacccttgcgctccgcgtccttggtggaatggaacaccacttcctccccattgacatacatgtgtccggaagtatatccctgggcccctgctataattttcatcagggtggatttgcctgcgccgttctcaccgcacagggcgtgtacctcgcccctcctcacatccagatggactccgtccagagctttaacgcccggaaatgtcttcacaatcgaatccatccgcaatactaatttttcttccatgttacccctcccttgctgctaagagttcctgagaatgcccctttgccagagcagtatcagtaagcgcatcccgccactaaaatcacgttggtgtatcctgtgaattcacctgtaaggacaatggcctttgcatccttgctgcgctccttaagctctgtatggggaatgtattccaccggaagtccctgaggcagaagttccagcgctttcttgtgaaagtccggtgtcacgttcagcgcctcgtcagcaaacacagcgccctccaccacgatatatttgagtatctcctccagaacatccaggtaggccggatcaccgggcctccagcccaggtccacgcgctccactccctttggaatgggaagtcccgcgtccccgataataatggtatccctgtgcctcagctccgccagcaccctggccagctgcggatgtaatattcctgtttttaacatgtctgtttccccttctactgattataattcgactgattataattcgactgattgcagttttttgattgtggttcgtttggttctgattcttatgattgctctttgacaattcccatgctaacagggctttgcgccaaccatccatagtctaatggtctgcagccatgaatgcgtcaatctcctccctgaccggcatggagggcgtagtgccgattttctgtacggacagggctgccagggcattggcaaaatcagctgcttcccacaaatcctttccctctgccagggctgccagaaggccgccgttaaatgcgtctcctgctccggtggtgtccaccgcgtccaccttataagcgggaatgattcccttcttctctcccgtgtttatgtatacacctctctggcccagtgtaatcaatacattctttacccctttggagaagaaccagtccgctgccttgtccgcggcttcctcgctgtccaccctgatgcctgtaagaatctccgcctccacctcgttgggggtaatcaggtcaatttttcccaaaagctcatcgctgacaggctgtacaggggcggtatttaaaatgaccttgacgcccttcctgtatgcggtatccacgatgcgctccacagaggatacattggtctccagctgtgtcagcagatattcggactggcccaccaaatcctccagggaatccacctcctggtccgtaatggtattgcaggctcccaagattaccacgatttcattctggctgctgttctcatccaccataatcagggcgcatcctgtctccgttgtatcggaatacaaaacccttcccgtgtccatgtgaagctcattcatagtattgagggcaatatcggcaaacgcgtcctgtccaagctttgtcaccatggtcacatccgctccggccttgtgggccgccacgccctggttgaatccctttccgccgggtcccatcttaaacacggtccccttcaccgtctcccctgctgccggcaggtgcggtgtcctggccatcaaatccaccacaaagcttccgaataccgttactttcttttccatatgttccataatatactctctccttaatccatctttccggcgcgctccgcacacgcttcatgccattcctgcaggcggttccccaccggcgatcctgcgccggcagtttcccagcagcagttacccagcagcatttttccatcaacagttccccatcagcaggtgccccatccgcagttttcctgccggcagccaacactaaatcagtacaatcccgttgcctgctccgattctgtccgcccctgcctcaatcatagccgcggcgtcttccggtgtgcgtatgccgccgctggcctttaccccggccttgcctccaacggtttttcgcatcagagccacgtcagctgccgtagccccgcctgtgctgaatcctgtggaggttttcacgaaatcagcccccgcctttactgccagctggcaggctcttaccttttcctcatccgtcaggaggcaggtctctatgatgacctttaccactgcgcccccagaggcttttaccacagcccggatatcctcctccacaaaggcgtcatctccgtccttaagggcacttatgttgataaccatatccacttcatccgcccctgcctttacagcctcagaggcttcaaaggcctttgcgctggtaagcatggctcccagcgggaatcccaccacgcagcatgtctttacgccgcttccctttaactgctcagccaccagcggtacaaagcaggtattgacacagacagatgcaaatttgtgctcccttgcctcattgcagtatcttataatcgtatccttgccggcatccgccttcagcatcgtgtgatcaatcatgtgttcaattcccattttcattctccttttccatttgaagctcttattaggtttaaattgtaatatatatcttctgtaaccggttacatgtctttgtaaaaaaatatgaccggctttgtatttttgtgtaaccggttacagatttgtgcagaaaacaatctgacttgattgtcaggttgttttcctgtgttctgaaccccgcaggattaccttataaggaatagtaatccgttttcctttctggcggctctttccggaatcctcaaagcactcctgaagaagcctcatggcttcccgcccctgttccctggcatccctgtccaccacggatatcctgtagtcaatcatccgcagggcgtcaatgtcatcgaatcccatcagggaaatatcccttcctatcttaaccttgttttccgtcagatacttaaggcatcccagggtggacaggttgttggacgtaaagatggctgtgggcggttccttcagtcccagaagccgtccggtacattcatatgccttggcaatcttaaaatcaccgcaggcaacgtattcctcagggacagacagtccgctgtcctccatggcctgcagatacccctgacaccggtctttgcccggtttggaggtctcagggccggttataatggcaatccgctcatggcctgcctttattaacgccatcactccgtcataggagccctgctggttgtccacaaatacgccgtcaaactgggcccccttcacatcacggtccaccagcaccaccggtatgccggattcctccagacggagcaggtaatccctggtaaccgtgtctgtctctgaaatcggcgttatgatgacgcccttcagcctctggctttccacaattttcaaaaaatcatgttccttttccaacgtctcattggttcccagaaaaacaatattataatggtatgattcagccacttcgctgattccgcttatgaccttggagaaaaactcattctcaatgtccgggataatggttcccacgcttaagctgtcctgaatgctcaggcttctggcgatggcgctgggtacataattgtactcatccactgccttaagcaccttctgtctggtctcctccttcacgtatcctgaattattgaggaccctggaaatcgtagcggaagagacgcctgcccggcgtgctatctctttaatgttcatgacccttcccctcctattttcctgtaaccgcgccagaatcatctgtaaccggttacatatataatactaccacacagattattaaatgtaaatagtttttatcatttttatacaaaaagtcaatagaaggcatcactgatgcctccggctgatatacagcgttccgcgctgcattggtccgcttatacgagtaaggggagccagccaaaagactgcctccccttaaaactctcaatttatagaaaatctctttatcatatccaaatttctgtatgtaatgccattgtctaaccatccctatgcaaagaaggatataataagggccaccacaaatcccgtaccgcccaccagcgtctccatgatggtccatgtcttaagggtagtcttttcatccagtcccaccagtgatttcacgagccagaaaccggagtcattaaaatgggaacaaaccgttgcccctcctgccactgccgctgtgacacaggccaggtacagaggggacagggttgcgatttccggcatggctgcaatgatgccggcagccatggtcatggcaacggtcgcagaacccacagaaatacgcaccagggcagccaccacaaaagccactaccacaatgggaagggaggccgaggacaccgcattgccaatcacatcacccagaccggagttctgaagcatgaaccggagcacgccgccgcatgctgtcaccagaagaatcagtccggtaggctccagggacttggtcagcaccttctccagctcctcattgctgtatccgtggcggtatcccagaaggaccatggccacaaccgtcgcgatggtaagagccacaaacggctcgcccaggaatcccaacacgggctgtacagaggcaagggcaggcatcacctttgcaatggaattcaggataatgagaaccagcggaatcaaaataattcccacgattgtcccaaactttggaagcttggattcgtcaaaatcctcctggtttgcaatgtgttccggaaccgggatgtcatacttatttccacagatagtaccccatatgggcccggccactatcatggcgaagataccgcacacaatacctatcatgatgacccagcccaggtccacgcccagcatggtagccaccagcaccggccccggtgtgggcgggataaatgcatggcctactgccagaccggccagcaggggaatggcatagaacagagaggaacgtttggttctcttggcaagagaaaaggcaagaggaatcagaataatgagtcccgcatcgaagaataccggcatggcaatgacaagaccggtgattcccagagcccaggccgccttcttgtcgccgaattttttcaccatggtgacagccagtgtctgagcgccccctgatatctccaatatggagccgaacatggaacccaggcccacaagcagagcgattcccttaagtgtactgccaattccttcatttacagagcttatgatgtccccaaaaggcatacccgcaatcaggccgatggccactgcgcctaccagaatggaaatcattgcctgtaccttgaatttgatgattaaaagcagcagaatcaccagccctgtcagagccgctataatcagtctggtcggttccagagctgcagcagttgttgttgtcatacttattaccctcctataatttcacacaaatatttgccggccagtctccgccaatcagaccatgtatccgcctttcatgggagatactgcatgttcggaatagattttaagaacacctttcttatactttgcttccctgggtttccaggccttcctgcgctctgcaagaatctgctccacttcttccccgggaagctccttaccctttacgcctatgatttccagtacgcgttccggaatatcaatccggataaggtcatcctcttccaccagtgcaatgggccctccgtccgctgcctcaggtgatacatgtccgatggccggtcccttggatgctccggagaacctgccgtccgtgataagggctatggtcttgcccagctccgggtcagaggaaatggcctctgtggtgtagaacatttccggcattcccgaccccttaggtccctcataccgaatgaacacggcatctcccggctgtatcttcctggagatgactgcctcaatggcatcctcctcgcagtcaaagggtttcgccctcaggaccgctttaaacatttccctgggaacagcagaatgttttaccacggaaccctccggcgccagatttcctcttaatatggccacggttccgtctgttccaatgggctcctcaaaggtccggataacatcggtgcgcttcagaccccattttttcaggtatccgtcgcatttgtcataaaatccattggccttaagctcttccagattctctcccaaagtctttcctgtaactgtcatcacatccagatggagcatggacttaatttcttccatcactgccgggacaccgcctgcatagtagaaaaactgtgcgggccacttaccggcaggccggatatccagcagatagtgggcgcctctgtgcatacggtcaaatgtgtcggcgtcaatctccagccccagctcatgggcaatggcagggatatgaagcagggaattggtagagccggatatggctgcatgcaccatgatggcattctcaaatgacttcatggtcacgatatcgcttaccttaaggcccttcccggccagttccatgacctggagaccggccttatatgccatttccctcaggtccgcgcaggttgccggcatcagcgcagagccgggaagcatcagacccagtgattcggccatgatctgcatggtggaggcggtacccatgaaggaacaggcaccgcaggatggacaggcattgtgcttataataggtaagcttttcttcggtaatttcacctctctggcacatggctgaataagcaccaatctgctccagagtcaacaggtcgggacccgcatccatgacaccgccagtcaccacgatggacggcatatcaagtcttgccagtcccatcaggcaggccggtacggatttgtcgcagcttgcaatgaacacaccgccgtcaaaccctgtggaattgccgtgaatctcaatcatattggcaatcatatccctgtgcgcaagggaatagttgatgccgtcatgcccctgggcaatgccgtcacatatgtctgtggtaaaatacctggctccctttccgcccgcatccgcgattccctgcatagcttcattcactaactggtccaaatgggcgctgcccggatggctgtcgccaaatgtactctcaaccataatctgtggtttgtccaggtcctccaccttccaccccatgccgatttttaacgggtcgttctccggtgccagcgctcttactctttgactgttcagttccataaaatgcctcctctttttcttcgcatctgacgtctgacttatttgtagttttatagtagcatttctggattattctttcaagtcgtcagacttgttttctacttaattgtcaaaaaaatttaacaaagttgtgcattatacacaattgcacgctgccgttttcccagtatattacattccccttattttttgccatgtatgtcttacgtctgtgccaaaagttgtcagatgtatttgtttttctcttccaattagccgcaaaaaaatacctataaggaaaagtattcccttttatctgtttccgggagatacgttaacttataggtattactgcttattgatattaccaatatacccaaccctacgcctcacgcccatccctcatcaactgcctaatcatattcctgttaaaagtcatatgcatcatcatggcggtcttggcaccgattgggtcgtgctccgcgatggcatccgtcactgccctgtgggtcatgatggtctcgtccgtcagctttttatgggttacattgacaaacataaggacagccgtatcaataatgggaatcagctgttccaccaccttattcttggagcattcagccacacaggtatgaaaggcgatgtcgtcttctatataactgtctccaacctttattttccgttccacactgtcacacagattcctcagcttctccacatcctcctctgttgcgttaagggccgccatctctgcgattcccggctccagtatgatgcggacatttaccaaatccagagccagggccatcttgtcctccacagcccccaggcccaggggatccatgtccaccggcgtagtactgaccacatacgtaccagaccctctcctgacttccaggattcctctggaaatcaaaagcttcaccgcctcccggatggtactccttcccacgccgaacctgtctcccaactcaaattcattgggaagcttagctcctacggctatgggtgtgtccagtatatactggtatatctgctcctgaacctgctctgccagcagtttgtttttcagattggacagttctcctttgttggccttctgcattttcctaaagacatcctttcccggttattgctgtgtgatcgaatcctatttattctaacatattttaaaccggtttacaaatacatgtatgaatgcgccaactatccatccggcagtccggaagactttcatcgaccggctccggcatccgtttaaaaggaaggcccggaaccgtacacagaaaattaatgtatcttggcttcctctctcagcaaaaacacattcccatccatatcatagaactgaaacatgctgccataaggcattttcatgatatctccggtcccacttccagccatttctggtcagcacccatctgctgctccagacgcacgataaaacccatcctttctgtccagaaatccctggcttccttttggttcttcacatacaatgttattttttcaatagagtcaatcatgattcgcctttcctcatttccgctttctcttttaccataaataatgcccggcaaacaagattttcattcgatacaaggaagaaaagaaaaaacagcagctcccccggataatattccagaaaagctgccgttgataaattatttatttaagtataccatatgctatttatcactgtacttattacatatcttcaccaccaggccgcttagggcaagcagtgccatggcattaggtataaccatcagaccattgaagaagtccgccaaatcccataccaactccagcttcagggcggaaccgataatgatacaagctaccactaataaggaatacacctttgctgccttgtcgccaaacagatacttcgcattgataaggccaaagaaatgccagcccagaatcgtagagaacgcgaagaataaaaggcagaccgcaacaaatacaataccaaaggtaccaaatcctttcatgaacgcagcctgtgtaagagcggtaccgttcttgccagactcaagagcgcctgtggtcagtacggaaaatacagtcaggttaaggattacaaatgtatcgataaatacgctgatcatagcgcaaagtccctgcttatgaggattctccgcagttgcccttgcatgagcatgaggtgtggaacccataccagcctcgttggagaaaaggcctctggcaacaccgaaacggatggcttctttgactgcaatacctgcgcctgcgcctaatactgcctgaggatcaaatgcgccaacaaaaatcatcttaatagctgcaggaagattagtaatattcattataataagaatcaggcttcccacaatatacacgcctgccatgataggaactaccttctcaacaacggatgcaagcctctgtgttccacccaggaaaacaaatgctgctacggctgctacgataacgcctatgacaaccggagaaatagtaatgttaaatgctccgaaagcctctgtaaatgcagcgccgatagagttagcctgaaccatgttgcccatgaatcccagcgcaagcacaataaagattgcaaataatcccgcaagaaccttgccaagagtgcccttaaaagctgcctttatgtaataaacaggaccgccggttacctcaccatttatctcagtcttaaagttctgggccagagttgcctctgcataaatggttgacataccaaagaatgcacttacccacatccagaatatagcaccaggtccgcctcctaaaagagcagtggcggcgcctgccaggttgccggtaccaacctgggctgcaattgcggttgcaattgactggaacggtgacatctcacctttttcgtgcttctctccgttaaggctgaggtgcccgaataccagtttccagccttcaccaaactttctcacctgaatgaacctcaagcggatcgtgtagtaaattccggtgccgcacagaagaacaatcagcagaaaactccagagaaagctgttaccttttgctacaagatttgtaataacgtccattcctaattccccctatacgtttaattggccgcatatagcggcattcatatttgtgctgatataatcagcgctccaaagagcgggatgtaaacatacaatagggacacccaccatagatgggaaagtatgcctcccttttgcctgtgagcatggaagattctatggacgcttatatctgtcctgcgctttcgcgctctcacaaaatctccctggagttttccttattcctccagcatagtactcaattattcacaaagaaaaagcctataccttcgccgttagaaaaaggatttttttatagattgtttttattttatcatactctatctataaattcaatgattgtttatctggtttttagagatttttagttaattttatggttttttaaaatttatctcattttcagcttggcagaatatttatggtatgtaaatagaaatggaaaaagctgagtttcctgtattccaagattcccagcttttatatttgcgattatatgatttcttatgagatgcggcggggtttattattcccactcggcgtgttctttgaggatattaaacatttttgtttaagttttatgtttattctaccgatattttatctcaattacatatattattctagcttactgatttactgttgccaaagtgttgccacgcttttatgataccaatctcattcggataaagcaatctttttctgaagtttattcctatctttccaacaaccttctactaatatccgaagcactgtaaagcactcttactacaaccactttataatcttcaatcacataaaaagcagaaaagttgtctatcggaaactgtcttaatcccatgctatgttccggctctgattccatcacccgcactcgctctggaaacatatctaatccttcaatcgcctttgcaattcggttatattgtcccattgcattttccgatgcttgtagttgctctgcaatataggaataaatttcttccatatcagccaatgctttatcggtaatttgtactttatactgcatgatatcaatgattctcccggaactttgcaaatgcggaagctgcatcctgcactctgcctgccttaacatcctcgtatccttcatgtagctttgcatgaatttcttctacattcatcagatcagcattaacagatacaggtgcttttggcagagttacagaaaaaggaataccaccagtcaacgaaatctgatttaaatacatatcgattgctgtcgacattgggattcctaaacgtgacaacacatcttctgcacgctgttttacacttggatttactctcaaatttaaagttgctgatttttccatttgcattcatctcctttatctaattgtaacgcatttgttgttactattcaactgtaatttgcaatattatttaccaagcactaaatcatatctacatcctatatcagttatattatcatttacatctgttattgtatgataaaagaaaaacggtgatttttatgcgggtgatatcttccaaatctaaaaattcagaatccttttatatctccaaaggctatatcaatgataaaggggcaaatacttctgtcatcgtccgaaagctcggcactttaaatgaactgatcaaagaacacgggcccacgcgcgatgatgtggtcgcatgggcccgtgaggaaacgcggatcgaaacccaaaaatataaagacgggttaaaagaaaaagctgtacagatcacttttcatgccgacagaaaactcccatatgaccagcaggtgcgctatcatggtggatatctttttctccaggccatttattaccgcctgcagcttgataaaacctgccggaagttaagggacagatacagatttaaatatgatatcaatgctgtcctgtccgatatcgtttacgccaggatccttgaacctgccagcaaacgttctacttttaaggccgtgtccgattttctggaacccccttcctatgaactgcatgatgtttaccgtgccctggatatcttcgggaaggaatgtgattttatccaggcagaactatataaaaacagccatctccttggcataaggaatgacaggctcctttactatgactgtacgaactattactttgaaattgagcaggaagccggagaaaagaaatacggcaaaagcaaagaacaccgcccgaaccctatcgtacagatgggactgtttatggacggtgacggtattccgcttgcattttcccttttcccgggaaatgcaaatgaaaagacttctttgaaaccactggaagaaaaagtcctttcggagttcggatgccggaaattcatttactgcagcgatgccggtctcggctcagaaaaaatcaggacatataaccatatgggggagcgtgcctttattgtcacccagtccataaaaaaactgcgggcagaggacaaaggatgggcacttgataaaaaaggcttcaaaaggctttctgacgataaacctgttgacatttcaaatctcccggaagatgacagcggcctttattataaagatatgccttataccccgcataagctgcaccagaggcttatcatcacctactctcccaaatatgccagataccagaaaacaatccgcggccgccagatagaaagggcacagaagatgattaattccggcagcataaaaaggaacggaaaaacccgaatgccccggcaaggttcataggaaaaatggcggtcactggggaaggcgaagcggctaagatacatcattatcttgatacggataaaatctcagaagaaactcttcatgacgggctttatgctgtcgcgacagaccttttggatgacaatgtggcggatattttaaaagtgagcgagggtaggtggcagatagaggaatgcttccggatcatgaaaacggattttgaagcacgctctgtatacttgcagaatgaaacccggataaaagcgcatttcctttcatgctttctggcactcgttgtatacggataccttgaaaaggaactgggcggaaaatatacctgggaaaccatcttggaaaagctgcgtggtatggacttcgcaagcgtacaggagcagggctttatgtctttgtacaaaagggataaattaacagatgcactgcatcaggcctgtggtttccatacagactacgagttcattacgaaacggcacatgaaaacaattcagaaaaaaagtaaaggcagggaataaattaccatatattaaaacgaagcagcaaatccccacaaagcccatatttacaggtttgtggggatattttgtactcatcaactgtcaaagatgagattatactctatttacttactgtaattcaagaacaatataaaacgatttgctggctcctgaatctgatctgtagattcattcctctcaagcagtgggccttcgatgactcccattcccctaattaccagaaatttaccactgaccgtctccctgttatcaagcccttcattcaacaggactggcagttccttcttgaatactatctctggaaatatggtaaaacagttaagccggtccagcgacgcaatgggaagtccataccagatgatgtcgtctgccctctctgcggtgccccgcatcactatctctacgataacaacggcggcaacggccagtaccagtataaagtctgcggacagaccttcgttaccggggaccttgtctccactccggtccgttttgtctgcccctactgcggacattccctcgtccctaaaaagaccgtaagtttttttcgactgcacaagtgtgtcagcccaaagtgcccgttctaaccgcataacctttccaaggttgataaagagcaccttaaggaggagttcggtaagaatagatataagctccattatctttaccgggaattcaccgtggatttcttccgcatggacttggattccctgcccaggaacgcctcctcactcaagttttctaagcataacgctcacatcatgtccctgtgtcttaccatgcatgtgaacctccagctttccctgcgcaagaccgcacaggccctccatgacctctatggcatccgcatctctcaccagcaggttgccaacaatgccagaacagccgccgtggtcatcaaaccctttgttgaccattatgattacccgaaatcctctgtattcactgccgctgaaacctatatcaaggtccgcggcatcaaaggctacatctggtttattatggacgccgcctcccgctccattctcggttaccaggtttccgacaaccgctcagttggcccatgcatccttgccatgcgcatggctttccggggcatgaagaagctcccggatacgttccgtttcattgccgatggttacagcgcctatcctctggccgctttacaattcgctaaggaaccgggcgatgatttcaagtttaacatcacgcaggtgattgggctcacaaacaatgatgccgtctctaaagagttccgcccgtacaaacagatgattgaacggctcaaccgtacctttaaatcgacttaccgagtcagctgcggttatgataattacaacggtgccaactataacgtagctttgtgggttgcctattataattttctgcgtcctcacaggcacaaccattatcaggtcctaaacaaggtcgatctgctcagaacctcggcgaaatctgttcttagattccaagccagaggtaaaaacgcagccgtcccggagggacctgcccttgatggcacgccaaaccaatgctaccatgctgtgacaacgatggtgaaactgaatctgttcttgagttcttcgccatcggtaagacgttcagagcattggtttggagtgctgtcaagggtggcgtaaactgccggcaccttaccagtctgccattttcaaggttctaatccggccgttttttacggccttaggtttttcataactcacttgacactacctcctttttgtagtgttttcgctactttacatatcttcattatatgtggcggcttcgctattgtcaagtattttaaattgcaggtagccaaaaaatttgccacatggtataatgtagctatctcgatacatggaaggtgattaaaatgaccattggcgaaaaaataaaatattgcagaaagcaaatcggtatcacccaagacaagctggctgaactaaccggtatacacccagtttccgtacgaaaatatgagacaaataaaatgcagccacaacctcctcagttagagaagattgcagctgctcttggtgtaagttataacgccctaaacggtagcgatactgccggactccgtctggaaacagtcggcgatctgatgggtgtacttatggtgctttgtaattctggcatcctccggattaccggcgagcgtggggaagataagctattaaaggatgaaacagtatctatccagttcaatcacatcctttcctcttatctggaatttggctatttttccagaggaaaagaacatacattagccttgcaggacgctcttttaaatatcagaagttataaggtgcttaatgacctgttgaaatgggaaaagatgaatttcatctaccagagtgctctgaaatctgttggtgaaaatccaaatgaagctactcaagcagctattgatgaaatcgcggagacgaaagaaaaagtggaattggagttacaaaaaagtcaaatgctaatactacagcgaactccctgagtggcgtgtttcccctttctttggtataataaagaaaaaggggctgatactatgatgaatcctacgatgttcgatccgattgcattagatgcttggtattccgatgaaaataatgattccttactccaaacggaactggaacactatcttcaaaattatttttcctgtttttcccagcagccacaacgaaggttgttccaaacttttatacaagggcttttgagcccgttggaacgcaaatcgattgagccaattgcccttcacttttccggtgaaaagtatgtcagacccttgcagcagttctttacacgttccccttttgatgagcagccccttctggatacctaccaggagctcctgtccaggcagattggggcaggctgcggcatgttgtccgtggatgacacaagctttgtaaaaaaaagggaagcattccgccggggtaaaacggcagtactgtggctgcctggggaaaacggaaaactgccagtccggggtgttccttgcctacgccggggacaaaggatatgggcttgtggattatgaactgtacatcccaaaggaatggttcagcggggattattccaagctgcgtgaggaatgccatatcccggaagaaaagacatttgccaccaaaaaccagatagcccagcacatgctcaaccaggtaattaagagcggccggttccaggtccagtgggtggggtgtgatgcagcctatggaaatgaccacggtttcctggacggattggagctgccggaaggtgtatggtattttgcggcaaccaatgcaaaagagcaggtattcctggagtatccgcagcagtccttccccgaaacgaaaaggggccgtccccgtaagcacccggtactatctaatggcccgacatccgtgcgtgatattgcagaggatccatccctgccatgggaaacggtggtgctggcagaaggggcaaaaggcccaatcattgcagaacggaaattcctgcgttgtttttcctgccgtgcagacggaagccggaattatgtgaagccaggggatgaaatatggctttatctgaggaaatatgcaggtgatgaaataaaatatttcgtcagtaacgcccccgcggacctcccggtaggggaactggacagggcagcaacgttaaggtggccgattgaacaatgctttgaggaatgcaagagcaatctggggatgggggattatgagtgccgcagctaccaaggctggaaccgccatatgctgtttgtaatgataacccatctgtttgccacccagatacgggaaatctttaaaaaaaagcaatcccgttgacaatgccgatggtaatcaaactcatgcatgggataattgtatatacagtaactgatatgaaaaaaatagtaagttaccatatacgcaggaaccataatgcatatctatcacacagaaaaaccaaacttttaaaagttcgctgtagtactaatccaccaccaataattagtgtatgttttattggtaattaatctataatagaattatataaataaaggagcgtgttaaaatggaaaaacatatacaacaatttaatatccacgcatacaaaggaattcatgatttaacattagaccatttaaattccataaatattcttactggtgataacaatagtggaaaaaccagtgttttggaattactttcaagtctcgataatccccaaaatactggtgcttggttattatgttccagaactgatagcttacgaagtagaaacagattgtattttaatggcttttacaatatgtttcctattgataacgacataaaaaacatctcttacagttttgtagatgaagcaaatatattaaatactataaaactaatggcagaaattgaagaaactcagatttcagaaagagaaatgtatcgtctcaatggattacttagaaccggatccaccaaaagagatgatgaaataattgatgcactttgtatgcacttatacacttatattaacaatgacaaagtcaatgaagatagcatttatgactttcaatcgaaaatttcaagatttgttaataaaaaagttcgctttacaagaacaacctatgtttcacctgttgaccatgctactggtatgcttaatctcgattatatattatccgattccgaactttatgaagaaatgttaaatatacttcaagtatttgatgataatatcactaatatcaatgcgcttaaaaatgataacaatccattttttacagaatacatggtattaacaaagaatcactcaaaggctttacctttaaccgcatatggcgatggaatgaaaaaagccttgcttttattaagtgccgttgttagatctcgtaatggaattctattactagatgaatttgagacagctatacacacgtccgccatggattctattttttcatggttacttaaaagcgcattaaaattgaatgtacaagttttcttgacctctcacagtaaagaagccattgaaaaaattatgcaatgcagtgccgaattgcaaccatatattaacttatatactctatacaattttgaaggtaaaaattatgttcgtacgatgacatgccaagaggctatcaatgcacaagataatttaggattggagttgagataatgaataatattattttatgtgaaggatccactgattattttttattacaatattatatgagagaagcctatcagtggattgatgataaatcaattcaagcaaatgcattgaaattgccaaaacaaaaatcaagaaatctgattaaaaattctaatatattaaccattatgtcagtaggcggatgtagtagacttggcgaaggattaagagctgtgttagaccgtaattatttatctccacctgatttatcgaatgcttacagtaatatcgttatcattactgaccgtgatgaggcaggaaccgaacaatcctttattcaagtagtttccagcattctaatcgaatataatgtaacatatacagatacttttactaataaccattggattcattgtaaaatgactaatcaaatgggagttgatgaagaattttccatactcctgatgattattccgttcgaagaaaatggtgcaatggaaaccttccttttaaatgccataagcaccgatgagccatatgataaaatcattatagatagctgtaatcatcttgttgacaatgtagatcccgatgcaaaatatctttcctcaagacgatatattacaaaagcaaaattcgatacatatttttcaattcgcactcctgccgagcaatttgcagaaagacaaaacatattgaaaaatgtaaaatgggaacaatacaccaaactccagactgaatttgaaaaattaggcg

SEQ ID NO: 491 - DNA, 368554 bp, Enterocloster clostridioformis
  source 1..368554: mol_type = genomic DNA
accgggtttgcggccaggtggggagccgcaacggcaagagtctgtttggccgggaaggaaagctctggtgctgggagaccatgctctacctggttgggtatgaggacggggcggtatttgccggaaattgtgcggtggcggaaccgaaccgctttgccgcggctgctctgatcgggggagcaccggatgactattcggcaggggcgtttccctccagccattggctggtgcgccatgtgagcagtgactacgcgaaacgcaacgatcagattcccagcagcctctggctgatcggcgcacccgagacggctgtccggcaggctctggaatatttcggaagatcgggcggccttggccggctgcccggacaggtatccatgggagcgctgaaggccagctgctatgagaatgaggccaacccggctcagcgtctgctgctgtcaaaggagaccgggatcaccggcctatccctggcccacaccattctcgaggaatattttgagcacaccatccggtggaaggacgggccggacgggactttgggcttgcatctggggcgcagcggattttaccagaccccacggtttgtccaccattcggtcacagtgggctgtctggaatatgcctgttccctccatttccctgacggctgtccggcggacagggtgaaagggctgccgattctgttcagtgtacatggcagaggggagccggtatggctcttcgctgaaaagaacggatgggacgtgctggcggacgagactcgggcctttgtcctggtgtgcccggactccccgggaaacatctggcagctggagcgggacggacaggtctttggggccatgattgaccggctttgcgcggattacggcctggaccgtaccagggtatatctgaccggattctccaacggtggcgccatcacaagggaggtggggaccgcttttcccgaactgtttgcagccattgcccccagcaacgcccctgtcgacgcgccaggactggcggcggacagccctgtctcgccgggactgcttcgctccgggtatgagctgccctactgggtgtgcgtgggggacaatgaccccgcagcgggcacggatgtggacgaacagctggaggtcatgctggaggtcaatggctgccaggcgcgggccggcgccggttttaccacccgctttgcgcccgatgaaatccgcaccggtgagaactattacacctccgcccgcggatatgcccagggggagcggttcagaactctggtctactgtggacgggacgggctgccgcgggtgggatacaccgtgatgaagaatatgccccacggggcgatctgcgagcagagccgggccacctgggagtttctgcggcattttcgccggcctgcaggcagcaggcaaattgaatatctgccggattaatcggtttcatttaaatatctccacagggttgtccgtccaatgccaagtcttttggcagccagtgtctggttgccgccgcattgggagaggacaacctttacaatttcccgggtcatttcgccaagaggccggttgtagtcaaacaggtcggcggtggtgggcacatactgccgcttctccttctcgatgacctcaaacaccgtgtcacgctgaatgtaagcggtggaagtgagcatgaccagctccgccaatacccgctttaactgcatgaaattgtccggccactggtagctcatgagcagggccagagcctcgggggtaaaccctacgatctgtttggacatctccacattcatggcgttcagatacaggttggaggaaccctgaatatcgtcggtcagttcccgaagcggcggcatgtagacggtggtgcagggcagatagtcgataaagtttctggacggatccggcaggtcccgatccagtgtttgggagcaggagagaataattctattccgcttgtgggcatttgtgtccaccagaaaggacagtagctgctcctgctgatgtctggacagtgcctggaggttgctgataaaaatggtgttgttcttgtcgttgaggggcgaattgtaattgctgatgatatagttccacgtccgctcgttaagcacctggcagtcgatggtgatataaggatatctctgcatggagctctccagatagagtttggcggccagctggttttttccggagccacgctcacccagaatcatcaccggaagcgtggtctggttgatcatacggattttctcttccatcagccttgcgctggaggtcagggaataaaagctgctggaatacatgacggagacttctgtacaggtggaaaagcggataccgtgcttgcttccgcccaccggaaacggattctgctccaggcagaagatatagcagggttcctccaggaacgtggtttcctctgccgagatggaatagagcctattttcaatcatgtgaaaggctttggccgacatggagtgaggggactcagccagcttttttaaatatccggtgacggacgagatgtttttctcattgtaggtggaaaacaggatagagccgtcctgtttcatgatgactgttttcatgccctgcatatccagggccctggtgaacaggcggctgcgggcttttgtctctgccaacacccggcacatattgatggaataatcgatggcgatatcgatgctttccggcccggacaggatcaggatgggctccacccccgcttcccgtgccatcatctcggtgatcacatcgcacaggataaaattgcagcctccggccttgagctcttttaagacagggtccagttcgtccgggctgtggatggtaatgatgttcatgcgataattcatcatctcgcagagcacatgggccggctgagtgacagtggggtaacccaccacggcgtatgcctccgtcaggtttcccaccagcaggatcgcgcgcaggatgtcattgatggacagagtgatctcaatgacgggtatggaagcgattttccggatcagctcggcggtcccgccccgggagatcaggatatcaaagccctcgttcatatgctgcagggccagctgggccccgtcctccaggtttcccgtgtagacaaccatttctatatcttcgtattttgccgcctctgtgaccatggcgttttttaaattctcatagggcgcaattcccagtatccgatattttctttccataaacatgttcccctttcccaaatgacggtttaaactgtttcattatgaaaatatagtaccataaagagaaaatatatacaataatgtttcaaaaaagaacaaaaaacaaactgtttttatttgaaaccttttgcgaaaagcgatatcctataactacagaaagcgatcaaataaaatgttccaaattgaaacataaaagacagcaggaggtgaaacagtgactgaattgatgatcatcgcggatgatttcacaggcgctctggacgcgggggttcatttcgcggagagagggatcggaaccagagtgattgtcagcctggaccatgacagaagctgggaggaagggatcaggtccggggagaccacggtgctggtcattgacgcagagaccagacatgtgtccccggaccaggcgtaccgcaaggtgttcgcaattgcaaaggacgccagggaggcgggaattccctatatttacaagaaaacggattcagcgcttcggggaaacattggcagtgagctggaggccgcctaccgcgcggccggtgaaccattcctaagttttgtccccgccttgccgcagatgaatcggattaccagaggcggcaggcagtatatcgacggagtgccggtcagcaagagcgtgttcggccgggatccctttgagccggtcaccaaggatttggtgaaggatattatccgcctgcaaagcgaaattcctgtcattgagactcacggcgaggcgcagccgggcccggggcaagcgggaatcgtggtgtacgacgcaacaaccgaggcggatatcaggagaattggagcggatttaaccgtaacagggcagaaccgcctgatggcgggatgtgcggggtttgcggcgattctgcctgatcttctgggcctgaagcgccaggagccggagacggcggcgctggagcgcagattgtttgtgatctgcggcagcgtgaatccgattaccaggaggcagcttgactggggagagagggtggggtatccgcgaatctacatggcggctgaggaaaagctgaatccggagttctggaagtcggagcagggagccggcctgacgcgccggctgacacaggagagcagtgaaaatgactgcgtgattctggacaccaacgaccgtgagggcgagcggaacactctggagtacgccagggaattgggcatggacaccgggcaggtgcgcagcagaatcccggaaacgttgggcattattttgaagaatatgctggattgcgggctccatgccgttatactgatgacagggggagatacgcttctgggatttatgaaggagatccggcagtgggagctgcagccgatccggcagatccggccgggctgcgtgctgacaaagctgtactactgcggccgggaacatcacatcatcaccaaatccggcggtttcggggaagagaacctgctgtcggagttaacggaagaattaaaaggaaaatagagtgaaaggcgaagaaaatgggatatcagattaaaattccatcctgcgtgtatgcgggtgtgggaagtatcgaggaaattgggacgattttaaagcaggagtcgtcaaagaaggctctggtatttactgataagggagtggccggagccgggcttttggataagctgacggccgtgctggagcgtacaggcgtggaatacaaggtgttcgacgggctgaatccggaacccgcttacaccgatgtggagaaggttgtggagcagatgaaccgggaagatggagacatcattatcgctatcggcggcggcagcgtcatggacgcggccaagctctgctccctgttaaaaggctcctcctgcactgtgacggaccttctgacggatccgctgttggcgtcaaagcagatgaaaaccatcatgatccctaccacctgcgggaccggctccgaggcaacctgtaatgccatcgtagcgatcccggaggaacagtccaaaaagggcattgtgaatgcggagatgataccggattacgtaatcctggacgcacagatgattgcgggccttccggcctccatcgtggcagctacaggcgtggatgccctggcccatgtggtggagtgcttcacctcaaagaaagcgactcccttaagcgacacgtacgcggcggcaggcgcaaagctgatcttcaggaatattgaggaggcgtacaaaaatcccggtgacatggaggccagaagcaacatgatgctgggcgccttttacggcggagtggccattaccggcagcggcacaaccgcggtccacgccttaagctatcccctgggcggaaaataccatatcccccacggcgtgtccaacgcaatcctgttcgcccatgtgatggcgttcaataaggacgcctgcgccggccggctgggggtactctgcgacgcggtatatccggagcgcgcggctcttggaacagaggagaaggcggattacatgatcgggcggatcgccgcaatcgttgagaacacggagattcccatccatttaaatgcttttggtgtgaaaatggaggacctggatttcctggtggatgcaggcagtaaacagcagagactgctggtgaacaacaggaagaagctgagtctggaggacattcgcaccatttatttaaaagtgttgaaggaggagtagaaagtgactgagatcaagggaattatcgcggcaatgcagaccgccatgcatgaggacggcagtatcaatgagacggagcagcgcagacagatcaaccggcagatcgccgcaggcgtggacgcagtgttctgtctggggaccaacggcgagttttacatcatgtccatggaggagaagatccgtgtgatggagatttttgtggacgaggtaaagggccgcgttccggtgtacgccggcaccggctgtatcggcacggaggagacggtggctttgtccagaaaggcccgggaaatcggcgtggatgtactctcggtaatcacgccctacttcgcggcgatcagccaggaggagctgtatcagcactacgcccaggtggcaagttcggtggacattccggtggtgatgtacaacattccggcgagaacaggcgcctccctggcaccggccactgtaaagcgcctggcgggtgagttcgccaacattgccggagtgaaggattccagcggcaattttaacaatatactgcagtatatccaggaaacggagggcatggacttttcggttctctccggcaacgacgctctgatcctgtggactcttttagcaggcggcaagggcggcattacagccatcgccaacatccttcccaccgtcatggtggacatctaccagaactatttaaaaggcgatatggagaaggccagggaagcgcagaacgccatttccaggatccgtgagtgcttcaaatacggcaatcccaactccgttgtcaagtgtgcgaccaatctgatcggccagccggtgggaccgtgccgcaagcccttcggcatcctgccccaggatgcggtggaggcgattagggaaactattgacaactactatggggagtataaaaacaaataaccgtgcaggaaaggggaatggcatctatgaaaataatcggaattaccatgggagatccggccagcatcggcccggagattactgcaaaggcattatcggatccgtcggtctatgagcgctgcaaaccgctggttgtgggcgatgtcccggtgatggaggaggcgctgaagataaccggcctctccggcaagctcaaaatacataccatcggggatgtgagtgaggcgctgtttgagtacggtaccatcgacgtctaccacatgggtatggttgatatggacaagctccagcgggggaaggtctccgcgatggccggaaatgcggccttccagtacgtgaaaaaagtcatcgggctggccatggatcacaagattgacgctacggtgaccaatgcgctgaacaaggaagccatgaatctggccggccatcattactccggccataccgaaatctacgccgattacacaggaaccaggaagtacactatgatgttggcccacgagaatctgagagtggtccacgtgtccacccatgtttccctgagagaggcttgcgaccgcgtgaaaaaggaccgtatcctggaggtgatccgcatcgcccaccaggcctgccgccggctgggtatttcccagccgaagatcggcgtggccggcttaaatcctcacagcggggagaacggcatgttcggaagggaagagattgaggagattacgccggcaattcaggcggcgagagacgagggtatccaggcagacggaccggttccgccggacaccgtattctccaaggcaaggggcggttggtatgacatcgttgtggccatgtaccatgaccaggggcatatccccttaaaggtggtgggctttgtctacaaccaggaggaacagaaatgggatgcagtggccggagtgaacattacacttggtctgcccatcatccgcgcttccgtggatcacggaaccgcctttgaccaggctggcacaggccttgccagcgagctcagcctgaccaatgccatggattacgcaatccgcatggctgaaacagaggaaatggaatagatacagcacaaaaggaaggggaagaacaatggaatacgcaaaattgccgggattaacaccggacggaacgatgtattggaatgaggagatggggactatggaggcggtgcttcctccgggaggttacaagaccgcccacggcccggggcttttggagctggagaacggggatctgctgtgcgtctggtttgcgggctcctttgagggaaatgcagatgtaaacgtcatctgtgcgaggctcaaaaagggctcaagccggtgggaggagccggttttagtctcccacgatccggacagaagcgagcagaatccgtccctgtttgccggccccgacgggaaagtgtgggctatgtacacttcccagctgtcccgggtggaaggcaaggacaacatgcagtttacctctgtgatccgctgtcagaagagcgcggatgggggagagacctggagcgactacgagaccgtatttccggaggagggcagcttctgcagacaacccatccaggtgctggagagtggacgctggattttcggtaactggatctgtaccgactccgagctgggcctgactggtgatcccaccgcattccgcatttccgatgaccagggaaagacctggaaaaccgtggatatgccggagagcaacggcgcggttcacgccaatgtggtggagctggagccgggacatctggctgcgttcatgagaagccgcgcggccgaccatatctaccgaagcgaatccatggacaacggagatacctggactgcaccggtgcccaccgttctgcccaacaacaattccagcatcagtgcggtcaagctgaagagcggcagaatcgccgttgcctacaaccctacctgcacaccctgcccgacacccggcgtggcttcctggccgggtctgcgctgcccggtagccgttgcgctgtccgaggacggcggccttaccttccccatgatccgctatatggaacggggcgaggggtacatgggtgctgagaacaagacgaacaacagacagtatgaatacccctacatcatgcagggcgcggacggcaggcttcacctggcatttgcctacaaggaccgtctcagcgtgaagtacatgagcttcacggaggaagatgttatgggcaaaaagcgcgagacagtgggcctctacaaccctacctcggcaaaggtccggtaagaagccggccaaaaacataggagaaggagaaaaataaaatgacaacccaaatgattcttgctcttgcaatcctgattgttatgattacgctgaccatgtttgacgtacttcccttcggcgcgccgccccttctggcgtgcatgctgctggtggccaccggcctgtccaccgtatccgaggccttcgcgggtttcgccaactccagcgtcatcatgatcgccagttttatggtggttctggcgggcgttcagaagaccagagctatggacaaagtgaaagacgccctgatttccctggtgaacaggggtggctacaagagctacgcgctcctggttattgtggtaatggtcggcgccagcctggtgggcggcggcaacaccggctactacgtgctgattctgtccctgatttcgaccatcccttacacaaaaaaaatgcccacctccaagctgatgatgcctctgggattcgccaccaaccatccgctgattcccatcaacgtggcgctgtactatggcgtggcgagctctgtgctggagacggccggctttatggagccgatgtccatgatcaagttctcagttgtaaacttcgtcatggccgtggccttcctagtctggtcccttgtttcctacaaactgcttcccgaccaccccatcgcagcggccgaggaggatgcccaggcaaagattgaaaagaccaaagcggttcccatggagccctggaaggaaaaagtgaccgtgattgccttcgtcgtcagcgtagtaggtatgatgctgatcaacaccctgggcaatgtggcctacgtggtgcccggcttggcggctatggctctgctgttcatgaaagtagttgatttcaaagagttccgcgaaaatatgttcgccccggttatcctcatgatggcaggcgtcatcggcgtagcggatgccctggcaaactccggcttcaccgcaatgatcggagaggtgatcgccacggctctgggcatcaatgtggcgccactcctggtagtcatcctgttcgcactgctgaccagtacctgcgcaacctttaccggttccaacatgggctctgtatacatctttgcccccatcgccatcgcggcctgcatgagcctggagctgaatccaactgcagcagcggcagcagtggtggtgtccggatggcagggcggatatatgcctatcgacggtatgcctgccatgattatggggatgggaaaatacaagctgccggaattctggaagttcacagtgccgatgtatctgatccggattatcgcgctgagtgtggcggctgctgttatcttccctatgtaactgtttgagacaaaggagaaatgaaaatgttaatgtgtgtatcactgttcatcgtcggtctgatctgcctgattaagggcggggactggtttgtggacggagctacgggggttgcccgtaaatttcacctgccggagctgctgatcggcgccaccgtagtttcgatcggtacaacgctgccggaggttatggtttccaccacatccgcactgacaggccacagcgagatcgcctacggaaatgccatcggctccgtcatctgtaacactgcgttgattgcggccatcacagtggctatcaagccgggggaaattaaccggaaaacactgcgcactccggtcctgtttttcttcatcgccgcggtcatctacactggagtagcctatttcctgggctacttcagcagaaccatcggttttgtactgttggggatctttgtagtgtacatggtaacaacggtttcgcagatgaaaaacagtccgccggccgagaccggcggggaggaagaggggaaatccctgggaatcaatctggtactgctggtgatcggtgctgcgctcatcgccgtgggcgccaacttgctggtgaccaacggaaccctgatcgccgaggccctgggcgtgccggagtccgtcatcgcgctgacctttgtggccctggggacctccctgcctgagctggtgacggcaatcacgtccctggtcaaaggacacggagccctatcgctgggcaatgtaatcggcgccaacctgttcaacctggttctggtcagcggcgtttccgtctcactggcgcccttcagcgttccgcaaagctctgtcctccttgggcagaatgcttccctggtattagacattccggtcatgctggcagctatgctgctgctgacggtgccggctctggtcagaggcaggctatccagagtccagggcattctgctgccggttctgtatttcgctttctgtggaatccagttcacgctgtaatgaaagaggcggcaacacaaggattcttgaccatatcgacaatatcatgaaattcaataaggcgcagaagcggaggattgaaacttgcatgattcatgacatatgatgtatacggagatttttaaaggattgctgccatgtgatgtggcagcttttctttgcggatgaacgatgggaagcagtgattctgcggtaacaagatggagtgggagcgtacagatcgccagttcaagcacagtttttatgggaatgtaggaggagaagtgccgctgtgtttgatgaaattcttcgtcaggcaagacttatttaaatctgtaaatgagtatggacatggtctatgccttccggcacacagtaattgtaagaaatggaaataggataagaaatttatcatcaatagccgtcacacttgcggtaaagcggtttttagactatttacagtgccgctcttagtttcttaaacattactttattctcaaaacttaaaatataaaagcatatctgctagaattgctgccacgacacatacaaaaacaggacactttaatcatgctaatattccagcaattatacccccaacaatccctatatctggtcttgtagcgtctatggtaataataccgggaaagattaaagcagccatagcagtataatatggaatcatatctaagtggaaaagatgaacggcaaaatgtaatagggtgagaaatatgaagcaggacaaagagacctgttcttttttacggatgtagaaactgacaaccccacgcaatggcggcagcttgacagtctgcaagtattccgaatgacgcaatgtcaaaaagataatgtattgctggaaataatgtcgataagaataagcattttgtcccaataaagaaatagataatgcataaaaataatgatataataaaatccatatattgattattccgtattcaagagaagagaggtgagcgataatgaataaaacatatatcatgctaaaagatattcctgtattagagatagaaaattacagatgtaaaatactgaattatgagctgcttcccatatcgctgcgttatccggatgtaaactatgatgacgtcatgcacggctggactgagaaccgtaccatgaacataggcaggaccaacgctaaaaaactgttggctggttttcgtctcagccaaagtaatccgtatatggtagccaggttatttcattttgcttccctttccgactgttactggatgaaagacgcggaagaggcatttacatgggaacaggtaagcctgtttgaaaatccattggagaaggcagtaacatcaacggcccttctgggtaccaaccggacattccacacacttgaacaaagaatccatacgccggagttcactgctcaggggatggcggccaaagcctggataagggaagcggagggactttatctgtataaagtcggaaaaaaggaattgccggccagcaggatactggatgcgcttactataccccatgtaggctatatggaggccgaaaacagcggactggagaagatagcagaccggaatcatacagataaaatatataaaagtggggaaaaaatagtaaaatgccgtattatatcttccgaagagaccgcacttgtaccatgggaagactttcaggtatattgcagttaccatgataaaaatgaatatgatatggtaaagaagatggatgctgcgaattattataaaatgcagatagcagattatgtgcttggaaatgaagaccgccatggagcgaattttggattttacatggataacaggagcggaaagcttctgggcttatatccgctcatggaccatgaccatgctttttcagaagatgaggatattccgtcccagtcttcagaacaggatgagacattacagcaggcagcgtatgaggcgattaaccatgcggaggtatcatttgacaatgttctgggcatggaaaagccggaagatttagatgatgcgcagtggaatgcagtactgcagcgatgcggggaactgcatcagagggtggggatggaataacaggacgtgattgatagtgtgttatacgctctgtcagcgttgccgtaaaaatgctgttgccgccggtgagggcaagggcatttgaagcggcaggaaaacagggctgtgattgcgtggcgtgaagccgcaagcgcaggactggtttcatcagcagacagggcgtatatgaaagccccgtcccctgtccctcgtcccacgccccgacttgtggacaaagtgtcccgaagtgtggccacactcccggaaaagtagcaggacagcgggccaccctctttctgattttggggcgtttccttttctcaaaattaaaatgggcgggaagccgccatcttagggcttttccgccttgattgcccatcagcaaagacaggtgggactgtcaacggcggcgcatgaaatgcgccgttcatcttgaccgttgactggctcgactggctttgttacctccccgacaaactggggcttatacagattgaattaaatggtgttcaaaaaaagtttcaaaagtatttgtagcaccaccatgttctacaatttttccatctataactttatcaatatccacccctgtaatatccaaaaccttatttgtaggtgttattccgagaaattctcccttatgagtgcctctcataataaattctgaaataacataatcatctacttcatattgacggataattttcataatgtaatcaggataagtttttttcaatgctaataggtgttctttcattccgtctattcctatgaacgtttctttttctccaattctttgaacacagtcctctgatatatatttagagatttcatcaagtaaattatccgaaataataacttcatagaaatattttacaatatccttatttttcatgcgaaacctccacaacttctaaatttatcatattaactatgacaaattattatggatggaaaaggatatggaggttacgaattgtgaggcttttctcactgcaattgaccatggaagtctgaccgcagccggtgttttcctgggttatacttagtcaggaatcacccggatgattaatgccctggaggaggaagtggggttcccgctttttataaggacgaaaaaagccgcgcccataaccatgctctggagataggggctgatatccgcggaattttaagcggcgctctgaccattgggagctattacagtgtttcggccatgtggctgccgcccatactgaagcggttccggcagttgtatcccaatgtcaggattgacattaaggagggcggaaaccgcgagatgacacgatggctgaacgagatgtccgtggactgctgttttttttgttttcccttacataccggtagaaatataccaaggggtaagctataataattggaggattctaacagcaggaatatccgggtaaggaggcggtctacatcacactgagaaaaaaactgattctggcatttacgatactgattatcatattaggctcctggattggttatttttcttatcaggacgcaaaggcaattgtatatgccaataaaaaaagtgagatggcggataccatcaaccgtatcgacatcgacatcaacacatgggtgctccaggttgtccggctggctgagaataccagcgagaaccaggctgtgatggaattgctggaaaataaaatgattacaaaacagcagagaaattacatagatgaatggttcgacaattttgcccaggtgtttgtggctgtatccgatattcatatgattgatagggacggacagattcgatacagctatgttccttatgagggatatgtagataaagaaaggctcaaagcctgcacacaggaagcagcggaccggccggacagggagacatggctgggcattggacggcctctctgccgggaagcaggagaagatgtggtcaccatggtgcgggcggtgaatgcacagggggaagggagtaccgggggtgcggagggcattctggtgattgaattgaatcccgatattttcagcggccttcttcttaataaccacagcatgttccccaatcagtataccctgatcgttgaccgtaacggggatatcatatctaccaataagaaagtagggcatacctggctggatgagatagaagacaggtttggacagggaatcaggaaattcgagctgcgctgggagggaaaggattactatgtatgcggccagtacaatggcgtgaccggctggaagacattttccattgtatcattgaatgatttctttccacaggccagtgaattacagagagcggtctttaccatggttgcggtggctgtgctgctggcggcggttgtcattttgctgatttcctatacctttacacggcctatcggaaagctgatgactgccatgaaggagatagaaaagggagattttaaaatccaggttgtcaataaaagccgtgatgagattgggcgtcttacggagtcttttaatttcatggtcagcaagattgaccacctggtaaaagaggtttatcaggaaaagattgctcagaaaaatgcggagctggaagcgcttcaggcccaaatcaatcctcatttcctttacaatacgctggattccataaactggatgctcatggatattggcgcagatgacatcagcgatgtagttgtctccctgggggatattcttaagtactccattcacggcaaggatgtgctggttccccttaatgaggaagtacaatacattgaaagttatttgtgtatacagaaaaacaggctggaagaccgcctttgcacttcaatggagatacagaaggaggcgagagcttgtatggtgccgaagctgattctccagccaatggtggagaatgccattctccatggaatagagcctatgaaggatgggggacgggtcaggattactgccggactggaacagcagaatttgctgattaccatagaggataatggaccgggtatggccccggaggaactggaacagtgccgcgcggctgtttacagcgagtccggggccacggacagcataggcatgcgcaatgtgcaccgaaggctgcgtctgcattttggggaagaatacggactggccattgagagcaggcatcaggaaggaaccattgtgactttgcggatgcccggaacaagattgtcagcagaacaggagcaggggacagatggacatagtgattgtggatgacgaaccaaaaatcaggaacggattgagtaaactgctggacggcagaggaaactggcatgtgaccggcacatatgccgatgccatggatgcactcaaaaacatggccttttgcagcccggacgtaattatcacagatatcaagatgccggaaatcaacggcctggacatgattgaccgcatgagggaaacggaccaggaggcgtatatcatcatactcagcggctacagtgatttcggctttgcccagagagccattgaactgggggttacccggtatctgacaaagcccaccaagaggcgggaactgctgggggttctggaggaaatcgagggaaagttgtcagagaaacaaaagggtggtgaggaaaaaaaagaagtttcaaacctgatggtgcaaaaggccatggattacattgcccttaactattcagagaaaatcagcttgaaaaatattgcggaagagctctatctttctcctaattacctgtccgaattgtttaaacgccatacagataagaatatttcagaatacattacgcagtttcgcctggacaaggccaggcgttatctgcagcagcctgaatataagattgcggatgtgtcggatttagtgggttttggcgacccaaggtatttcagcagcatgtttaaacgtcaatatggcatgactcccaatgagtaccgcaacaggagcgtaaaataattgacaaaacagtagatttgatgcattgaaaattcgatgttttccactaaaataaaagagaatcaataagaacaaaggtatttcggccgaagacctggtttaaatggaaaacggaggatatatgtatgagcgggtttcaaagacagaacggggatattgttgagcttactgctgccggtttggaggcagtcagaagccataagaataactatgcggactccaccagaccgctggctatggatgagcgcggatggtctgcctgggatatgggaaacctttggattggcatgctggtctctatcgcggtttaccaggtggccagcggcctgattgtatccggcatgtcctggggggaggcgctgtttacgattgtgctgggacatttcctggtgatggtatttgcggtggttctgggacatttcggtacaaaatacggtttgacttatcccatgctttgcaagttggtgtttggttccaagggcacagtggtgccctctctggtcaggggaatcctgggctgcttctggtttggcgtacaggcatggattggcggtcaggcagtgaacgccattctggcagtgttccttcccttctggaatggactgggatttaagggattgtttatttctttcctgattttctggctgatgaatgtgtatattgcgggctccggatcaggcgccgtgcagaagcttgagaagtttgccgcgcctgtgttgattttactcagctttattgtaatcatatgggggatgtacacggcagactggagcatctcaggactgctctcagaaccgtccatccagggaaatcccgatgctgatttctggaaattgttttttcctgccctttcatccatgattgcctttgacggcggtatcgcattatccatggcggattttacaagaaactgcaagacacagaaggcgcagatggtgggccagctggcaggagcgcctgtcatgacggcattcatcgcatttgtaggtatttgcggcacagcgggcgcgtctctggcctttcaagaggccatatgggaaccggcggtccttgtgagcaaatttgataacccggctattgttattatcttttctctgttcatcatcatggccgtgctgaccaccaatgtggctgcaaatctggttccgcccaccaacgttttggcaaccctgtttgcaaagaaaataagctataaaaaggcagctcttattgcggctgtgctggcactgtttgcccagccatggaacgctctggccagcgcctatgacctgatttataatgtatgcggccttttgggagcactgctgggacctatttcggggctttatctggtttcctatctgtttgagcacaaaacccacgtggatatggtggacctgtaccgcgaagatgggggaaggtattattataaggggggatggaatacggcaatcattgccattttcctggctgccacggccgttatcatcgctggaaaatacatcactccattgaattttctgtttgacaatgcatatgccataggcagcgtgggagcagggctgttatattatatctatcttaaaattcaaaataagagaaatggagtgaatgaaaattatgaagacaatcatcagacaaggcacgattgtgtcaccgagtgaaatttatgaggcggatatactgattgacggagaaaagattgcatgtataggcaggaatctggaatcagaaggagcaaaggtcattgaggccaggggaaaatacgtgattccgggaggtgtggatgtacatacccatatggaccttttggcaggcaattcacgggcagtagatgacttttatgacggtacggtggcggcggcctgcggaggtaccactgccattgtggaccacatgggatttggaccggatggctgcaatcttcattaccagctgaatgaataccatcatctggctgacggtaaggctgtgattgactatggatttcacgggactgcccagcatgtgaaccaggatattctggacgagctggagggaatgatggaagatggagtgtccagcgtgaaggtatacctgacctatgacaggcgcctgaatgacggggaggcccttcaggtcctgaaacgcatgaagaaactgggaggtgtgactgcatttcactgcgagaaccatgaggtggtggaatactatcggaacatgtacagggaacagggctgcaccagtccgtactatcatgccaagagccgtcccaatctggcggaggcggaggctgtggccaggattctcagtctggcgcgtctggcaggcgatgcacctgtttatatcgtacatctgtcctgcaaggaaagcctggaggcggtactggatgccaggaagaaggggcagaagaatatatttgtggagacctgtacacagtacctgacactgacagaagaacggtatatggataaggacggcttgaaatatgtcatgtctccgcccctgcgcaccagggaagactgtgaacggctttgggaagggctggcggctggtgatatacaggtagtggcaacagaccactgtccatttaattacggcatagagaaacagctgggcagggatgacttcaccaagtgtcccaacggggcgcccggtgtggaggagaggatgtctgtcatcttctcagaaggcgtgatgaaaaaacgaatcagcttaaaccgttacgttgaggctctgtgtacaaatcctgccaggatatatgggttttatccggagaaaggaattttgcagccaggatcagacggagatttggtaatcattgaccccaagaaggagtatgtgctcacccatgaccgtatgcacagcgcggtggattataccgcatacgagggtatgaagctaaagggacagatagagcttgtgatgcagagaggcagcgttgtggcggaaggaaatgtatttaagggaaaaagaggcgcaggacggtttattcacagacggccacatgataatgcgtaaactgtcttttacataaatttacacaggcatctgacatcgggaaacggaatttgaaaacgagggcggtgcacaatgaaaatttcagaaataaagatttcgcgctttcttctggcactggcaggcgcgtcaatactgacagccggcggatgccgtcaggcggttgctgattcgcctgccgccgaacacagaacagagaaaatggttgcaatccttccgggaatgattgaggatcagagctggaataagataaactatgaaggcattctgaaatgccgggagaccctgggagttgatttggaatttgtccagaatgtgacggaaagcgattttgaggcagtcctgacagagtatggcagccagggatacggtctggtgatggcggccggctctcagtttgacgacgcggtctctgtggtggcgcccaggtttcccgatactaccttttgcgtggtcaacggttccttttgccagggaagaaatgtggcgcccatctttccgaaggaatatgaggccagttatctggcctccatcattgcgggcaacataacccgaagcgggatactcggcattatagcgggttatcccaatgcccccatggagcatcttctggatgtgtatgagaaaaatgcaatggatattatttcacagaggggaattgaaaatccccagacattaaggagttatgccaacagctggtcaaatgtggacctggggaagaagatagtggagcagatgattgacagcggggcggataccttgtttatctatgccaatgaagtggggcttggatgcattcaggctgccaaggaaaggcaggtcagggttatcggattttctgataaccagaacgacctggagccagggaccgtggcagcctctgtctactttgacttcggtacgctttacagatggaccgtggagcagtatatggacgggaaaatgcagggcaacaaggtacatgaaataggcatccgtgaagggatttttgttccggtgtttccggagggaactccggaaggtctgagggatgcggtagaccagggaacctcagatttccttaagggcaaggtggatttgacccaatggttttcagattgaatattgcagtatcccccccaaccgtctgagtccctcctccaaatccttcatagacggcggggttatgacggaaatgcggacagccttttctgccggtttgttgcccactgaaaaacgttccgccccatagacctgcacgcctgcctgccttgcgcagatttcaaagcttttgccggtgaaataatccggcaggcgcaggtatctcatggggctggtgggcggacagtccagtacaaagccctttaaggactggctgattacatgattccgcctgcgcagttcctcctttcgtccccatatgatttcatcggcaattccatctgtaatcagtcctgcggatacggctgcaagcagcggggagatggaaatattcatggaataaagggcagtggccaggccgcggtgatactggtccggcacatggacataggcggttctgagacccgcggcaatggttttggacaggcttgacaggtaaatgacctgttccggggcaaaggaagcaatgggaggaaggggattctccgccagcaggttgttgattccatcctcaatcacaaggatatttttgggagtatgaaagtttttctgtaaatagctatcaagcagtaggtcttctatgataaaatctattatcataaggaggcctattattatggcgagaagagaaaagcaacctgtacacaaggtagttatgacggagggcaaaaggaacattgtccatcagttgttggaggagtatgacatccagactgctgaggacatccaggaggccctgaaagaccttctgggaagtaccctgaaagagatgatggaggctgagatggatgaccacctcggttatgaaaaatcggaacgttctgattccgacgattaccgcaacggctacaagcccaagagaatcaacagcagcttcgggagcatggacatccaggtgccccaggacaggaagtcgacgtttgagccacaggtagtaaaaaagcggcaaaaggatatctccagtatcgaccagaagatcatctccatgtatgcaaaaggcatgaccaccagccagatatccgacacgctgatggatatctatgggttcgaggcttctgagggtttcatttcggatgtgacggacaagcttcttccacagatcgaagactggcagaaccgcccgctggaggaggtttacccggtagtctatattgacgcaatccattattctgtccgggagaacggagtgatccgcaagcttgccgcctatgtcatccttggcctcacgctggaagggaaaaaggaagttttaagtatacaaatcggggaaaatgagagttccaagtactggctctctgtcctgaatgagctgaagaaccgcggagtgaaagatatcctcatcctctgctcagacggactcacgggcattaaggaggccatatcggcagcattcccgaagacggaacaacagcgctgcatcgtgcatatggtacgcaacacactcaaatatgtctctgacaaagaccggaaagcattctccacagatctgaaaactatctaccacgctgcgaacgaggagaaagccctggaggcgctggagaaggtgacagaaaagtggacgccgaaatatccgaattctatgaagcgctggcacgacaactgggatgtagtctcgccgatctttaagttctcaatggaggtgcgaaaggtgatctacacgaccaacgccatagagagcctcaattccacctaccgcaagctcaaccgccagaggagcgtattccccggcagcacagcgcttctgaaggcattgtatctggcgacctttgaggccacgaagaaatggacaatgcccatccgcaactgggggcaggtttacggggaactgtcgatcatgtatgaaggccgactgccggaataagtacacacaggcataggtgtacacctatgcccggatgtaggtgtacacctatccggaaaggagtcatccatgtatggattttcaaaatatgaggcgcagggaaggtatgatgagtggaataccacacaggtcaagctgaaactgaacaacaagacagatgccgatatccttgcttggatcaggaagcagaaatacagccgggatacctccgtacagggagccattaaatccctgatacgggcggatatcgccgggagccaggctgaaggggcgcagggctaattctcccacgctttacattcgttggctgtctgaagttcggacagggatttcatgaccgccagataatcgatcccttccataacagtgcctgtaccagggtcaaacaattcatcatccgcggaagcgttcgggttataagatttcagttcgcggtcgtaccattcatagatatcattatataagtctgcggcctgatccagcaaagcctgcagtttattgatttttaccctgatattttctggcacaaagggttcgtctgtttttagcttcatgagatacctcctgatgatcttatatcagaagtgtaccacatttgatagatctttccaaaatatcttgacagaagccaaaagcatccgtatagtaaaggtaggtggtcacgacagccacctacctttctcattaacctatcatagaagatttcaatttacagactttttttcatacccccatatttttttctctggccagtcctgcgatcattttcctggtttctaacggcatgatatgtgaggtgggattgtggtaatccggtattacatagattccttttatcctctcattctgtatggcatatcggattccttcctctgtcatttcatagccgttattctgaatgggtatcagatgaattcccagcagcttggccgcgttttttactcccggataagtcagagggtctgttcccagcttatttccacgttccagcaatgcgcccagtgacgccgtcagggcattctggccgcctgccgccagcaggacatgctccttgtctgtatggaagcctgatttttgaaaccaggccacgccggcttcacgctggagtcctgttccctccgggtcatcgtaggaaaagaggttcagcgcgtcaggccgtttcagaagccgctccgtatatgatttcgccagccggttcccggacacctggggaaccaatgcgcccatttcaatcatccgcggattttcgcgtccgcacagcaggacggtttccgcggtgacatccgcacagacataggttccgtttcccacggaggcagacagaaggcccttctggctgcacaatttgaaggccctggatatggtgctcaggtttacattcaggtaatccgccaattcccgctggggcggcagctttgttcctgctttcagtgtaccgttcttaatatcatcttccatcaggcttaccagcgccagatatttggggcctgatgctctgcttaaatccggtttccagctcatgggataattgtcaaatgaattgatggacataatctgtttcctctgcatgttttttgtggtttgtttgtatgagtatttgtaaaattgtcttgcatacaattctactgttgttcgtgtcattttgcaagtttataatgataccattataagcttgacaaaggagtagcagtatggaacatttattatctgagcggattaaatccacaccaccgtcatttatcagaagtattttaaagaccgcggctgacccggaaatcatctcgtttgcaggaggactgccaaacccgatatcgtttccccaggaggagcttctggtatccatggagcgcatcgtaagggattacgggagcagtctgtttcaatattccatcacggccgggctcccggagctccgtcagtatatagcggaccgctacaaccgcaaattcggccttgcccttggcattgagaatatcctgattaccacagggtcccagcaggccctggaccttatatcgaaggttctgttaaatacaggggacggcgtgattgtggagaagcccagctatcttggggccatacaggcattttcccaatatcagccggttttttatccggttgagctgacagaggaagggatggatattggccggttaaaggatgcgctggatcatgacgtcaaattcatatacgccataccggatttccagaatcccacaggactcagctactcagctgaaaacagggagtgtatccggaaagtcctgacggggcgtgaaatcgttttagtggaggacgacccttatggggaactgcgtttcgacgagggcggacgtattccttatatcggggcaggccggctgccgggcagtattctgctggggacattttcaaagactgtgactccgggcatgcgcaccggtttcatgatttgcgccgatacagaactgctgaaacatatttcagtggcaaaagaagccagcgatttacatacaaatattttctcccagtatctgatatgggactatctgatgcacaatgactatgatgcccatatcgcccaaatcaggcggctgtataaagagcaggcgcaggccatgacagaggcaatggaccggtattttccgaagacagtcaagtatacccggccccgcggcggcatgtttctatgggtgacactgccggaaggcgtcagcgcgttatcgctgtttccaaaagccctggagaaaaaggttgcatttgttcccggtgacccgttttacatcaatatggccaataccaataccatgcgtctgaactacacgaacgcggactgcaggatgattgacgagggaatacgcaggttgggggagttgttgagggaaatataataggatacagtaaaaacagcattatcatatagctgaaatctgattctctatctttatgagggcacagccagtgccatgcagcccacggcgagcacctactggggcgaagggaaacaggaaaacgacgccggggtgggagcgggggcactcaggctttactgcgcgggcacggtatttgccggaatatccatccttatggccggttatttccaagtctgcggccgggagaggagtgacagggacaggccccgcagcccagtgcctttccggagggtgtggcggcgcatccgcccagcgctgtttcacgtaggtcagggggcagctgccttcccacacggtacatggccataagcatttcatcaaagggaatcagctggcgtaccccgctcagggccagctctgcggcggtcagagcaactgcggcgcctgcggcattccggccctgacacgggcattccaccagacctccgattggatcgcacaccaggcccagcaggttcatgagaaccgatgaggcggcattgagacactggtccgcagttccgcccatgagctccactgcagcagaggcagccatggccgaggcaacccccgcctctgcctggcatccgcccaccgcgcctgccacggtggcgtttctcatggccaggtaaccgatggcgctggagttgaagagggcgtcaatcacacgggcatcggaaatcgcgtattcttcctgaagggccagaagaagacccggaacaatgccggaggagccggctgtgggggcggccacaatgaggcccatggacgtattcgtctccaggaccgccatggaataggagattgctctggagagcacactgccgcagatggatgctccgctggcccggtgccggtctgccagcctggcctcaccaccaatgagcccgcctatggagcttttcggctcgcggatgggggcggtggctgactcgcgcataatggcaagggcatggcccatctttgcatataattcttcccggctggtctcagccaacgtgcattccctctgtttcatgacatctgagataggacaatttagcttttggcagagctccagaagctcttctgcatttttaaagtccattttcatttcctcccttcactggtatgaacatcacatcctgtacatccggattttcgtaaatacgcgtaatcatatggtccggcaggcacccgtcaaattcaatgatgctgtacgccgtgtctccctttgtttcccggaacagcttcatgaaggcaatgtttacatacccttcgctgaggcagcgggtgatatgggccaggacgcccaggcggtcgtggtggatgatgatgagtgtgctgtactcaccggaaaaatccacatctatatggtcaatgcggctgatccgcaccttcccgcctcccagggattctccccgtaccgagaaggtgcgtccgtttaaacaggtcatacggatatccactgtgttggggtgggtgtccgtatctgtttcatcggttataaaacggtaggaaagcccacgttcttccgctatggaaaacgcaaggggaattcttttgtcgtcagtggaaaagcccatgattcctcccagaagcgccaggtccgttccatggcccttgcgggtttttgcaaaggactgatagagggtaaattccacatgcgtaatggggctgtccgccatttttccggccagcagggcaatggagcatgcgccggccgtatgggagctggagggccctatcatttcggggcctaatacatcaaatatactgataaatgccatatgtattccatccttttcttttttacagctgatagtgcagaggctgtccatgtctgcaatccatgtccgcattcccgtgtttgaatccggggaattgacatctgcgtaagggcattgtatcataaagaataaataaatcaaattcatgaattttatagatataataaatttaattcatagaaaataggaaggtggctaaatggaattaagacagctgcagacttttgtgaccatcacccagaccgaaagcttttccagggcagcggagattttaggctatactcagtcagccctgaccgttcagatacgccttctggaaaatgagctgggggtaaagctctttgaccgcatgggaaaaaaggtttacctgacagcggccggcagacagtttctggaccatgcaacccaaatcatccgggatattaaccgtgccagggaatttgccaaaagcgaggaggaactgtgcggtcccattcatgtgggaaccctggaatccctgtgtttttcaaagcttccccggatactgaattcctttcgtagccgccatcccagggttccggtcaagattactgcctccacgcccaaccagctgattgatatgatggagaggaaccagctggatttgatatacattctggacaggccaaggtataatgataattggaataaagtgatggaagtccgggagcctattgtgttcgtggcatctccctcctgcggccttggcggggaccgggcaatcggtttggaggaaatcatggacgagccgttcttcctgacggaaaagaatgaaaattacagacgggagctggattgttttctggaaacccagggcagggcgctgactccctttttggaaatcagcaatacggaattcatcatcaggatgataaggaagaaccggggcatctcatatcttcccctgtttgcggtccgggaatatgcggaaaacggggagctgaccatccttgatgtggctgatttcaggttgaccatgtatcagcaggtcatttatcacaagagcaagtggatgacaaaagagatggatgcgtttatccgtatcacagcccaggttaatttgtaaggggaactatggaaagggttcaaatgagtacagaagaaaataacggccggagagccagggatagaaaacataaaaagtggcgggaagaaagctttggaacagggaaaacctacagcagaccagccggaaggaggatgtcagccagcatccttctttcggctgttttgctgtttatggtgacgggctgcaaagctgcggcatcccctgcgcccggcagccctcaggaggcggatgtgaaaatccgggtggtttgttcaggaggggacgttaaatggaagaacggtatggagaccatggcagaggctttcatggaatccaataacggcatcaaggtggagctgtatttcatgccggaggcagaaaaccagacgtatgaggagcgcctgaaggtgctggctgcccagggagagtttaacgatattgtggagctgagggagacagatgcccttgtacgggcggggcttctggcacccatgccggaaaaggtgtattcgctggtggaaaaccccggtacctgcggcggcatatgttatggagttcccgggtacagcaccaccctggggatgatttataatgcggacatatttgaaaggctgggactttccgtacctcatacatatgaggaatttcttcgggtatgcgccacccttaaggcatcaggatatgatgccattgccctgggagccgcaggtaacctgcatatgaaattctgggggaattatttgttctgcaactacattgtgacaggtgacggacaggtttcctggaccaaagaaaaggcggtggagatgctgggagatttccgtggcttgtccagccgggggtatatcaattcccggtacagggcagtgtcggaccgtgagacagtccgggccatatctgccaggaaggcggtcatggtgtatgcgggaccgtggatgctgccgcagatagagaacctgaatccccagattcgcctgggcttcttctttcttcccggaagggacggaactgtctatgcaatggacgacagaagtgtggaatggggtatctcgtcggtgactgccggaaatgaaaaaaagatggatgcgtctgtccgtttccttcagttttactattccgaaggcgtgtatgagaatatcttggaaatcatgaacgggaactctgtgacagtccgccgggtgaacatgacggacacgccggaccggagaatcatggaggccgcttatgagggaaaacctgtgcatacagagcttctgcttaaggaagcccagcctactgacggttttattgccttttatgaccagatgctggttgagacgttgtggggcggaaaatcaatatcatcccttgcagaagaaatgttggaacaatgggaggagccatgatggagagaagaaagagtttattaatccggatgaccatatcctttgtgctgctgggcgttgtgcctcttgcggctgccggcacagcgctgttgggccatttaaaggacaatatggaacgggtggtgctggacgacatggggcgcatggtgagctatgggggcaaacatgcagaagagatggcggaggaatacagcggcctgacaaaatatatctatgacgtttccacggatgacgggatgttcctgtaccagattttaaaatcccccggccttagccaggaggaaagaaagatggaaattacacttcttctgagcgatatgctggactgggacagccggctgcgcaccgtctgctttatggaccagaaagggcggatttattacgccaccaggaacgcacagaagatattggatgaggacacgttccggtatcggaccggcaaagaggatgaggaagggaatttttcggtcctgtccccccatttggatgactattttcaggattccggtaatcaggtcattaccttccggcgcagttatcaggatattacgtcctttatgaccatagaagattgtctgggcttcttttatgtggatatagatataggcaggctgtcgtctgcgttttctgatttagatatgggattaagcggctccttttatatcatggacgataacggggcatgcatttacagcgtggattcagccgggaccgggaaagcagcggacagcatggcgtccctcatcccttccatgaaccaggggacgggcagcctgcttaaggacggaaactatgtggtgtatgaacgtctggaaccgtatggctggaccgtggccgccaaggtcccacaggaccaggttttgaatatggggagtactatccggtatacagccgtattcttaggagcggtatttctggcgcttttatgtctgtattgccataactatatttctttgcatttgtacaaggatgctgtataatggaaaaaaatagggcatcaccagcagccaggaggagacagcatggaaatcaggatattggaattgattgaaggcgcaaagaaggcagaggggttaactgttatcattgatgtatttcgggctttttcactggagtgctatctgtacgcgcggggagcgtccgccgtattcccggccgggagcgtggaggaggccaggcgtctgaagcaggcccatccggaatatcttcttataggagagaaaggaggacgcaggtgtgagggatttgactatggtaattccccgtcccagacccgggatgtggatttatcagggaaaaaaatcgtacataccacaagcgcgggaacacagggaatcgtaaatgccgtgcacgcagaggagatactgaccggaagcctggtgaatgccagggcagttgccgattatatcagcggaaggcagcctgagacagtatcattggtagccatgggaaacggaggagaaaggactgcaagggaggatgtaatctgcgcacggtatatcaaatgtcttcttgagggcaggacctgtcttattgacgaggaaatccgctccctcaggacggacggcggggagcatttcttccgtcctcaaacccaggaaatttttccccaggaggatttcaggctctgtaccaggcgggatatcttcccctttgtccttcgggtggagaaacgggaaaatggagggcgtcaggcattgcctggcatggggaggaattttgtacatttgaggatttggcaaggtgttcatgtttaacagctgtgatatcatgtccggaattcaccggcagctatctcctcatccaatagccggatgaattcttttagcatggtatttccctttacccctttgtggtacaggccgaatgcaagaggcggtagaagggaagaaggctgtatccaaggcctgcccttaccagggccaatatgctttcataggtatccacgaagaaaagctccgaaggatggcaggaggaggagacgcggatttgggactggagcacagagggaggcagcctgtggggctcgcccagtaccatggggccctttagctcatccacattcaggcaggtgcgcccggcatagggatgtccggtactgcacacgcagaccagcggtgtccgggccagctcgtggaatatgccgatgggctttttctggtcatcctgctggaagccgaacatgacgtgtatgcgctcctcctccagaagattggccatggacttaaacggaatcagtttcacagaagggtgaagggcgggaaaacggcctgccagtctgtgtatgacggggggaagaagatccagctctgactggttgtggcaccccacggtcaggaacagaaagtcactgcctcccatgcccagacggtttccctggtgcaggccggcatggacgccctgatgaacgggagaactacctttgtcattgcccacagactgtccaccatccgcaattcagactgtatcatggtcatggaacagggcagaatcatcgaacggggatcccatgaggagctgattggcagaaagggaaaatactatcagctgtatacggggaatttcgaggaagcgggttaaggaatccaggaccagtttatgtaaagttaataatcatgtggtatactgatatccggttaaagatatttttaagacttgctctgggacaggaggcggaatcatatgaaaatgagatacagattggctgccattacagccatggcatccatactgggcctgacatttcctgcttgggcaggggagtggatagaggaggagaatgggcagtgggtatgcgaagaaaatgaggaacccttaaaaggctggaaccggattaacggaacctggtattgtctggatacagagacaggcgtatggattgagaagccgtccatgacagcggaggcagcctgccgtcttctggagaataagctggtggagatggaaatgtaccaggacgaagaagaacctttgcagtttaaggtggattatgagaacagtaaaatgattcaggtttcagttggatatgaggaaaagccggatgtgttccacagaatcaatacatatgagatagataagaagaagggaaccgcggaccctgtggtgggagagaaggaattctctctgcggtaacagataacaaccatataaagtaagaaaacagaaacatcttcctgatgatattctggtaaaattaaatcataagcaaatggttttagtttttcagtcattacagggggaatgaatcatgaagcgaaatataatatccattgccgccgcaggcgtcctgaccacggccgtgtccgtcctggccgcaggaagtcctgcggcctttgccgtgccctttaacggtgtatcgggagaaggatatcggtgtgaatccggactttacagatgggatatcccggtttgcttatagggtgttcctgccgctgctgcgggacagccgggaaaatatgaattttttcccggtgagcctgtactatgccttggcataggcatccgagggcgtgggggagttggggatgtgttatggggggtgtgatgacatggtccgcagcacttccctttgtctggatgatctcattgaccagcttccggaatatcggatggagccgctgacgccggaggaattgcaggcaggtattccgattgaagttacgggccggctgaaggggattttcctgtccatgctgagcgaagcctttaccagtaccgtattgaacaccattttgggggaggcccaggaacagctgaggcagtgccagccggattaggcggcagtcacccgttgaacaatgtgtttaggaatgttacaataagactttagatattcttttgttttttgtgaaggttaaattttgttttagttgttaggataaatagcgtaaggaggaaatagacatgagtggggaccggattttactggtagaggatgacaaagagataagggagggcgtggaaatatttttaaagagccagggatatgaagtattccaggcagcagacggagtggaaggccttaaggtgctggaggaaagagagattgatctggccattgtggatgtgatgatgccgcgtatggacggtattaccatgacggcaaaactccgtgaaaaatatgactttcctgttattttcctgtcagccaagtcagaggaagtggataagatactgggcctaaacatgggggcggacgattacatcacaaagccctttaccccaatggagcttatggccagggtcaattcacagctgcggcgttaccaccggtttctggaccgtctgaactctaaacaggctgagaatccaaaggtccacagactgggaggattggaggtcaacgaggagacggtagaggtggccgtggatgacaaaacggtcaaggtaacccctattgagttcaaaatccttcttttgctgatacagaacccggggcgtgtatttcccgcggaggaaatttacgaacgggtgtggaacgaaagggcagtgaatacggatacggtcatggtacacatacgtaacctgagggaaaagattgaggtgaatcccagggagcccaaatatgtaaaggtggtgtggggagttggatacaaaattgaaaagcagccataggctgggcatattgattatcatgctggcattgcttttggcatcagccagtaccatagggttatacccctatatgaagacaaaggcggagagctaccacaacaggagttccgtccgccaggtcgaggagagcagtaattttggaaacctggcaacccaggttatgaatttcagttatgaaatctggcatctgaaaatgcaggaggatacagggcggcgcctgacttatgcccagacattcctgccggggctggaggaaaaaatccgccggcaggaaccgaaagacgaagctgcggtgcagctgggggatggggaagatggggggcaagtcacagtctacgacagtgagaatccctatgacgtatactattaccagtccatgcagcagaccattgacagagcgggaagcgaatgggaaagcctctacaggcagtattattccagcctgtcctatggggtccgtgagcaggatgggacctacggacgcagcaatgtgacggagccaaaggcgtttttccgggaacccctgaaggatgacgagattcagtttactataagctttaattccagcggcatactgaaggtccaggatataaagggaaaacgggatgaggatatcatgcgcctcaaggagtcattgaccaggtttgaattctacgatcccctggaggtaagactggccaagggctaccgttacagcggcgtggaattccagggacccagggacatgacagtagagttccggtgcagtccttcccaaatgttcggctatacggatgccaggtttgacagcggagttcagcagcttaccctccgggattaccgtttcagcaacggctattttgccataggcgcatctgtgctgggattgctggcagtgctggccctggctctgccggctgtgaaacggtttgaaattggaaagagcggcctgtgcaggctgtcatttgagccattgagctgtatcggagtggcctggatgggcgttatgggcgacggaaccatacccatggctctgattgcctctaccatggacggcagattgaagagcgaacttttgagagcggattttcttccctggtccgcggatgtgatggcagtggtcattaatctggcattctggatggtcagctacggaatgttttactggggaattacctgttacagggctatcttttccctggggccctggcgctatttcaaagagcgcacatggctgggacgtttcctgcggttcattaagcgttgggcgtttaatgccctcaatgtttttaatgagactgactgggagcgccgttccaccaggattataggcaaagccattattgcgaactttgtcatactgaccattatctcctgtctctggttctggggaatcggagccctggtgatttactccctggttctgtttttcctgttgcagaaatattgggggcagatgcagcaaaaatataatacgcttctgaagggtatcaatgagatagcagagggaaacctggaggtggagattcaggaggatctgggagtctttaacccgtttaaggaacagctgagccggattcaggagggctttaggaaagcagtggcccaggaggtgaaaagcgagaggaccaagtcagaattgattaccaatgtatcccatgacttaaagacccctcttacggcgattatcacttatgtaaacctgttaaaacaggagaacgtgacagaggaggagagaaagtcctatatacgggtactggaccagaagtccatgcggctgaaggtgctcatagaggacctgttcgaggtcagcaaggccagcagcggtacggtcagccttcacctggagaacgtggatattgtgagcctcttaaagcaggtgaggtttgagctggcggataagattgacgccagcgggattgagttccgttacaatctgccagaggagagaatccttcttcatctggacagccagaagacctaccgggtatttgaaaacctgctggtgaatataacaaagtacggaatgccgggcacacgggcctatatacaggtggtcagggaagatgacggccatgtactgataaccatgcgcaacatatcagccagagaactggaggtatctccggaggagctgacagaacggtttgtccgtggggatacatcccgcaatacagagggatcaggactggggcttgccattgccggaagctttgtggaggttcagggcggtaccatgaagctggaagtggaggatgatttgttccgcgtatccatccgctggaagacggaagaaccgggcggagccgggcaggagcccgggagggaagcgcggggagtctcggaagaaccgggagtgccggggatgccggaaacgccggtagcggaaggcgcgccgggaaagacagccatggatacggagaaagagaatgcaggagagacacatggccgggaatcggaaacagacggcgacattgacatatccacagccgcatttgacatggaaggcgttgtgtggggcgctgaggaggcggaggagagtaagaaggacagtaagacggatagagaagaataaaaaagatagaaaagaatgaataaaaaacacctcatgggaatcccttttactaatatcacgggctggcctatgaggtgttttttgaagactgctgcacagtttttcggaaaagagttgctgctctatgggggtgttgggggagagatggacaaagtggcgcctacagagcatatacaacccattccatgtcgtcctccgggcgttcggttccggatatacgggcgtttttttcgcgccgtccggcatccaaaaagtagccctggccttttttgaagcagttgcctctgatttttgttctaccctgccgctgatgtgaagaagagtggcaatctgttgggatgtcaggcaatcgtgttctaccagcaaatcccaaatccgtttttgacgtgcggttatggtatcctcctgaaatgcagcaaaacagcggatgcaggggcaagcctgcggtccgctgttttgcatatatgtacattgcttgcaaaaaccgttgaatatctgtttttacggaatacacattgattatggtgtagcgattagtgctggttaatgctcctctttacataggtggtgtggagcaggtggtgggctttttcgcttccgggctctcccaggtaagtagcgtagagctccttgatagcaggattctcatgggacttacggattgggttggctgtatctatatcgtagagcacctttgcgcgcaggccgcggatatccgtggtgttgcgtacgtatccgggctgctggggctgaccgccgccgtttacgcagccgccggggcatcccatgatttcgatgaagtgatagttggcttctccggatttcaccttatttaacagctccctggcattgcccaggccggaggccaccgcaatctttacctccatgcctgccacattgtaggtggcttccttgattccctttgtgccgcggacttctgtgaagtccggcttaggcagctcttcgccggtcagggtttccacggcagttctcagggctgcttccattacgccgcctgtagcgccgaagataacggctgcgccggttccaaggcccagaggcgcgtcaaactcttcgtccggcaggtctaagaaccggatgcctgccttcttgatcatgcgggccagctctctggtggtgatggagatgtccacatccggcattccatttgcatcctcgtcctcacggccaatctcaaactttttggcggtacacggcattacactgacacttacgatgtcttttggatcaatgcctgccttctcggcatagtaggacttggcgatagcgccaaacatctgctgaggagatttacaggacgacaggttctctgtcatgtccgggaaatagtgctcgcagtatttaacccagccgggtgagcaggaggtgatgagaggcagtacgcctccgttctgtacccggtcaatgaattcgtgcgcttcctccatgatggtgaggtctgcggagaaattggtatcaaataccttgtcaaagcccagacggcgcagagccgcggccatcttgccttccacatctgtgccgataggcagaccgaattcctcgcccagtcccgcgcgtacagcgggagctgtctgaacgattacatgcttcttcgggtccgcaatggcagcgaatacgtctgctgtataatccttctcggtcaatgctccggttggacataccgcgatacattgtccgcaggatacacaggaggtttctcccagacccatctcaaaggcagagccaatggaggtagagaaaccacggttgttggctccgatgacgccgatgccctgtacattttcacagactgccacacagcggcggcagaggatacatttgctgttgtcacggatcatgtgggcggcagaggtatcaatctcggacggggtaatctcgccgtcgtaatatccttcgtcgtccacgcccagctcgtgggccagctcctgaagctcgcagtgtccgctgcggacacaggacagacaggaacggttgtggttggataacaggagctgtaatgtcttcttcctggaatccagtaccttaggtgtattggtatatacctccatgccctcctcggcgggatagacacaggaagttaccagttttccattttttaattctactatacagatacggcaggcaccgatctcattgatttcctttaagaaacacagagtaggaatctcgatatgtgccagtcttgctgcctccaggattgtggaacccttgggagcggtgactgcaatgccgttgattttaagattaattgtctccatcgtatattccctccctcattatttcttgtagatagcgccgaatttacatttttccatacaagcgccgcatttgatacacttgttctggtcaatgacatgtggattcttgacagagcccacgattgctccggcaggacagttgcgggcacacagcgtacatccgcggcatttgtcacggtcgatgttgaaggagagaagcgccttacatacaccagccggacagcgtttttccttgatgtgtgcctcgtactcatcgcggaagaaatgaagggtggagagtacagggttgggagctgtctggcccaggccgcacagtgagttggcctttacatagtgacagagctcctctaacttatccaggtcttccattacggcctggccctttgtaatcttggtcaggatttccaccatacgcttggtgccgatacggcatgcggtacatttgccgcaggactcctccacggtgaattccaggaagaatttggcgatatccaccatacagtcatcttcgtccatgacaatcagaccgccggaacccatcatggaaccaatggaaatcaggttatcgtaatcaatgggaatatcaaaatgcttggcagggatacatccgccggaaggtccgccggtctgagctgccttgaatttttttccgtttggaatgccgccgccgatttcttcgatgacggtgcgcagggtggtacccatgggaacctccaccagaccggtgttgttaatcttgccgcccagtgcgaataccttggttcctttggacttctcagtacccatggaagcaaaccactcaggaccgttcaggataatctgaggtatatttgcataggtctctacgttgtttaagatacttggctttccgaacagacccttctgtgcggggaatggaggtcttggcctcggctcgccgcgcttgccctcaatggaggtcataagggcggtttcctcgccgcagacaaatgctccggcgcccagacgcagatcgatgtcaaaatcaaatccggttccgaagatgttcttgcctaagagttccatctcacgggcctgctcaatggctattttcagacgttccacagcgatgggatactcggcacggacgtaaatatagccctgattggatccgattgcgtaaccggcaatagccattgcctccagaatggcatgggggtcgccttccagcacggaacggtccatgaatgcgccggggtcaccctcgtcggcgttgcagcatacatatttctggtcagcgtcgttctgcttacagagcttccacttaagaccggttgggaaaccggcgccgccgcggcctctcagtccggcatccagcagagtctggattacatcgtccggagtcatctccgtgagcaccttgcccagagcctggtatccgcctgtacctatgtattcctcgatgttttcgggattgatgacaccgcagttgcgcagggcgatacggtgctgtttcttataaaagtcagtgtcaatcagcgccttgatgccgccggttgggcttacggtctcctgatacagaagacgtgtcaccacacggccctttaacaggtgctcggaaacaatctcggaaatgtcgtttacctgcaccatggagtagaaggtggcatcgggatatacaatcatgataggacctaaggcgcagagtccgtggcatcctgtctctacaacagccacttcctcttccagtccctgacgtttgatttcatattttaaagcttccataatcttcgggctgccggaagaagtacatccggtaccaccgcagactaatacgtgtgaacgatacatcgtactttcctcctttatttgagaccttcagcgcccatggtgtatttctccacgggatggccgccaaccaggtggcgctcaaccacttccagggctttgtcggcgttcattttcacataagtaatcttatccttgccaggctccatgacttccacaatgggttcatactggcataagccgatacagcctgtctgggtaacggaaattttattggtaagtcctcttttctggacttcgtcagcaagtgtattcagaaccggcctggcgccggcagcgataccgcaggtagccatacctacaaccacacggatatgatcgtggtcttcggcacgcatattgacctggctctgcatcttttctctgattgcctgtaattcagcaagagttttcatgtgcgattaacctcctcgttatgagcacttggcggccgtcttttggccgcttacgtgcgatacatgtcatctccgcttggtgaggtgtttcacgaacctagcggagtggctcgttatgagcacttggcggccgtcttttggccgcttacgtgcgatacatgtcatgtttggtttgacgataccccattaaatcagggcacctccgtcagtttcctgttgattctctttcagatattccattatgtaagcggacacttcgggggtgttgagcgggattcctcccagaatctccctcatttccctggtatccagggtgaatgatgcatcgttgtatgtataggtataaagaaaatccgtatctggatggtacacaatcaagttgtgtatggtggcgttcatgtcgcccaaaggcatcctgtcgatatgggacagtccaaagactgctgttacggtggttcccttacctggttccgactcaatatggaagctgccgccggtgctttccgcggcatatttgaaaaatggaatcccaagccctaccttcctggtggtcctggtggtaaagaaagggtccgttacatgggctgtctgttcaggcgtcatcccgcatccgttgtcggctatgacaatggtcagcttgtcagcgcttgtatcagcggtcaccaggatggtcacaagcgaggcgcctgcccgggtggaattctccgatacatccaatacattcagggaaatctctgtcatcataggcttagttgtacttggctaaaatgcctggtatgtcatcgacagtaagccttccgtatacctcgccgttaatcatcatgacgggcgcaagtccgcaggcgccaacgcatcggcaggagtccagggagaatttgccatctgctgtgcactcaccattggtgatgcccagcaattcttccagtttcctgaagatttcaccggaaccttttacgtaacatgcggtaccgagacagacagatatcttgtacttaccctttggctgtaacgcgaactgggcataaaatgtggatactccgtagattttttccagcggaatacccatttcatcagatatcatggtctgcacttcgataggaagataaccataaatttcctgggccttctgcataaccggcatcagcgcgcccggctggtcacccagctcggcaatcgctgatttcagcgctgcttcctgctcaggcgtccccataaagggaacagtttgttttttgcaagccatcttttattacctcctcactagttgtacattgtgcaatgtatcaatattttatcacgtatagaaaaaaaaatctaccattagtgtgaaatttctaacgataaaaaacatgtaaaaaaacggaattatattgaaaacacacaaaatggatggtatgctataatgtacggaaatgtgtacaattgacaagtaatgatagtgaggagagacaagggtatgacggttaaggatgtaagagatgtattaggggccagggtactggcaggagaagagttcctggatcgggaggtaaagtcggcctgcggttcggatatgatgagcgatgtactggcattttccaaagaccactccgtacttctgacaggtctgtgcaatccgcaggttatccggacagcggagatgttagatattgtctgtatcatttttgttagggggaagaaaccggatgaatccatgttggagatggccagggaccggggccttgtagtcatggaaacgggccaccgcatgttctctgcctgcggtatgctgtaccaggccgggctgcacggcggggctatctgatgctcccggcgtctgactttagtgtgtcccggaatggcttaggttgttccggctgataccgggagaaaatatatataataatgaagggaaccaattatggaggaagtaattgtattaacatatgacatatcagcagatgacttcacaagggcaggtgaagccagcagcgatgtgaaacgaaaactgaaacagatgggcgtgagccctgatgccatccgaaaggtggccatagctatgtacgaaggggaaatcaacatggtaatccacgccaaggggggcgtcattaccgtggagattacgacggagaaaattaaaatgatactggccgacgtgggtccgggtataccggatgtgaagcttgccatgcaggcaggttattccaccgcgccggatgaaatccgttccctgggctttggggcaggcatgggactgccaaatatgaagaagtactcggattccatggatattgacaccagaatcggtgaggggaccaccatcaccatggtggtgaatctgtagaatgcgagaatgaaagaatgaggtggtaagatggataaattttatcattccgtaaggctggatgaatccctgtgcaagggctgcatcaactgtatcaagcggtgtcctacggaggccatccgggtgcggggcggcaaggccagtatcaataataaattctgcattgactgcggtgagtgcatccgggtttgtccccaccatgcaaagcttgcgacctatgataagctggatgtgatgaagaagtatagatacacggtggcccttccggccccatccctgtacagccagttcaacaacctggacgatgtgaacattgtgcttaacgcgctgctgcttatgggctttgacgatgtgtttgaggtcagcgccgctgctgagctggtcagcgaggctaccaggcagtacatatcggagcatgaggaacagctgcctctaatcagcacggcctgtccgtctgtggtgcgtctgattcgggtccgttttcccaacctgattccccatcttcttcccatcaatccgccggtggaggtggcggctgttctggccgtcagaaaggccatggaggacacgggactgccgagggaagagattggcattatgttcatttcaccctgtccctccaaggtgacctatgtaaagtcgcctctgggaacggagaagagcgagattgaccaggtgctggccatcaaggacgtgtatcccaagctgctggcctgcatgaagactgtagtgggagaggactatcctgttatcggcacatcgggaaaaatcggaatcagctggggacacagcggaggagaggccagcggcctttttacggaaaattacctggcggcggacggcattgagaacgtgattcgcgtgctggaggacatggaggaccagaagttcaccaatctgcggtttgtggagctgaacgcctgcaacggcggatgcgtgggcggcgtcctgactgtggagaatccatatgtggcggaggtcaaactgaaacgtctccgcaaatacatgcctgtggccaggagccacatgcacgagagcgaggagaacgtaatcaaatggaccaccgacgtccagtatgaacccgttttccgcctgggaaacaacatgatggagagcttttccagactgaaccaggtggagcgccttatgaagaagtttccgggtctggactgcggttcctgcggcgcccctacctgtaaggccctggcagaggatattgtcaggggggatgccaatgagacggactgtgtttactatctgcgggaaaacctgcacaagctgtcggaggaagtagctgtgctggcagacgacctgcataacggagacagagggggacaggagacactgcgtatcctgaaggaatatatacagagaatctcggacgagatgtccgtgcttgacaagaaggatgaggatgaagattgaaagcgccgcaggccggagttccggaaatgacgccgctttgtgagcagaggaggattttatgacagttcaggaattgattgacaaacagatattcggcgtagtgaacctgggtgacagcccggaccggcagattacggttccgttttgctgtgacctgctgagcattgccatgggacgcgccccggcaggctgcgcgtgggtgaccgtgatggccaacatgaataccctggcagtggcggccctgacagatacggcctgtgttattctggcggaaggcgcggttctggatgatgctgccaggaagaaagcccttgaccaggagataacggtgctgtcaacggatatgcctgtctttgaggcggcccttaagatacacggtatgatgtcatgatgaatctggcttatgacctgcatatccattcctgcctgtcgccctgcggggatggtgatatgacgcctgccaacattgcgggcatggcggctttaaaaggattggacatagttgcccttacagaccacaatacatgccgcaactgtccggcttttatggcggctgccgcagagtacggtttactggcagtgcccggcatggaaatcaatacgtctgaggaagtccatgcagtgtgccttttccccacattggagaaggcacttgattttgatacctatgtttatgacagactgattaaatatcctaataaggaagagatattcggaaaacagcagatttacgatgcccgggaccaggtgtgcgcctcagagcccaacctgctgattaacgcaacggaaatatcctttgacagtctttggaacctggtccgatcctatgacggcgtcatgttcccggcccatgtggataagacggccaacagcctgattgcaaatctgggcttcatacctccggacagctgttttaagacagcggaggtcagggatctgaagaaactgcatcagctgaagcgggacaatccgtatctggagcagtgcaggattatcagcaattcggatgcccattatctggagcatatcaatgaacccaaccttaccatacaggtggaggagcggtctgctgaggcggtggtgagggctctgctgtagggatggcagctttttgcggcaggtattttgcgaaatggctgagcttttcggagcccgtcccatggcggcgtcatgcccatagaaaatagcaataacagattgtaaattcatagaaaaattaaatttgagccccttggtcatatgtgctattcttgacttgcaaaaaaagtccaattttggaataaatgacaatgggaggaaaaaatgaaaaaatttttagcagtagttacatccatggccatggcactcagccttctgactgcctgcggctctaacgcggcatcaactgaaacaacaacagctgccgccagtgaagcggcgtctgagaaggagactgccggaaaagaggcggaggagtcagagtccgcggcggaaacagccggggcagattccacgcagttccagtcatccatactgttctgcggttccacatccctgtacccaatcctgtcatccctggcatcttcctttactgagaagtatgtgacctgggatgcggtggattcgtccttcccggactccaatatctctgtttacgtggctccgggcggctccggcgtgggagtgagcgctgccattgacggcacggctgatttcggtatgctggccagagatatcaaggactctgagattgaagccctgggagagcattaccaggagtttgtggtggcaaaggacgcccttactgtgtcggtcaatgctgagaatccaatctgcggcatcatggacgacatgccggctgagaccatccgccagatttttgcaggtgagattgctacctgggaccaggtggattccactctgcccgctgagaccatcaatgtctatatccgcgatttatccggcggcgcttatgaggtgttccagaagagtgtcatgggtgacagcgaggtgactgcgtccgcaacccagtccgcgtccatgacagagctggccaccaacattgccggagacaaatggggaatcggctatgcgggattcggcgcttacaataaggccaatgcggacggacaggtattgactgccatgaaggtggacggagtggaggcaacggctgaaaacattataagcggcgcgtataccatccagagaccggttatgtttgttaccggcgcagagattaccccgtctgagcaggcatttatcgactacatcttctcacagacaggatatgacgtggtggaagccaacggatacatacctgcatttacacctgaagcttgattgacgtcagggaaaacgccgggaaaaccgtcagggaaatattcccttgaaatggagtcaaaccaatgaataaacagctgaatgcattattctcagttctgataagggccctgaccgccctgaccgtgatggtcctggcctttgtcatatactttattgtcaaggaggcactgcccacgttcgacgaagtggcagtgcctgatttcctgttgggccagagatggatgcccattgcctacacaggggagccgtcctttggcattttcaattttatagcggctacgctctatgtatccctggtggcaatggtcctggctgtgacagtggggctgggagccgccatttatctttcctgcgttgccacggaacggatgcggggaatcctctatccctttgtggaccttttggccggtattccatccgtgatatatggcttcatgggcctgacccttatggtcaagcttttcatcagggccggagtccacaccgggtcctgcgtccttgcggccggaatcctgctggccgttatgctgcttccttttctgatatcctcctgcagcgagaccatgctgaaggtaaggaaacggtatcagcccgccgcggacgtcctgggtatctccaagtggcatatggtggcaaccattgtccttccggggtcgtggaagaacatactgctgtccatgattttggccatcggacgggccatgggggaaaccatggcagtgatgatggtcattggaaatgcgaacctgttcccctccctgcttggaaagagtgagagcattgcctcagtgattgcgctggagatgggaacagcggtggtgggaagcactcactaccacgccctgtacgcggcgggactggtactgatgctcctgttgttccttatcaattccgtcatcaccctgctgcgcggcaggctggagcaataggccggaacaagaagacggaatatgcataaaggagggaaagacatgcatttgcgcgcatcacttacaaaattttgggcgtattccagcatgatattggtgacaggcatcatattgtttctgttcggatatgttttttaccggggggcaggcaccatcagctgggaatttctgtcccagtcacccaggggagctgtcctgggtgaagaggggggtatctggcccgccattgtggggagcctgtgttttacggcaacagccattgtcctggggggaataccggctgttgctacagctctcttcatggtattttactgcaaaaggcgcaggacagagggattaatccgcatggtaatccagtgtatctcggggatcccttccattgtcctggggctgtttgcttacagctttctggtgcgggacctggcctgggggcgctgtatcctgtcatcgggcgtggctctggccgtgatgattcttccctttatagaggtcagggcggaaaagaccttcagagagcttccaaaacagctggtccagtcctcctatgccctgggctgttccaggttctataccatttggaagattgtgctgccggcctgtaagggggagattgtgtcgggcgtgatactgggaggctgctatgccatgggagcaacggcgcctctcattttcacgggggcagtggcttattccagcctgccggccagactaaccgcaccggccatggccctgcccatgcatctctacctgctggtggctcagggagccacttccatggacgcggcttacgggaccgcatttgtcatgatggcgctgattttaatcagcaacctgttggcaacaatttacgcaaggaggagccagaaaaaatggaacatatcatgacgcttcgcaatgtcagcgcatcctacgacggcagggaggtgctgtctgacttgtccttagacataccggcccaccggattacggctgttatcggtccgtcggggtgcggaaaaaccacgctgctgcggtgtatgaatggattgctgacagaggaaaggggcgcgtttgtatcgggaaaaattttgttggacgggcaggagataaagtccatgcagaaggacgtgctgcgccgccgagtgggcctggtgttccagacaccggctccctttccgttttccatctataaaaatatgacatatgcgcccagatattacggggtccgggataaggcggccctggaggcactggtgaaggagaagctccggatggccggactgtacgacgaggtcagggaggatttgggcaggaacgcgcttaagctctcaggagggcagcagcagaggctctgtatcgcccgcgccctgaccgtggacccggaggtgcttttgctggatgaaccctgctctgccctggatgtgaaatcatctgccgtgattgaggaaatgctgacagagcttaagaagcagtacaccattgtcattgtcacccataacatagcccaggcccgcaggatatcagattatgcggcattccttttcggaggacgtctggtggagtggggggaatcggagcaattgttcgggtgtccggtggaagaggagacaagggcgtttctggcaggaatctacggatagacggatatgagatataagggaggagacatactgtgattataatagagatacccgggcgggagcccctcaggattgaccatgtggtcttggattacaacggtacagtggctgtggacggactgctgttaaagggagccggggaacggatttcccggctcagggagcatgtaaaggtgcatgtgctcactgccgatacctacggcacggtgacccgccagtgtgaacctctgggcgtggaggtaaggacctttccgcgggagggtgctgccggctgcaaggaggaaatcgtaagggggcttgagggcggcgtggcctgtcttggcaatggctttaatgatatacagatgtttgacgcggcccggctgtccatagcggtactggagcgggaaggcatgtgcgctgccctgttaggccatgcaactgtggtggttcgctccattgaggacgggctggacctgcttctgaagccggaccggctgcgggcgacgctgagaagctgatgtctaaaaaagttgcgtggtaaagactgccttgacaaaaatgcccatgccggactctggaaatgcggctttacataaagtaaatggtactgaaaatcagatagcccagcgcatgctcaaccaggtaatcaggagcggccgtaaggtgtatggtattttgccgcagcaaatgcaaaagagcagggatagtgctggcagaaggggcaaaggacccgatccttgcagagcggaaattcctgcgttgtttttccggccgtgcggacgggagccgcaattatgtgaagccaggggaggatatatggctttatctgaggaaatacgcagatgatgaaataaaatatttcgtcagtaacgccccggcaggagaaccggacagagcagcaacgttaaggcggccgattgaacaatgctttaaggaatgcaaaagcaatcccattgacgatgccgatggtaatcaaactcatgcatgggataattgtatatacagtaactgatatgaaaaaaatagtaagttaccatatacgcaggaaccataatgcatatctatcacaccgataaaccaaacttttaaaaagttcgctgtagtactagaacgtgtctgaaaattcaacgaagcagaaaaacatccggtggatcaacagggcgtcctcctgccgtaaggcagggcgggcgccctttgcgcctaatcttccagcgcgtccttaagtgctcccaggaattccaggtcggattgtttgacccggatgttggatgctatggtctgcccggtgctggatgtgacggtaatttcaatcagtgttccctcgtccatgaccccgtctctggatgcggctttgacaaatgacagcatcttgggatggttggccttgaactggttccaggccggttttaattgaagaagattcattggattcataacatgctcacctccaaacacgctttagtttaccatattttaaaggcagcggtccagtcctatatttccacagggcggtcctcatggaaaaggacgggacgtatggtcttgtaaatggtgcccggctcgtggtattatggttaaagatgcacatgaaaggaagaaatatgaaattcattcatttatcagaccttcatatcggaaaacgggtcaatggtttttccgtgctggaggatcagaaatatatattagaccagatactcatgattgcgggggaggaaatgcctgacggcgtcctcatagccggggatgtatatgataaacctgtgccgcctgccgaggcagtgcaggtctttgacgctttcctgaccgggctggcggaccggaatctgcccgtgtttgtcatcagcgggaaccatgacagtccggagcggctggcttttggagggcagcttatgaaggacaggagcgtttatatggcgcctgtgtatgacggtcatgtggagccggttcatatggaggacaggtacggaagcctgtgggtctatatgctgccctttataaagcctgctgttgtgaggagatgctggccggaggagggcattgaaacctttgatgatgcggtccgctgtgcgctggggcatatgaccggacataagaaagggacagatgaccgcaatattctgattgcccaccagtttgtcaccggtgcgtcctgctgtgactcggaggagctgtccatcggcggcctggaccaggtgagcgctgatctgttcgattactttgattatgtggccatgggacatatccatggaccccagaaggtgggaagggataccctgcgctatagcgggaccccccttaaatattcattctcagaggtgaaccacagaaagtcagtgaccgtggtggagctgctggaaaagggaaatgtgaccgtgaacacccgtcccctcaaacccctccatgatatgcgggagctgaaaggaagctatgaggagctgaccagccgcgatttttaccagggtacggctgtggatgattaccttcacatcacccttacggatgaggaggatatactggacgcaataggcaagctgcgctccatttatcccaatgtaatgaagctggattatgataacaagcgcaccagggaagggaatgtggtggaagccgccgccaaggcggacaagccgcccattgtgctgttggaggaactgtaccggcttcagaacaaccagcccatgacagggcagcaggctgactttgcgggaaaactgatggaagaaatatgggagggaagcagatgaggccgacagaactgataatatccgcatttggaccatatgcaggtgaggttaccctggatatggcctctctgggagaccgggggctttatcttattacgggtgacaccggcgcggggaagaccactctgtttgacgccattgcatttgcactttacggcaatgccagcggggacagccgcaaacccagaatgctgaggagtaaatatgccaggccggacgccaggacctatgtggagatgggattttcctataatggaaaggaatacagggtgcggcgcaatcctgagtatatgagggcaaaacaaagaggcgaaggggagacaagggagaaaccggacgcagagcttcatttgccggacggcaggcttgttaccggggataaggcggtaacggtggaggtggaagggcttctgggccttaacagggagcagttctcccagattgccatgctggcccagggcagtttttccaggctcctgtcaggcagaaccgaggatcggggcgtcattttccgggaaatattcaagacaaagccctatcagctgtttcaggaaaagctgaaggaccgggccaggggcctgtatggccgttacgcggacagcaggaagagtatggaacagtatgcaggaggtgttatcacagagggccatagtgaggaactgaagcttcggtggaaggaggtgccccagggaagcctggaagctcttttggaggtgctggaccagctgattacggcagatgaggcgcagcagcaggagaaagacaaggtcatggccctggtcagggatgagatagctgcccttgggatggagctggggaaaatgcagggggatgccgaggtctgccgggatatggccgctgccgcggatgtgctcagggagaatacgccggttctggagcaggcaagggccaggtatgagagggagaaggaacgccaggctgacagagacagcctgattggcgaagttaccaggatggaagaaaacctgaaaacctatgaccgttttgacgcgcttcaggagaatctgaaggcatgcaggaaagagacagagagccttggagacaggctggagcgggcggccctggaggaaaagcagtggaaggaacgaaatgacagcgatgagaagaccctggaaacccttcgccaggcaggagaagagtatcaggcggccctgacggcaggggagcggctgcgtgaatacagtgcgcgtatcgggctgctggcagaggagctggcgcggtacgggcaggagaggaggaagcttgaggcagccagagagcgttacagggcagccgacggggagcgccggagggcagacgatgcctaccgggagatgtatcagagattcctggacaaccaggctggaattctggcctcgcggctcacagaaggccagccctgtcctgtatgcggctccgtcacccatccggcgccagcacggtatctggaggagggaaaggaggcagctaaggacaaggtagaccggcttaaggctgtcgcaggggaaaaggacagggaggctgccaggctcagcctggaagcaggaaggctggcaggcagtctggatacccgttatgaaaggatgaagcagcagattgatgccgaggtggcttcctggaaggaggactggcagcagcggattcaccaggcggaagccgacgccgggggattggcttcggagacaggggatgagcggcagggacgcaggtatttccttgaacagtgggaacagatgatggggcagctgaaaggccagctggagcgccaggctgccgcccagaaggagaagattcaggaaaagaagaagagaaaagaatataaggaagccattgaaggcagaagggccttggggcgtcaatccctggaagcagcctcggagctgaaacagcaggcacagaggctgctggcagagagccaggcaaaggaaagggagctggaaagccgccttaaggagatggagtcctccctgccctatgaaaacagaacggccgctcaggctgagctggcagagaagaaggcatttcttgccggactggaaaaggcgtttaaggaggcggaggaatcctataaccgggtaagccgccgggtgtcggacgcacaggcccggctggaggcgctgggaggtcagatggcggggaaggagaggctgtccatggattgtctggaggagcggatgcaggagaaccggcagcgccagtctgaggcaagggagaggctgaccggtctggagcaggagaaaagcaggcttcaccacaggctggaaaccaaccgcatggcaagggaacgcattacgcagcaaaaggcgtccatggaagagatacaaaaggaatggacgtgggtcaaggcactttccgatacagcggcaggagaagtggggggaaaggaaaaaattaccttggaaacatatgcgcagatggcgtatttcgagcgcatcattgccagggcaaataccaggttcatggtcatgagcggaggccagtatgagctgaaacggtgtacggaggaggataacaggggaaagaacggactggggctgaatgtcatcgaccactacaatggcacagagcgcagcgtaaagacattgtccggcggggaatccttccaggcgtccctttccctggctctgggcttgtcggatgagatacagtcagccgcaggcggaatccgtctggacaccctctttgtggatgagggatttgggtccctggatgaggataccctgaatctggccatgaagtccctgggagacctggcagaaggaaggcgtctggtgggcattatctcccatgtgggggagctgaaggaacgaatcgagcgccagattgttgtggttaaggacaagacaggcggaagcagggcatatattgaaacgtgacggaactgtgacggaagcagaatggtaatgaagttggatcgcagataaggagaataaggtgagaagaaaggacagggaagttaaggatatatatggaataagggaaattatacgggagtgtgactgctgcaggctggcttttccccatggaaagagcgcctacatcgttcctctcagcttcggatacaatgaggaggaaaatgcgttctatttccacggggcggcggaagggaagaagatggacctggtcaggcagattggatatgccgggtttgagatggatactgcccatggtctgaaggaggcggaccaggcctgcggatattccttccggtacagaagcgtggtgggggaaggacccatccgggtagtggaagaggtggaggagaagaaaaagggcctgaactgcatcatgggccacatgtcaggaaaggacagctgggcttacccggaggctatgcttaagagaaccgctgtactgcgcctggatgtggaacagatgtcagggaaagagcaggtttaagggcagtaacgaaggaggaagaatatgtttgagtcaagatgcggagtccgctgcaatcaatgtgaaagaaaggaagcggtccgctgtacgggatgtgtaaccatggaaaagcccttctggggcggtgagtgcggggttaaatcctgctgcgaggcaaaaggactgaaccactgcggagaatgtccggattttccctgtgagatggaggcatccatgggaacggacatgggctttgacgcagagccaaggctaaaacagtgcagggaatgggcaaaataatatcatcatggaggatatatgctgtcagaggatatggcggaagcagccgggagggagtatccgattttggataagatttatgaagatcagacggtcatcagggtgtcagggaaaagagtggagtttgactcggtgaaattcgtcaggtgcaggatggaggaatgtgattttagcggcgcatccttctgcaatgtgatatttgacaagtgtgatttttctaactgttccttccgggatacctattggaagaatgtgaatatatcagactcaaagggggatggaagccagttctgcaattccacgtttaagtgggtaaagcttctcgacagtcagtttcactatgggaatttctccactgtcttctgggagttcggtgaaataagaggctgtaatttccgggagtcctttatgtctgaggtgaagtttaaaaagacggtcttttcctccacggacctgaccgggacggattttttccgcacgccgttaaagggaatggatttatcagagtgcgccattgacggcattatggtctcagatcagtttacggagctgtcaggggtaaaggtcagcctgctgcaggcggctgagctggccagactgatgggcgttaaaattgtgtaagaaggttatataatataaactatatatagaaaacaggaggatgttacaatgatagagagcatgaggattcaggagtttctggatgtattatcttcaaaggagccggtaccgggcggaggaggagcctcggccctggccggcgccctgggcaatgccctgggacagatggtgtccaatctgaccataggcaagaagaagtacgcgctggtggaggatgagattaaggagctggcagagcggatgaagggaatccagggacagtttacccagctggctgaccaggatgcgaaggtgtttgcgcctctggccaagtgctacagccttccctcagatacggaggaagaaaaggcatacaaggcagaggtcatggaagcacgcttgctagatgccagtctcgtgccaatggaaatcatggaaaaggcggcggaaatgctggaaatcatggatatccttgctgataagggaagcaggatggctgtcagcgacgtgggcgtgggagttcagttcatccggaccgcattgctgggagccgtgatgaatgtgtacatcaataccaagtccatgaagaacagggggaaggcggaagaaatgaatgaaaaggcggaacgcctcattagggaggggacagaggcagcggaccgcatatatcagaaggtgcttgggcagctgagatagaagccggaaatcgccggcttttatgaacctgccgacgtatatttgttcaccccaaccctccagaacaggcagcagagggcgaagaatacaaggcatgagacaggggaggcagcatagagtaaacggctgctttttcccagaaggataagcaggggatagtattggaaacaggccaaagggatagaaacagagagccgcataaataatgtaaaatcccatgaacagaaaagtaccgcacagaatcatgaagagcagaagaaaagctccgcggagagtccagcggataccgctggcgtgtacggcgtaagcaaggatgatggctgcctgtaggaggcgccctacgctggagaattcaatcctggaggcaaaggtctggaacagggttccggcagggcggagcatgatccggtcaaattcaccgtttgaaaccacgtggctgaatcccttaaagccagcggcaaataattctgctatggaaaaggcggacaggacaacggaaaaacacaggaggacctgctggtatgtgaagccttccactgcatgaaactgctgaaacatgaagaacacgctcagaaaaccggcaaaggaaacaaaaaactgaccaagggccgtaaggaggaaagagaccttatattcaagagcgcttttcagttggatggaaaaatagcggcagtataaacgtagcataatcaacctccctgtatgactgcgtgttttaaggcgagctacatcaaataatggccgaggattgtcagggaaatgacccaaaaaagctgaagggccagggtgcccgcggcctctgtaccggcaacggatataccgctttcctgtatattcattaaatcagaggcactgccaccccgggggaacggtgtataatcaatggaaatatgtttggcagaggaataatgttttttcagcatctaaaggtcgccgtccaatagaaggcggccttttcctatgagaagaatcctgtttgtcaatgcctctatatcctgggtatcatgggtggtcaggatgatggtggtgccatggtccctgttgatttcacggataatattgcggacagcaatttttgagaccgcatccaatccaatggtgggctcgtccagaaagaggattcgcggcgagtgaaggagggaggcggcaagctctcaccgcatctgttgtcccagcgaaagctgccggacaggtgttctgattatggctccaatgtccaggagctgaatcagataactcaggtttctgtgataagactggtctgaaaggcggtagatatcctttaaaagttcaaaggaatcttccacaggcacgtcccaccacagctgggagcgctggccgaatacaactccgatgtccttgacatattccctccgctgcttccatggaatcatgccattgattcggcattggccgctgtccggaaccaggatgccggacatgattttaacggtactgctttttccggcgccgctgggacctatatagcccacgatttcaccctcacggatataaaaggagatatcctccagcgcatggatggtttcatattccctgtggaacagggaagaaaaggcggcccacagaccggaattcctttgggccacccggtatgtcttgcagatatgttccaccgtaatcatgtttttatcctccccagaaagcctgtacggcattttagcaataaatttctattttatagtctggataagggattgtcaacagtattaaaataaaaaacctcctgcaaaagtgccgttggatcctatagtttttttctatgtacaaaaagcatatttatacaacatttctatccgggatgcagctgaattcagtcagactctgagaaatctggaaaatactcttcttaattactggagttatatatgtgatttgttgaattggaataaaagaactgaaattgaaaaaatgtaatgggaattatggaaaaataattgaattaaagtagtaattggtagaagtagacaaaaaaatataccgatgctataatgaggccgtcatttttacatcattcaatattccagatacagggctggtgactggctttacggattcctgtatctgtcggaaaggaaggttttactattatgaaacacaggaaatggtcccgactgctggccctggctctcagcgccgtgatgctgaccgcatgcggccagtccggcagggcgaaggaggagcccgccaccgcggttgccggaggggcggctgaggggacagaaaccacaaagccaacaggggaaataagttataaaacagagctgaacgtcgccataacagcaaatccgccgagtctggatgttcacggtgtcaattccaacattgtgggcggaatcggtacccatatctacgagccgctgtttgctatggatgcagactataagccggccggtgtcctggctgattcctacaccataagcgaggatggcaaggtctatacaatcaaactgcgccagggcgtcaagttccacaatggacaggaaatgacggctgacgatgtggttgcctccatgtcccggtggctggaattatcgggcaaggcaaaagcccttctggcaggaaccgtatttgaaaaagcagatgattatactattaccatgacattgccggaggcatatgccgatgccctgaccgtagtcgcagcgtccattcagttccctgcgatttatccgaagtccgttattgattctgcaggaacagagggcattacggaatacattggcacaggtccctataagctggacgagtggaagcaggaccagtacattcatttggtccggtatgaggactatgcgcagccggccggagagtcttccggtttcacaggtgaaaaactggcagctactccggatatttacttccgcgtggtgacagatgattccacccgggttgcaggtgtccagaccggccagtacgacattgcggaagaaatgccccaggagaggtatcaggaactttccggtgacagcagtctcaagttttatgtaaagaccgcaggtaccatcaacctgttcttcaacaccacaaaagggatcatggccagcccgcagatgcgtcaggctattatggcctgcctgaattgcgatgatattatgctggcaagctacggagacccaaacctgtatgtgctcaatccagggtggtgtaacccggatgatgcgatgtggggcagtgatgcaggctctgaatattacaatcagaataacatcgggaaagcaaaggaattgttgacagaggccggttataacaatgaagagattgttctggtgacgacacctgattatggcgagatgtacaatgcaaccctggttgtacaggctgaattacagagtgcgggcattaatgcggtggttgagagttatgacttcgcaacctttatggagcacagggccaatccggatcagttttcgctgtatattacaagcaaccgctataacctgaatccggttcagctgtctgttctgaccaaggattgggccgggctggaccgccctgaggtagatgaggggattgctgcaatccgtatggcatcttcccctgaagagtcatctgcaaaatgggatgatttgcaggagttcctgtatgagtacggtgcggcaagcgtactgggccactacagcggcctgatggccacaggggccggtgttgaaggctttaatttcttcgattttccactttactggaatgtgaaggttcctgcataacttatggtttactggcaggtggcgggttctcccccacctgccttttgatatatcaatatgtatgattgaatgggaaggaaataataatgctatcttatatcataaagcggattctctcgctgattccgactctgtttgtagtgtctgtagtggtttttctggtggtttacatgattcccggaggtccggccacagcgcttttaggcatggaagccaccccggaagccattgcggatttaaatgcacagctggggtttgaccgccccttttttgtgcagtacgcagactggttcatgaatatgctccatggtgactggggacagtcctatttccttcagacaaccgtactggatgccattggagaatactttgttccgacgttcagcctggcggtttttgcacagctcatatctctggtaatcgctgtcccaatgggaattctggctgcctacaagcggggaacctctgtggacatcattacagtatcaatttccctgctgggaatcgccatacccggtttcctgctcagtatgtttctgatgctgttttttggtgttcacctgaaatggcttcctgtggcaggttatgtacagctgagccggggactgttggaacatctccggtatctgcttctgcctgccttgtcgctgggggttgtccaggctgcttatattacccgcatgtcccgatccgctatgctggatgttctctatatgaattacatacgcacagcccgggcaaaggggctgagggaatctgccgtggtcctggtttacggcctgaaaaacgcgggtcccaccatactgaccgttgcaggccagtcctttggcagccttgtaacaggaaccatcgtgaccgaaaccctgttcaacataccgggactgggcatgcttaccatgacttctattacgcgccgtgatgtttttgtcattcagggtgtggttctgtttgtaactctgatttatgtgctggtaaaccttgcggtggacattctgtacggatttgtagatccgcgtatccagctgggaaacaagtagggaggaaaatcatgaaaataccaaataccacaacagattatcagacaagcctggacatcctccgcgaacagcgccagattcggcgtgagcgctttttttccagtccggggctgattatggggcttactgttttcattctcattgtgatggccgccataatcattcccgcggttgccaacgtggatcccaatgcaatggccattgcagaccgtctcaaggggccaagtctcaaacatccctttggcaccgatgaatttggccgtgatttgatgatccgcgttctctacggggcaagagtttctcttttggtaggcggcaccgtggctctgctgtcctgtgccctgggcacggtcatcggtatttacgcaagttacttcaaaatcctggatcacatcctgatgcgtatctgcgagggtctgatagccatacccggtgtgctgctggcgattgcacttatggccgcgctgggagcaggcaatctgaacgtgattatagctctgaccatcgtgtacacccccagcgttgcgcggattgtgcgcagcagcgccctggtcaccagggaacagccctatgtggaggcagccaaggttcagggggcgggcagcgggcgcattctccggaaactgattctgccgggcgtaatttctcccctgacggttcaggcgtcattcatttttgcgcaggcaatcatttccgaggcgtctttgagcttcctgggagccggtatccctgctccggccgcaagctggggcaacatattgcagggaagcaagcaggtactccagaaagcgccgtggaccgtcatatttccggggctggcagtggtgctttgcgtgctcagcctgaatcttttgggggatggactgcgggattaccttgacccgcgtacggcagggaggaagaaacgataatgaaaccagatgaaacacaaaatagaatgcaaagtgaaatgacaaatgaagcggggacactgctggaaatccgtaatctgaaggtgaggtttacggcccgaaaaaaagtcctgaccgcggtggacggagtgagtatgagcatcaggccgggcgaaatcgttggcgttgtaggagaatccggttccggtaaaagcgtcatgtcccagtcaatcctgcgtctgcgggaatatgattctgatgtgagatatgagggccaggtcctgtttgagggtcaggaccttttaaaggcatcccaggctgaaatgcgtgggatacggggcaaccggattgcggtcatttttcaggaccccatgacctcattaagcccggtgcacaccgtgggcagacagctgtcagaggtgctggttctgcataagaagatgacgaaacagagggcaaaggaacggtgcagggagctgctgcgtctgacaggcataccaaatccggaagattgtatgagaaagtatccttacgagttgtccggcggtatgcagcagcgcgtgatgattgccatggccctttcctgtgagccgaaactgctgattgccgatgaaccgaccacggcgttggatgtaaccattcaggagcagattttgaacctgatcgcggaactgaacgaacggatggggatgtcggtcctgtttattacccatgacttgggggccatggcccagctctgccacagcgtccgcgtcatgtatctggggaatcttgtggaagaagcccggacagaagaattattcgcccggcccatgcacccatatacccagggcctgctggactgcatcccccgtctggattcagaccgcagccagcagctgcacgtgatttccggcgtggtgccgcccctgtccaatgtgcctgacggctgccgtttctgcacccgctgtccatacgccgaccagcgctgcatgtcgcagaatcctccatcggtggaggtgttcccggaacataaggcaaaatgctggaaatacactccggaacaggaggcggaatagaatgaaaacaccacttttagagatgaggaaccttcagaagagctacccggtttacggccctctgggcaagctgtttcctcccaaaacatacatgagggcggtgtccaatatgtctcttgatctctatgaaggcgagacctatggtttggttggagagtccggctgcggaaaaagcactaccggacgctccatactgggactggtaaaacctgacaggggtgagattctgtatagaggccgcgatttgacccggctgagcgatggtgaattccgccctctgcgccgggatttgcagatggtctttcaggataccttatcctccctcaatccgcgttcccgaatcggggctttgttggaggagccgttgatagtccaggggatgggggacacaaagggacggcgccaaaaggtgctggagacattggaaatggtcggattatcggaggattactacttccgctatccccatgaactgtcggggggccaggtacagcgcctgggcattgcgagggcgctgattattgagccaaaactgattatctgcgatgagccggtttcggcgctggacgtatccattcagtctcagattctgaatatgctgacctcgctgcaaaggaagatgaatctgggaatgctgttcatatcccatgacattggcgtagtgcgttatatctccagccgcattggtgtcatgtatcttggtacattggtggaggaggccggcactgaccagctttttgcacatactcttcatccgtatacccaggccctgtttgcttccatcccggattttaacaagaggggcagaagcgtatctcttcagggggaactgccaatgcacaccgatgagtttaagggatgtgtgttccatacccgctgcccttatgccagtgacaaatgccgtgagtcggctcctgaactgacggaaatccgtccggggcacagggtggcctgccatagggtaggttaagacatgggtaaatagaaagggtacggatatataatatgcagaagatattgtttgtcagttattgtattttaaatacagccgccaaggtggcccggtacggggaatccgggaaacaggaggagaaatccggacaggagtttgtaatgaaggcagttgaacagggaatccaactggttcagctgccctgtccggaatttaccctgtatggtccaaaacggtggggccatacaagggaacagtttgacaatccgtttttcagggagcattgcaggaaaatactgagtcctgttcttacccagatgaaggcgtatatggggccggagagccgggagcaggggttatgatggaggtatccccatatgacagtaacacagagaatacagcttattttgcggcccagacaggctacatacctgtacgcaaatcagcccggcaggaccctgtatttgcagctgtgctggcagaaaaaccccaggcaaacggtgagaaagccatggaggaagccagaaacaattaataatccggtcctctgtcaggggacgcggtaatcggatgggaatcaggtaacatcaccgatgacagcagcccttgcagccggagaacgtacatgatataatcagaccactgcaaagcgccgtatgccatgggcaggcagctgcggaggattggttttggcaggggtatggagtggacgtgggtgagccaaagcattctcagggaaggagaagaagattgaaaatgaaaacattaaaaggcgccgaggtttcggcaaaaatcaaggaacaggtaacgcagatgatggaaggcctggaaggcccggctccgaagctggccattgtgcgggtgggagaaaaaccggacgatatgtcctatgaacggggggccgtgaagaagatggagaacttcggcctgcgggtccggacttatgtgttcccggaacagataagcgacagcgatttcaaggctgaattcagtgcaattaaccgtgacccggatgtgtcggggatcctcctgctccgtcctctgccaaagcagattgcggagacggacatagagaagatgattgacccggaaaaggacctggacgggatttcgccggccaatattgccaaggtatttgcgggggacaaaaccggttttgcgccctgtaccgccgaggcggtcatagaggtattgaaggccaatgagatagatatgacgggaaagaacgtgaccatagtgggccgcagcatggtggtgggacgtccgctgtccatgctgatgctgaaggaaaatgccacggttaccatctgccacaccaggaccatggacctggaggcagagtgccggagggctgaaattctggtggccgcagcaggaaaggccaaaatgctggatggccgtcacgtagggcaggatgccattgtcattgatgtgggtattaatgtggatgaaaatggaaaattatgcggagatgtggatttccagtccatagagtccatggcatccatggcaacgcctgtgccgggaggcgttggggcagtgaccacggccgtgctggccaagcatctggtgcttgcaggccaaagacagagaaggaattagatggaatctttgctgaatctttgctgattcccgtattttcctcttgctaaaccagaaaaatgcattataatataaaatgttgaatatatttatagttatgcaatttgatgcataaaagaaaagaggagaatattattatgaagaagaaggttttagcgatcaccatggcagcactgatggcagcttccctgactgcctgcggaggcagtgcaaaagagacaacggcagccgatacagcagcagccgcaacagcagaggagaaggcagaggataccacggcagccgagagtaaggatgagaccagcgcagaggcagctgagactggggctgctaaggatgcggcaggcggcaggcttatcatggcgaccaacgcagagttccctccttacgagtatcatgacggagatgccgtcgtaggtattgatgcggaaatcgcaaaggccattgccgatgagctgggcatggagctggagattgaggacattgcttttgattctataattcctgagattgtatccggtaaggctgatatgggtttggccggcatgactgttacggaggaccgtatgcagtccgtggatttttccaatacctatgccaaggcatcccagaaaatcatcgttacagaggacagcgagattgcctctcctgatgacttaaagggtgtaatcgtaggcgtacagctgggaaccacgggcgatatctatgtatctgacttagaagctgacggaaccacggtagagcgttacaataagggcttcgaggctgttcaggcactgagccagggcaagattgacgcggttgtaatcgacggagagcccgccaagacctttgttgctgagacacaaggactgaagattctggatgagtcctttaccgacgaagagtatgccattgctgtaaagaagggcaacacagaactgctggagaaaatcaacggcgcccttaagaccctgaaggacaacgggacactggacgaaatcgtagctaagtatatcaaggctgagtaatcgtacagggtatggaatagccgacttaagacagacaagatggtaccggcgtatacaggaagacagccggtataaaactgccgcaggctgcagaaagggaggtgcaatgccgcagcgcatccccgttcctgcagggcggcagtttttgactgtatgacaaagggaaacagggcgtctgccctgccctgtgaatcataaagaaagagcagaggatgatgagcatgtggaagacatttacagatgcgttttacctgaactttgtggcggacaaccggtggaaatatctgaccgagggcctcaagacaacgttgattattaccttttttgcctgccttatgggcattgtactgggatttctggtgggaatgatacgttccacctatgagaagacccataagcttaaggtgctcaatgcaatctgtaaagtgtacctgaccgtaatccgcggcacgcctgtggtggtgcagctgttaatcatctacttcgtggtattcggaagcgtcagggtagacaaggtcatagtggctattctggcctttggagtcaactcaggagcctatgtggcggagatattcaggagcggcatcatgtccattgatccgggacagatggaggcaggccgcagcctgggcttcaactatgcccagaccatgtggtacatcatcatgccccaggcattcaagacagtgcttcccaccctgtgcaatgagtttatctccctgttaaaggaaacctcggtatccggctacattgccatccaggatctgaccaagggaggggacatcatccgaagcaggacgtacagtgcttttatgcccctgattgcggtggccattatttatcttattattgtaatgatatttacaaagctgatacagatactggaaaggaggctgagacagaatgagcggtaatacaggattgtttaacggacagcccttaatccgggtgcaggaactgggaaagagctttggctccattgatgtcttaaagggaatcacggtggatatccacaagggagatgtggtctttgtggtagggccttccggttccggcaaaagcaccttcctcagatgtctgaacctgctggaggagcccacaagcgggcatattttctttgagggcaccgatattacggactccaggacggatattgacaagcaccgccagaaaatggggatggtattccagcagtttaatctttttccccacatggatatcatgaagaatctgaccattgctcccatgaagcttcagggaaagggacaaaaggaagccgaggaggaggccatggggcttctggaacgtgtgggactggcagacagggcccacgcctatcccagccagctttcgggcggccagaaacagcgtattgccattgtccgggctctgtgcatgaagccggatgtaatgctgtttgacgagcccacctcggccctggacccggagatggtaggagaggtactgagcgtaatgcgcgacctggccagggaaaagatgaccatggtggtggtgacacacgagatgggctttgccagggaggtggccaccagggtcatgttcatggacgagggacacttcatggaggaagccgcgccggaggaattcttttccaaccccaaaaatgagcgtttgaagtccttcttaagtaaggtgttgtaaagagggataggatgtaaaggatgcatggcgcggaggtgtatccgtccgtgagtggaatggggctggggcggtacaaccctgtcctaatccactcacccgctgcgtatcattgcgcctgcatcgtctatatccaaatcagaagaaaagtggcatgccggggttgatggcataccatttatcatagagggccgcattatcttggtattatcttgatatgcggccttttggtttaggattaattataaaggatataatctaagcgggcgaaagcccaccaattgcccaatatcattggcggggatgttgtgttttttcgctgcggaaacggtcaccgcccgccctgcgttcccgcctctcacggacgcggactcccacatgcgtccgcgtaccagcgccagccgctttcatgttctttacaacttaggaaaatctccgcaggatgtatcctccgcggcagcgaatttctccaacagggtgcttaaacgcatcagacagtcgtccagctccgccagttcctcctgattgtacgaggaaaggcgggacacggtgcaatccagcatggcctccctcagctgcttcatgatggatgagccttccggcgtaatcatcaggtatacatggcgccggttcatggagccgtgctgtctgcggaccaggttcttttcttccagatcattgataagcttggtcagctgctgtttggtaatgcccagctgcagggccatctccgacatggtgggcgcctgcctgcccggctggtttaactgcatcaggacctggaaagcggcggaattggcccgtatctggttctgctggtggtagctgttctttgccaggttaaagaattcgatggcaaattccatgaaatgttcccccacatgtctgctgtctgctggcttacggttcatgccgattacctcctctctatattctgtaaccgttttatcatacctgaggaaaaaagtcaataaatattaaaagtaaataaaaacttataattaaccattgacaaaagttgcagatggtattatcttacatagtgaacagcgggaaacaagtgcagatgcaatcaggctgcgcatatccccgcatatgagtatggattaagaaaaggagacctggtatgggtgtgaatgaagacagtggaaagagaagcttaaaaagcggcacgcctaaaaagccgttcatttactattatttcctggtcatattggtggtgatggtgttaaatgccctggtatttcccatgatggagcattccgtggaagtgccgtacagcgagttcctgaaggaactggatgccggaaatgtgaaggatgtgtatgtcagcaatggggaatcacagattcagtttacgaaaaaggaccagaagcagtggaacctcagttataagacagggccgattccgggggatgacctggttaagcggctgcaaaacgcggatgtggagaattttacaggagaaatccagacaaaggcttccccgctcttaagcttcctgatgtcctgggttgcgccgattcttatgtttgtggtcattggaaatatcatggggcgcatgctttccaagcgcatgggcggcagcaatgccatgaccttcggaaagtccaatgcaaagatatacgcagagaatgagacgggaatcacctttgccgatgtggcgggggaagaggaggccaaggatgccttaaaggaaatcgtggacttccttcacaatccgcagaagtacgcggatataggagcaaatcttccaaagggagcactgctggtgggtcctcccggaaccggcaagacgctccttgcaagggctgtggcgggagaagcccatgtccccttcttctccatatccggttctgaattcgtggagatgtttgtgggtatgggcgctgccaaggtcagggatctgtttaagcaggccactgataaagcgccgtgtatcgtatttattgatgagattgacaccatcggtaagaagcgcgacggcggaggcatgagcggaaacgatgagcgtgagcagaccctgaaccagctgctgacggaaatggatggtttcgacggtaagaagggcgtggtcatcctggctgccaccaaccgtccggagtccctggacaaggccctgctgcgccccggccggtttgaccgcagagtgccggtggagctgccggacttaaagggacgcgaggctatcttaaaggttcatggacaaagcgtgaagatgtcggatgacgtggattacaatgccattgccagggccacggcaggcgccagcggcgcggagctggccaatatcataaacgaggcggccctgagggcagtgcgcatgggccgcagcgccgtggtacaggccgatctggaggaaagcgtggagacggtcattgccggctaccagaagaaaaatgcggttatttcacagaaggagcgcagaatcgtggcgtatcacgaggtgggccacgcgctggtggctgcctgccagagccacagcgctccggttcagaagattaccattatacccaggacatcgggagcattgggatataccatgcaggtggaccagggagagcgctacctcatgagcagggaggaggcgctggataagattgccacctttacgggcggccgggcggcggaggagctgattttccattccattaccacaggcgcgtccaacgacattgagcaggctaccaagattgcccgttccatggtgacccggttcggcatgaccgatgagtttgacatggtggccatggaaaccgtgaacaaccagtatctgggaggagacacatccctgatttgcgctcccgacacggcaaaacgcatagacgaacaggtggtgtccatcgtgaaggagcagcaccaaaaggcgctttccatccttaaggaaaatgaaggaaagctccatgagatagccgcctatctgctggaaaaggaaaccatcacgggagacgaattcatggaaatctttaaccgcgcaggagaagaacaggtccggggagaataggatatgtttagttgcatttgaccatgggctgtgctattctggatatatagacaggtgggggagccatagccccgcgctgcgtatatcctttatagatgatgagagaagatgatgggttgatgagagaatgagttgagagcggatggagaatgcggcgtgacggcccccgcctttctgtgaaactaatacgacagaagaaaggcaggaaaaaggtatgggaaagattttgcagcagttgtacaggggggatttatgcccggcggaaaataccatacgcggcaatgcggaatacgatgcactgaccaggcagtccatggatgatttcaaccggtttaccgacaagctggaccgggacatgaaggaggaatttgaccttctgatggaacattacctggagcttacctttattgagaaaacccagtgttttacggatgggttccgcattggcgcaggtgttatgtgtgaagtattttatgaaaatgcagcgaaaggcagctaaattataagcatggcttaagaatgaaaggcgggattgctgataaataaaagcaatcctgtcttattgtgtaaaaatgggtcaaaattcctggttaatattgacaatagaagaaaaagtgatatacttaactcgtatttgtgttactttttaatgggtaggacaacggtggaacgtcaggtgtaatggagcagccagtacctgacgtattttaatcgggttctgcaaactacacttcatggaggagagtattatgaaattaaaaaagttagcaagcgtagccatggcaggtgtgatgacagtatcactggcagcctgcggcggatctaacacagcagagaccaccgcggcagccgcgaccacggcagccgaggctgagacaactgcggcagcagaaggcgcggagacagagaccgcagaagcaccggccacaggcggtattgccaaggaagatttaaagatcggttttgtctacataggcgatgagaacgagggttatacagccgctcattacaacggcgccatggagatgaaggaagccctggggctgtccgatgaccagattatcgttaagtggaatatccctgaggatgagactgcaaaggatgcggccatggaccttgcggaccagggatgccagattgtatttgcaaacagctttggacatgagtcctatgtgattgaggcggcaaaggagtatccggatgttcagttctgccatgcaaccggcttccaggcagcttccagcggcctgagcaacatgcacaactatttcacttccatctacgaggcacgttacgtatccggtgttgtggccggactgaaactgaaccagatgatagaggacggaaccgtgaagcaggatgcctgcaagattggatatgtgggagcttatccatatgctgaggttatcagtggatacacctcctttttcttaggtgtgcgttccgtatgcccggacgctaccatggaagttaagtacaccaacagctgggcaagctttgacctggagaaggaagcggcagacgccctgatttccgacggatgtgttctgatcagccagcacgcagataccaccggtgctcctaccgcatgtgaagcggcaggcgttccctgcgtgggctacaacatttccatgattgcaaccgcaccaaaccaggctcttacatctgcttccaataactggggcgcatatgtgactgaggctgtacagcatgtcattgacggaaccgagattccggttgactggtgcaggggcttctctgacggcgcggtgctgattacggagctgaatgaggcagccgtggcaccaggaacaaaggagaaggtggatgaggtggaagccaagctggcatccggcgagcttcatgtatttgatacctccacatggaccgttggcggcgagacactggatacatataagaaagacggcagcgacatcgagtatatctccgacggatatttccatgagtcagagttcggttccgcaccttcctttgatatcctgattgacggtatcaccactattgacaactaagatagccagagcgtgtctttccctctggaaattaaaggctgtaaaagcggagccattcatatctggctccgcttttttccacggggcaatgagccaatacgaccaaatacaaagaacggaggtttgccgggtgagcgaagaatacgcaattgaactgaaaaacatcacaaaacggttcggcaaggtaactgccaacgacaaggtatgcctgtctgtgaaaaggggggaaatcctgtccgtcctgggtgaaaacggaagcggaaagaccaccctgatgaacatgatttccggtatctactacccggatgaggggcagatattcgtaaacggaaaggaggttaccattcgttcgccaaaggactcctttgctctgggtatcggcatgattcaccagcatttcaagctggtggatgttctgacagcggctgagaatattatcctgggtctgtccgggagggaagttctggacatgaaggctgtgtcctccaaaatcaatgagctgacagccaaatacgggttcgagctggatccggaccagaagatatacaccatgtccgtatcccagaagcagaccgtggaaatcgtaaagcttctgtaccgcggagtggatatcctgattctggacgagcccacggctgttctgacaccccaggaagcggacaaactgtttgctgtgctgcgcaacatgcgtgaggcaggccattccattatcattatcacccataagctgcacgaagttctggcgctgtcggaccgggtgtctgtactgcgcaagggccagtatatcggcacggtatacacggcggacgccaccgaggaatccctgaccgagatgatggtgggcaagaaggtaagcctgaacatcgagcgcccggatcccgtgaatcaggagcgccgcctgatggtggaaggagtcacctgcgtggacaaggagggggtaacgaccctggaccacgcctcttttactgcttacagtggggagatactggggattgccggtatcgcgggaagcggccagagggagcttttggagtccatcgcgggactccagccaatggcaggcggcaccatcacctattatccgcctgaaggcggcgaaaagcagctgtccggcatgagcgcctcagccatcaataagctgggggtaaagctttcctttgtgccggaggaccgcctgggcatggggctggtaggcgcaatggacatgacggacaatatgatgctcagaggataccgcaggggacgttccgtctttacggacagaaagacgccaaaaagcctggcggagcagatcatagaggaactggaaatcgtgactcccggcgtcaccaccccggtgcgcaggctgtcagggggcaatgtccagaaggtgctggtgggaagggagatttcttccaatcccaaggtgcttatggtggcatatccggtccgcggactggatatcaactcatcctacaccatctaccatcttctcaatgagcaaaagaaacagggagcggccgttatctgcgtaggcgaggatctggatgtgctcctggagctgtgcgaccgtattctggtgctgtgcgcaggacaggtaaacggtgttgtggacggaaggacagcgaccaaggaacaggtggggctgatgatgaccaggacaggaggtggattaagtgagtaaggagatgacggcagtatccaacaaggaacctctgatgcatatatccaagagggatgagatagatatgtggaaggcctgggccatccggctgggagcggttctcttatcactggtggtctgcgcaggggttatctatgccctgacagggcttaatcccctggaggtttataaaggaatctttgatggggcagtgggtaccaaaaggcgtacctggatgaccattcgcgatactctggtgctgctctgtattgcaatcggcatcacgcctgcattcaagatgcggttctggaacatcggagcagaaggtcaggtactgattggcggcgtcacatccgcggccatgatgatttaccttggcaattcgctgcctcccctggtcctgtttcccctgatgcttttgggaagcgccctgtcagccatggtgtgggcagctatcccggcatttttcaaggcatactggaacaccaacgagacactgtttacattgatgatgaactatgtggccatgcaggtcatcacatactgtatcattttctgggagaatccaaagggttccaattccgtgggaactatcaactccaccacaaagggaggatggcttccaaaacttttcggtctggaatacggctggaatctggtgatcgtgctggcgctgactctggctatcttcatttatctgaagtacagcaagcagggatatgagatcgcggttgtgggagagagcgagaacacggccagatacgcgggaatcaatgtaaagaaggtaatcatccgcaccatggccctgtccggcgccatctgcggcattgcaggctttatcattgtcagcggcgccagccataccatttccaccagcacggccggcggcaggggattcacggccatcatcgtatcatggctcagcaagttcaatgcatttgctatggttctggtctcatttttcttggtattcatgcaaaagggagccgggcagattgcctcccagtttaacctgaatgaaaatgcctctgatgtaataacaggcatcatcctcttcttcatcctgggctgtgaattcttcatcaacttcaaggtgggaatccgcagcaaacggaaagaagcaggggctaaattgtcataaggaggctaaaatatgggttttttggtaatatttattcaaaaagcaatcggccagggcatcggcatcctttacggagccctgggagaaatcatgacggagaaatccggcaacctgaatctgggtattcccggcatgatgtatatgggcggcatcgccggactgatcggagccttcctgtatgagaacgggacagcaaatccaagcggtccggtgggactcttaatttcctttgtgtgcgcctttgtgtgcgctgccctgggaggactggtatacagtgtactgaccatcacgctgcgggccaaccagaatgtgaccggtcttgcccttaccacctttggcgtgggcttcggcaactttttcggcggttccctggcaaagctggcagggggcgtgggacagatttccgtggcagtgacaggcgctgcctacaagacccccattcccggactgtccaagctgggcgtcattggacagattttcttctcctacggatttctgacctatctggcagttgccctggctctggccctggcgtttttcctggctaagaccaggcggggactgaacctgagggctgtgggcgagagtccggccacggcagatgcagcgggcatcaatgtaacggcttacaagtacctggccacctgcctcggaggaggcatcagcggcctgggcggattatactttgttatggaatactccggcggtacctggaccaacaacggattcggcgacagaggctggctggcaatcgccctggttatcttcgccctgtggaaaccggtcaatgccatttggggttctatcctgtttggcggcctgtacatcctttacctgtatataccgggcctggacaggggcgctcaggagatattcaaggcccttccctatgtggtcaccattgtggtcctggttataaccagcctgagaaagaggagggaataccagccgccccagagcctgggacttccgtatttcagggaagaacggtagggatttgagaggcagatacaaaagaaacattgtgtgagtaaacaaacagataagtgaaaaacaaaaaggaccttcccgcaggccggatagaatatgaatatctaaccggcgcgggagggcctttttacatgggcaagttccctccctcctgttcggctccattggaaaggatgcccaccaaatgtcggagcgggttcatgccaggggtcttctggaagaggttccagtaatttttcaacatttaatcgaacaaatgtttgcaaatacataggtgatgtgctatactagaaactgtcagcgctgtgtatcagcgctatgcgggaagaaccttttaccagaaacatttcacggccttccagggcggcgggatgaatcgtataaagaaaccacgcatgtttactgcgcactgcgcatgctgcattccgcaatcatatcaggcgtggactcaaaccaatcaagataaaagacaaggagcatgttcgatggcaaagcagtacattaaaatccgcggggcgaatgagcataatctgaaggatatttccgtggatataccaaggaatgagctggtggttcttacgggactgtccggttcaggcaaatcatccctggcttttgacaccatttatgcagaagggcagaggcgttatatggagtccctgtcttcctatgccaggcagttcctgggacagatggagaagccggatgtggagagcatagaggggctgtcaccggccatttccattgaccagaagtccaccaaccggaatccccgttccactgtgggaacggtcacggaaatctacgactacatgagacttttatatgccagaatcggtataccccactgtccgaaatgcggcaaggagatacacaaacagaccattgaccagatggtggaccagattatgtccatgcctgagcggacgaaaatccagctgctggcccctgtggtcagagggcgcaagggcgagcatgtgaaggtgctggaccaggccagaaagagcggctatgtgagggtccgcattgacggcagcctctacgagctctcagaggaaatccggctggagaagaacatcaagcacaacattgaaatcgtggtggaccgtctgattgtgaaggaaggcattgagaaaaggcttacggattccatagaaacggtcatggccctgagcggcggactgatgatggtggatgtgagcggcggcgagccggtgaatttcagccagagcttttcctgtcctgactgcgcagtcagcattgacgaggtggagcccaggagcttttccttcaacaatcccttcggagcctgtccggagtgttttggactggggtataagatggaatttgacgaggacctgatgattcccgataagtcgctgtccatagaccagggcgcaatcgtggttatgggatggcagtcctgcgcggacaagggcagctttacaagggcaatcctggaggcgctgtctgaagcctatgatttcaggctggatacgcctttccaggattatcccaaggaaatccacgacgtgctgttatacggaaccggaggccgggaggtgaaggtccgctacaagagccagagaggcgaaggcgtctatgacgtggcgtttgaggggctgattgagaatgtaaaccgccgctataaggagactttttccgagacgtccaaggcggaatatgagacctatatgcggattaccccctgcccggtttgtaaggggcagaggcttaagaaggagtcccttgcggttacggtgggcgggatgaacatatatgaagctaccaacatgtccattgtacggtttaaggaatttatggacgggctgaagctgactcccatgcaggagaccataggcgcttctattctgaaggaaatcagagccaggatatgctttctcattgacgtgggactggattatctttccctgtcgcgtgccacgggcaccttgtcaggcggagaggcccagcgcatccgtctggctacccagataggctccggcctggtgggagtggcctatatcctggacgagcccagcatcgggctccatcagcgggataatgacaagctccttaagacgctgacccatctccgggatttgggcaacagcgtattggtggtggagcatgacgaggacaccatgcgggccgcggactgtatcgtggacatcggacccggtgcgggagagcacggcggaaaggtcattgccatgggaacggccgaggaaatcatgaagaatccggattccattaccggagcttacttaagcgggcgcctgaagattccggtgcctgccgagagaaggaagcccacgggctggattacggtaaagggcgcagcagagaacaatttaaagaacatcaacgtggacattcccctgggaatcatgacgtgtgtgaccggtgtatccggttccggaaaaagttcccttgtgaacgaaatcgtttataaatccctggcaaggaagttaaacagagccagaaccataccgggcaggcacaagtgcatcgagggcgtggagcagctggataagattatcgacatcgaccagtcgcccatcgggcgtactcccaggtccaacccggcaacctacacaggcgtattcgacctcatcagggacttgttcgcatctaccccggacgctaaggcaaaggggtatagcaagggaaggttcagcttcaacgtaaagggcggacggtgcgaagcgtgcggcggagacggcatcatcaagattgaaatgcatttcctgccggatgtatatgtgccctgcgaggtctgcggcggcaaacggtataaccgtgagaccctggacgtgaagtacaagggaaagaatatctacgatgtgctgaatatgaccgtggaggaggcgcttaagttctttgagaatgtgccctctgtcaccaggaagatacagaccctgtatgacgtgggactggggtacatccggctgggacagccgtccacggagctgtccggcggcgaggcccagagaatcaagctggccacggagctgtccaagagaggcacgggaaagaccatttacatcctggacgagcccaccacaggactccatttcgcagatgtccataagctgattgatatacttcacaggctgtcggagggcggcaacacggttgtggttattgagcacaatctggatgtaatcaagacagcggattatatcatcgacattggtccggaaggcggggacaagggcggaacggtcatagccaagggaacaccggaggaagtggcccggtgtccggtgtcctatacgggaatgtatgtaaagaaatatctgaattgacaacagtcacggccgggagcggccggagcgcggcggcggggctgaggtgaatccccgcctttttgttaagagggcaggaaaggagattctctatgaaactggaagaatttgacagaacaaaggaagcagtcttcaacccggtggatattgtccaaaaactggatgggacggcaggcggccctggcccgtttcaggaaccggtccgtcagccagtttttttacagcgcggacaatctggataatgacgtgtgggagatgcggagtctggccaatgagagccagagggatgtaaagcagacgatactggatttggcggttgcactgggaaaggaactgtgatcggaactgctgtggtaagttgaaccatctgaaccgacgcatagaatatcatcataaaatatcatggatattgaaaatcctttgacatttgcgcagggcctacgttataatggacagattaaagagcagtgctaggagcggggagtgtaatggataaggaaaaaaaacgaagtctttcagaggtggcagcagattatgtaagggaacagattcttcagggaaagctggcccagagagaaaagcttgttgaaaatgatatagcggtaaagctgggaatgagccgggggccggtgcgggatgcgctgaagcagctgatgtacgagggatttctggattatgagaccaataaagggtattctgtctccatgctttcgcccaaggacgcctatgagatattctttctgcgcggcaacctggaaaacctggccctggagcggtgcgggggacgtctgctgagcgacagcatttttctcatggaggatgcggtgcaggccatgaaggaggctgtggcagaggacgacatggggaaaatcatcaagtatgatgagatattccataaacagattttattatcaggccagatggagcgcctgaccagtctgtgggagacactgagccccttaaacggagccatgttttacaccatcaaacaaatcaatgaatatgtatctgaaatgcaggcggatttggaccaggaagatatcgctgcccaggcaggacggcggggaaacaactatctggaacataaatggcttttagaaatcctgcagcgggggaaccttgaacagtccaggagcgcaatcaatacccactacatagccaacggtgagagaatttaccggattggaatgaagatgaagaaccaggaactgttttatcatgtgtaattggggatgcaggaataaaagaattagagcggacatgggaaagcggaaatgcaggacgtgaatacgattatatcacgttccggtatttccgctttttcaaattattattagggacttatttttcagttcctatttttcaggcatgtcctctatctgtctgcagatatactccatatcctcagtttcgtatctctggtcgcaggtaaaggacagcacatggctgtaaatgtaggccgcgtcgtcatggccttcggtgtccaccatggggccctggggccaataggtggtggtcttgatgccgcgtcccgccagataggactgaaccatgtccctgtcctctgcatacacggtaaagtggctgggaacagtgcctttttttagaaccgggaatatcacggtaagctgggggtgttccggcatatgatccagcagatactgatagttggcgcggcgtctctgtttcagctgctcaaagtcatagtgccgcatgatatactctgaatcccggtcgcttccataggaatcaaagatgcggcgcagcatcatctcggcgtcccagaaggtatcattgaacttctgtatggcctgggggtcgggagttcctgattggagaagctgctgtttgcctctcatggaaatactgcgcatggaaagatgagtctcgtcagggggcaggacgggaagggaaaagctgcctttccttttaatggcaaatccgccggccggtactccaatccatttccgcatactgcccaccacgtaatcacagtgagggtcaacaccgtcagatgagaagagggagtgggtcgtatcctccacaataatgatgccccgttcagagcatttccgtataaattccctgtcgtagctgcaaaagccgtaatagccgcagagattgacgacgctgatgcggtccaggaccctttcgtcgaagatgggtgtcaaatccttagatacatcgtagaataaaagttcatagccggctttcaggaaaggggcaaggactgtctcacaggtgtagacaggcacataggccacctttctggtgtcggtcaggcagatatcctgcagcgcatagtagttggcacatctgccggacatgaaaaagcgcaggcttccccctggagggcataggttttccagataatggttttcagtttcgggcagtggttcatatgtaaaaaatccgccaatctgtttcaatttttcttacctcccaagcatgtgcgggctccatggcgtgtgcgccacagagagacacttagatttaatataaagacaattatagcatagatttgaaaataagcacaatataaatgttgacaaaatatttaaagtgtaaaatttaaacaatgattgttgacaatattgatatattgttttataatttgtatgaagcgagggagtttcaaatcctaaggcttcttttttattattttggtttcaaaacccctgtggggggtcgtgaaatatgtattttgcttcgctgcgttaatgcagcaaatacacgaggattggagagagaaaaatgtacaagtatgtgttaaaaagactgcttatgctgattccggtcatcatcggcgtgacgttcattgtgtttttcattctgaacctgtcaccgggcgacccggcggcaatcattctgggtgaccaggcatcagccgaggcactggccatgaagaggaaggagctgggactggacgaccctctgctggtccgttacggacattacatgattaacatgcttcacggcgacctgggtacatcctataaaaataacctgagcgtatggtcacaggtcatggagcggtttcccaacacagcggtgctggcagtggcaggtatcctggtagccattctgattggaattcccacgggaatcatttccgccaggaaacagtactccctgatggataatacagccatgctgctctcgctgattggcgtggccatgcctaacttctggttcggcctgctgatggttattatgttcgcattgaccctgggctggctgccttcacagggaatgggggagggattcatacctctcatcaaaagccttgtccttccggcggtgacgctgggcacgggggctgcagccatgattacgcgtatgacacgttcatccatgctggaagttatccggcaggattacatagacactgccagggcaaagggcgtttccgataagaaaatcaccacacgccatatgcttaagaatgccatgattccgattatcacggcagtgggacttcagtttggcactcttttgggaggcgccatgctgacagagaccgtattttcctggccgggcctgggacgtctcatggtggattccatcaagtcaaaagatattcccatggtattggggtctgttatctttctggcaatcatgtttaccgtggtcaatctggcggtagacatcatatacgcctttgtggacccgagaattaaatcacaatacaagagaaagtaggtgcagttcatgggaaagaaacatctgattgccgcggaagcggaaggcgaccagcgctccctgtggggcgaggcatggcgcagattcaaaaagaaccggctggccatgattggcatgtattttatcctggcactggtcatcatagcaatagcaaccattattattgacgcggtcacaggcaaatccgtttacctgaattatgtggtaaagcaggacctgagaggacgtcttcagggaccaagcccggcacacccctttgggctggatgagttcggcagggatatgctgctgcgcatgctgtgggcggtccggtactcgctgttcatgggaaccgtggccatcattatttcatgtatcttcggcgggctactgggagcttttgccgggtactacggcaagaccgctgacaatgtgatcatgagaattatggatattcttttggccattccatccatgcttctggctatcgccatcgtggcggctctgggaaccagcatcaccaatgtgctgattgccattgccatctcctatgtgcctacctttgccaggacggtccgggcatcggtgctcacggtgaaggaccaggagtttatcgaagcggcccgctctattggctgcagcgactggcgcatcatcatcaagtacgtgattcccaattccatggcgccgattatcgtacaggtgacactgggaatcgcgggagccatcctttccatcgcgggactttccttcctgggacttggcatccagccgcccacccctgagtggggagcaatgctgtccaacgcccgaagctatatccgcgacgcatggcatgtcaccatcatccccggcatgggaatcatgcttaccatcctggcccttaacctggtgggagacggactgagagatgcccttgacccgcgtttgaagagctgatggatgaacactaagaaaggacgagtatgacatggcagataaaccattattggaagtaaaagatctggtcatccactatgaaacggatgacggagtggtaaaggcgctaaacggcgtcaatatacatatcggcgtgggagagacccttggactggtgggagagacaggtgcgggaaagactacgctggcaaaaggaattatgaggctgattcccaatcctccgggcaagattctgggcggagaggtgatttttgagggacaggacctgttaaagctttccaccaatggaatggaggccattcgcggcagggacatatccatgatattccaggaccctatgacctccctgaacccggtgctcacggtaggcgagcagattatggaggtgatcgagaaccataacaccagcctgtccaggcaggaagccagaaaatgggctgaaaacatgctggagagagtgggaattcctgcggagcgctttggagagtatccacaccagttttcaggcggtatgaagcagagggtggtcattgcaatcgccctggcctgcaaccccaagctgctcattgcggatgagcccaccacggccttggacgttaccatacaggcccaggtgctggagatgatatacaagcttaaatcagaaaataacacatccatgattctcattacccatgacctgggagtggttgcccagaactgtgattacgtggcaatcatctatgcgggggaagtggtggaatacggaaccctgcgggagatatacaaggacacgagacatccgtacacggaaggactctttggttccattcccagcctgacaagcgatgtgaagcggctttgggccattgacggcatgatgcccgaccccaccaagctgcccaagggctgcgttttctgcgagagatgcaagtatgcggttcctgaatgttccaagaaccatccggggatggtgactgtagacggaacccatcaggtccgctgcatccgctaccgctgagaaaaggagattgacatatgcaggaacagaaaaaagagatattacgtgtggaacatctgaaaaaatattttacgaccccaaagggcactctccacgcggtggatgatgttaacttttccatccgtaccggagagaccctgggagtggtaggggagtccggatgcggaaaatccactatgggaagggctatcctaaggcttcacgaacccacaagcggcaaggtttattttgagggcagggatatcctgagctgcaacaagaagcagctaaaggatttgaggaaggatatgcagattatattccaggatccctttgcttccctgaatcccaggatgacggtcagcgaggcaatcatagagcctctgctggtgcagggcatttacaaggccagtgaaagggccgccatcacccggagggtggaaaaaatcatgaacctggtggggctggccaagcgtctggtaaatacatatccccatgagctggacggcggcaggcgccagagaatcggaatcgccagggcattggcggttaatccgaagttcatcgtatgcgacgagcctgtgtcggccctggacgtatccatccaggcccagattcttaacctgatgcaggatttgcaggaggagctgaaccttacctatatgtttattacacacgatttgtcggtggtaaggcatttttccaatgacatcgtggtcatgtacctgggacagatggtggagtcggcgcctgccaaggcactgtttaagaaccccatgcatccatacacaaaggcgctgctgtcagccataccggttcccgatccggattttaagatggagcgcattccgctaaagggcgagctcacatcgcctatcaatccggagccgggatgcaggttcgcaaaacgctgtccttatgcgacggaaggctgtaccaacaatgaaatgactttaaaggaaatggagccagggcattttgtgagctgccgtatggtccaggagcagggataaattccgggaaaatccagggcggacgcctgaaacccggtgtttatagagcaagattgacagagagaaatgtaagaaagagaggagctagtatgagaaaaacatggaagaaagtcattgcattatccttaatggcagcaatggcagtaagtgcagccggttgttccaagtccggacagacctccacggaaggcggcagcgctcagacacaggcaggttccaaggaaacagaggcaggaggaagcaccggcggttccggggagtacaaggacacggtggtatgggcacagggggctgatgttacttccttagacccgcatcagggcaaggagacgccggccgtagaggtaacggatcagattttcgacacgctgaccgttgttgacgctgctaccggagagctgcagcccctgattgcggagagctgggatcagaattccgatacatcctatacattccacatccgccagggcgtaaaattccacgacggttccgaggtgaaggcagaggacgtaaagttctccctggacagagccattaattccgctgcggtttcctacattgttgactttatcgacagggtggacgtggtagatgattatacggtcaatgtagagctgaaggcgccttacgcaccggctcttagaaatctttccgtaccgtttgcagccattgttccaaaggcagtggtggaagcggacgaggaagccttcaagcttcatccaatcggcacaggcccatataagttcgtagagtggaagcagggggattccgttacactggagcgctttgacgattactatgcaggaccggcagagacacagaagctggttatgaaggtgattcctgaggcatcccagagaaccatcgccctggagaccggagaagtggacttggcctacgacctgcttcccaacgacctggagaaggtaaggagcaattccgagcttcagctgttcgaggctccgtccctgacctgctactacatttccatgaacatgaacaaagcgccctatgatgaccagaaggtaagggatgccgttaactacgccattgaccgccagctgattatcgacaccattgccagcggatccggagagccggctgacgccatcatcgcaccggctgtattcggatacttcagcccgggcgcttatgagtatgaccctgagaaggcaaaatcccttctggccgaggccggatatccaaacggattcgagaccagcatctgggtaaatgacaaccagacacgtgtagaggtatgtcaggctgtacaggccatgcttcaggatgtgggaatcacctgcaacatcgaggtaatggaattcggcagcttcatttccaggacttccgcaggcgagcatgacatggggtactttggctgggtgacctccaccacagacgcggactacacctactattcactggaacactcctcacagcagggagcagccggaaaccgcagcttcatcgcagaccctgaggtagacaagctcattgagacaggaagaaccagcgcggacgagtccgtgagactgaaggcatatgaggacctggctgtgaagttaaaagaagtaaacaacaacgcacctatttactacagcaccatcaccgcaggcgcaggcgccaaggtggaaggtttcgtgatggatccaatcggctaccacaagctggatcatgtaaaggttgcaaaataagagaagtcaaaggagagatgcatcatgagattatcaaagattacatggccaacagcggaacggtattttaaggaaaatgacatggtcattcttccaatcggcagtacggagtgccatggacgccatatgccgctgggaaccgacaccctgatacctgacaaaatcctggatctgattgaggaaaagaatgacaacatcctcatcgcgcccatgattccctacggagcatgccagtcactggctgattatccgggaaccatcgacattgattccgacatactataccagtacgtataccagattgtggacgggctgtacaagcacggcgcgcggaaaattctggtgctcaacggacacggagggaatatcaagaccatcgagcgcatcggcctggaatttgacaagaagggcgccatggtcgtgatgctgaactggtggctgatggcctgggatatgaagccagagtggaagggaggacacggcggcggcgaggagacagcgggcatcatggcagttgacccctcactggtggacatgagccagattgaccttcctctggaaatgaccaatctcacagacaatctggtggcaaccggcttccgtaccgtgcgcttcaagggtgttgagattgaaattctcaggaacacaccaaaggtaacggacaacggatggattggaccagatcatccaaacaccgctaccgtggagtggggccaggagatggtacagaccacagccaactatatcctggatttgatcgaagagcttaagaaggtttcactgtaaggcttgtgagaagtgagaactaaggtttaaggaatgaagtaagacagaataatcaaacagaatgaagtaaagcagaatcaaatgaagcagaattaagtaaagcagaattaagtaaagcagatgcagtgccgcaggcatggtatggcaggagcggtaccgtgtgatgcggcactttgtgtctcatacctggaggaaatcatggcaaacataaaagaaatcgaagcgttgaccaatgcctttggtcccagtggatttgaggacgaggtcatccgggaagtaaagaactggtgcggggggttggacgttgtaaacgatgctatgtacaatgtttacgccaccatgaagaagaaaaaggccgggcgccccgtgctcatgctggatgcccatctggatgagtgcggattcatggtacagtccatactagaaaacgggcttttaagtatcctgatgctgggaggattccatctcaccagcctgcctgcccactctgtcattgtaaggacaagggacgggaaaaagcacaggggaatcaccacatccaaaccaatgcattttctgacagcggcccagaaaaacgacaactccctggcaatcgaggatatcctggtggatgtgggagccagcagcagggaggaagtgatggaggtctatggaatccgcccgggcgaccccatcatgccggatgtaagctttgagtatcatgaggaaaatagaatcctgtacggcaaggcttttgacaaccgcctgggctgcgtgagcattatcgacaccatgcaggcacttaaggatgaggcggaccagctggaggttgaagtggtaggcgcatttgcggcccaggaggaagtgggaaccaggggagccacagtgacagcccagcaggttcggcctgatttggccattgtgtttgagggatcaccggcggatgatttctatttccgggccggtattgcccagggctgtttaaggagcggggtgcagattcgccacatggacaacagctatatttccaacgtggaattcatacgttttgcccaggagacaggagataagctgggaatcaagtaccaggatgcggtgcgccggggcggcagcacaaacgccggaaaaatcagcctcacgggaaaggcagtgccggtgctggtgttaggcattccgtccaggtatgtacacagccactataatttctgcgcagaagaagacgtggacgccactgtcaggatggccgtggaggtaatccggggactggatgaggaaaggattgcaaggattctgcggaaggatgtaatttgattaaacgatatgcggcagagtagaagatggggctgaggacgagaggggaatataaggaggaaagacgggcgggaaaggctgggatgaagggctgagatgaaaggctgggatggagggctgggacgaagggctgggacgaagggctgagatgaaaggctgggacgaaagactgagacgaaagaccggctgagtaatatgccggttaaatggatgaaagtggtttgttgggaaaatatatgcagtaaagagactgtcggtaaaaatacggagcaagagattccgaaatatagataactccgggtaactgtttaagaataaattcaactcaataaagcagaaaaatcagcacgtaaaatcagcaagtaatttgtatgaaagatgaaattcccgtttccatgtcaaattctcctgaggttgacttatcacttcagtcagtaaaaaaagttcagcaaaaaagttcagcaaaaaaaaacagtaaaaaagtcaaaaaagtcaaaaaaaatgtcgaaatagcttgatatttgtcgtcctctgctttataatgtatacatacgaaagataaaaaagagattgtactattctgtacaatctctttcaatttatagggaaataaatatttttcggttaattgggtcaaggtatataataagggcgggtttggaaatggtttgtatctggttaagccttcggcattggcagcggcggaagcaggcgggttacgcacagctttcagcagacaggctgttgcgggacgtcggatacagggaattttcaaacccgttctgggatacagttttactataattgttttggtgggaaaatccgtaaaataatggaggaacgaatctcatggacagagagatgattatcgtactggactttggcggccagtacaaccagctgattgcacgccgtgtccgcgaatgcagcgtatactgtgaagtgcatccttatgatatgagcctggagaaaattaaggaaatgaatccaaagggaatcattttcacaggcggaccggacgttgtgtttgaagacggggcacctcgctgctcaaaggagatatttgaactgggaataccagtccttggaatctgctacggcgcccagcttatgagctatctgctggacggcgttgtaaagaaggctgtggtcagcgaatacggacacacagaagtggatgtggatacttcctccaagctgtttgagggcgtttctcccaagaccgtatgctggatgagccacggtgtgtacattgcagaggttccggcgggcttccgtatcactgcgcatacagattcctgcccagtagccggcatggagtgtcaggagaagaatttttatgcggtgcagttccaccctgaggtggttcacaccaaggaaggcaccaggatgctctccaattttgtatataatgtctgcggatgctccggcgactggaagatggattcctttgtggataccaccatcaaggctttgagggagaagataggtaacggcaaggtgctgtgtgctctgtcaggcggcgtggattcctctgtggctgccgttatgctgtccaaagccattggcaaacagcttacctgcgtgttcgtggatcacggtctgctgcgcaaaaatgagggggacgaggttgaggccgtatttggaccggaaggcgcttatgacttgaattttatccgtgtcaacgctcaggaacgtttctacgccaggctgaagggcgtggaggagcctgaggcaaagcgtaagattatcggcgaggagttcatacgtgtgttcgaggaagtggcaaagaagattggcgccgtggattacctggtacagggtacaatttacccggatgtgattgagtccggcctgggcaaatctgctgtcatcaagtcccatcacaatgtgggcggactgccggagcatgtggattttaaggaactggtagagcctttaaggctgctttttaaagatgaggtgagaaaggccggactggagctggggatacctgagtatctggtattcagacagccattcccgggacctggtctgggcgtcaggatcatcggtgaggtgacggctgataaagtccgcattgtacaggacgctgacgcgatttacagggaagagattgcaaaggccggagtggataagaatctgggccagtattttgcggcgctgaccaatatgcggtctgttggatgcatgggcgatgagagaacctatgattatgccgttgccctgagggccgtgcttacatctgatttcatgaccgcggagtccgctcagattccatgggaagtgctggggaaggttaccagcaggattgtgaatgaggttaagggcgtgaatcgggtgttgtatgattgtacggggaagccgccggctacgattgagttcgagtaacgggcagaaccccggaaatgctgatagaatgggcatttccggggttgttttatgccgtttggctctactttggctctaattatttgatgaatactggatttggggcgggtatcatgatacctgccttttactatatgggcttattttctggatataccttaacagagatttccgttgttccctttttcacaactctatttgtatcaactaaatgttgcttaatctgttcgcaagtctcgttcatctgctccaactctttattaaatgcttcctcacttggaaatgcgtctttggaagcaatcaaattttcctgcaatttcttagcctttgcaaatttggcaagtcggctgtttatttccgggtgtttaaagcgaatacatatcgtgtctgggataagatttccctcactgtctttttcgccgtcgatttccatatctatctgctcgtccattttgaaaagcagagtgagaacatcagaagcggtttctatgtcaaagtccgtgaatacgttgatactcacgcccagagcattggcaatcttcaaaagttggtcgggctttggcttccggcttcctaattcatatttgcgaatggtggttccgtctatgcccgacagttcccctaatacattctgtgaaatcccccggattgttcggaatgtctttattttctctcctactgtcatgtagttactcctttagtatttgataatatgaataatagggacatttgtattctatcatatccgttgaaaataatcaaacaattcaagaataatatgttgacaagggacaaaagagcctgtataatgaaaatgcaagtaagggacaaaagtccctataaaaatataggaggacaatgaatggagaaatcaaaaaagatgtatgtaacggcagaggaagcggcagtaatgcttggcgtatcaacgggctatgcttataagattatccggggactgaatgaggaattgaaagcaaaaggctaccggacaatctgcggcaaggttccgacaaaatactttgaagaaaaattctacggtctgaccgtagctatgtgagaaaggggtgtgtactatggcggcaacaagagacggtaagatgtggcgctgtcaattctattacaaggactggcagggggttagccataagaagaataaaagagggttcaagacgaagagtgaagccgaacagtgggagcgtgattttctgcaataacagcagaaaaatttagacatcaattttgaaaactttgtccacatctattatgaggatatggaacaccgtctgcgtgagaataccatgcggacaaagaaatttattattgacttgaaaatcattccttattttaagaaaaagtgcatgaacgaaatcaaggcttctgatattcgggcatggcaaaatgcgctgataaaaaagggatattcggaaacgtatctgaaaacagtcaataatcagttgtcggcaatcttcaattatgcagttcagtattatgacttgaaagataatccttgccggaaagccgggagcattggaaagagccacgccggggaaaaggagttctggacaaagcaggaatttaaacaatttcttgtgactgtggagaacaagccggaaacaaaaatggcgtttctgcttctttattggacgggcatgaggataggagaattactcgctcttacctacaatgacattgatttagagaagcgtaccatttctgtaaacaagtcctatcagcggatagagggcagggatattattacaccacctaaaacgccaaagagcaaacgtatcataacaataccgccgtttctgacggaagaattaaaagagtacatttcacacttatatggaattatggcagacgaaagaatgttccgttttacaaagtcttatatggaacatgaaattatcagaggtatcaaggcttccggggtaaaaagaatacgcttgcacgatattcgtcattctcacgcctctctgcttgtggaaatgggatttacgccattggcgattgcggaacggttagggcatgagaaaatcgaaacgacattaaatacttactcacatctatatcccaataagcagggtgaacttgcggataaattagagattgaaaacaacagggaggaagaagaatgagcggagtacataaatacccgacaatcagctttcgcatttcccccagagagagggaagaaattgaagcaaagattttagcaagcggactttctaagaaagattattttgtccgttcctgcatttataaccgggtgtgcgtggtcggtaaaaaagaactggtttatcagttagtagaggaattaaaggtaatgcagaccaatatccgggaagtgacagagcagtttgaaaagacagaaatcgcattaacgccggaggggttggaagatatgcggaatgactgtctcgatatgctgaaagcaatcctgtgggtattagacggagcaaaatatttgttgcaggatagtgacgccggagcagaagaaagccccaacagcggcaactgttagggctgtgataactggaaaacctctgttatcagtgtttcacaatataagtatagcagaggttttttccagtgacaatgatttttcagaaatggagggcattatggaagaaacaaaaacagaattgcagatgattaaaatgtcggagatacagtcgcaggaggtatcttggctgtggtttccgtttatcccatatgggaagctgacaatcgttcagggcgatccgggtgacggaaagacaacgcttgtactcaatatagcggcgaagctgtcaaagggcgaaggcttagacagtgaaatgaagctgacggaaccgttgaatgtgatttatcagacagcggaggacgggcttgccgataccgtaaagccccgtttggaattggcaggtgcggactgtgagaatatttccgtcattgatgaaagcataaaatcactctctatgatagatgaacgattagaagaagcaattataaggacaaaggctaaaatgcttattttagacccgatacaagcctatttaggcggtggtatggatatgaaccgggcaaatgaagcaagggatatgacaaagaagctggcggctctggcagaaaaatatcaatgcgccatagtgcttgtcggtcatatgaacaaagcggcaggaaataaggcggcgtatcgcggtatgggttccattgatttctttgcagtcgcaaggagcgtcctccttgttggcagagtggagggcgaaactaatataagggcggttgtccagataaaaaataatctggcggcgttcggacacccaaaagcctttgaactttcagagaacggttttcagtggcttggagattatgaaattacggctgatgaagtcttgggcggtatcgctccgaaagcaaataagatggagcaggcgaaacgcttactccgggaactggcggaaacgaataacgccatgcaaagcaacgaaattgttaatctggcggacgaacagggtatatcgaaacggacattggaaaatgcaaagaaagagttaggtgtccgggcgaagcggataaataattcatggtattgggaactggataaaatcagatcggagtagggaacagcgcaacaatgcagagtatatgaaatttgcggactttagacttgtaaggttgcaaagaatatagattttgtattgttgcggagttgaatgaagccggataaatggcggaagcaaagcggcggaaacagccgcttccgtccgcaggacgataagctgtcctgtggacagctcgcccccggcagggcgcaaaacctgcttgcaggtctgcatttttgatagggaacctgtcaaaagtgcttttgcgttactttcgacgaaagtaacaaagctatggcggcttaaacgccgcccctgatttgctgaaaggaggataaggctatcgagaggacaatcagcggtatggtgggaaaaggttccctcactcacaatagcagagcgttcaaggcaaagaatgtaaaggaagattatactcaatacaatatagaatattgtaacgaaaatatcaagtctgtttatcacgaattatttgataaagccttagaacgctacaatgaaaagcagacacgaaatgataggaagataaattattactatgaaaagatacggacatcgaaacaggagaaattatttcatgaagtcatttttcagataggcaacaaagacgatatgaacgcccaaagcgtaaacggcgaattgtcaaagaaaattctggacgaatttatgaaaaattttcagcaaagaaatcccaatcttaaagtattctccgctcatctccatatggacgaagaaacgccccacttacatatagattttgtcccgtttgtatctggaagtaagaggggactggacacaagagtttccatgaaacaggcgcttgcttctatgggctttaagggcggaacaaagcaggaaacagaatggagccagtggatagcttcggaaaaacaggaattggcaaaagctatggagcgtcacggcgttatctggaagcaaaagggaacccatagaaaacatttgagcgtattggactttgaaaagcaggaacgggaaaaggaggtgcagatacttacctcccaaaaggaagaaatcaaccggaatattcaagaaatacagaaaactgtttccagtgaaacaaaagatctgaaacggttacaagggaagaaacaggagatacagcaggaaattataaagctgtcatctgataaaaaaacaacagagaagaatattcacgtcattcgtgaaaatccggcgtggcagttaccggaaccggcggcactgacaacagcaaaaacttatcgggataagaaagcaatgcccttgttagagaaagtcaaggaagcactggtggcggcacttgttcggaatgtccagttgatagaagcggctgataaattaaaacagcaggtggagcggcttcaaagaaatatcaattatttggagggacgggtaaagcaggcagaagaaaaaaatctttcgctctcaactgatttaaaagattttgagtgtctgaaagccgggcttggagaacaagaggtaaaagctatcattgaaggtcaaaaagcggcggaaaggtgcttgacggttcctaaacaatacaaaaaaacggaggtatcgctatgacagacatggagaaaaaagtcatgctccggctgtgtgcaaaggttatacaatatgcagattttgagacagaccgggaagcggagcggttggtaaattgggttatactggacaatcagcggaagcagaacaacaatgaaatccgttctctgatggcggaatataaaaagggggagccggagcggagggaaagtattagagaagccttagagcgagggaaagaaatttgtggcaggagggacgagttgtatgaaagccaacaggaagtgaagcataagctgtggaagttggagcgtgagatttgatttttccttgattacatatagaaacatggcgctagcgccatgatagagagggcggacaacgaaatattggttgtttcgccctctatgtattggctgtcaaatgtaggatttacggacaagaaaattattcttcatggtctgtgtaattaccttgataaacttcaatcattatccgtgcgcccagacggaagccttcaaggaatgtcccggaaagttcaagaggaacttcgtcaagctgctcgtccatgatatgaataaattttttgtgtagcggtgggtcaagagattttaactgttcaataaaatcttcatagtgttggtagtgtgcttgacgcatggaacgatattcctctgttttgagattgaattgctcggcaggacaaatctcgccgtcatacaatcttagtaatatgcttttcataaatagcgtctcctttgctaaaagtatttgagtgacatctactaaatgtcaacttatttcatagtttagcatataatgaaagaaatgacaattagtaaatgtcaaaaatgggagagaactttatgtataaaaataaagcaggggacggcggcaacaatatctgtggacagaggataaaagaaatcagagagaagctaccagaaaaaacgtcacaaagaaagttagcggatatgcttcaaagaacaggactggacattgataaaaatgctgtgcagaggatagagagcgggaaacggtttgtgacggatattgagttgaaggttattgcggaagttctgggagtgagctatcaggaattgctagatgattagaggggattgtggtatgtttgtggaagtatggaatatgaggactatattatgcaaggtttgaatggagaagcaccattaaaacgaaatatacaaattgccgagagtgaaaaagtaggtggtgtatcagttgtatatgcaacaaatgataaagacttagcagaacaatgttacgtttggggcggagccgaatgattatgagatatacgattttattctgaaaaattactatcggctgtggttgtagaaactgttatagaggaagctgttaccgtttatagataacagcagtataaacaagaggtggcaaatgaaaccagagataaaaaatgtaaatagtaatcttatgttggaagaactgcaagaaacaataattgctatagaatctcttgaagaatactatttaaattcaattagaaacgtacaagagatgaaaattaatactgaaaagaaatacgaaataggacttttgatagatgataaattgggagaagctattgcattaaaagactttgatgcgattgaaaaagcagttaaagaattgacggaaatgaaattgtcagatggaattcaagtctcagaatatattactataaactgtgagaaagaaaatgaagctgaaattcctagtatttcatattccataaaacaggaaatgggagttaatcctcaatatgtagatcctaaaattgcaagaagagagtataacaaaatagaacagtacgaaaatatacttgttagttcaacattgtctaatgtgattataatatttgaaaggtatttggcgagtgtttatgaggcattaatattagttaatcccaaaaagtattttgaaaatcaaaaaatagaaatagcaagtatttttaataaaaatgttagggacattgttgctgaatgtgtgaagaaagaagtagaatctaatatgtttgaatcgctaaaaacattagatttaatttcacaaaaagaaagtataaatattaatcggtatagaaatattttagatgaatttgaagaaatctattatcgcagaaacttatatattcataacaatggtatagtaaacaatatctatttatcaaatataaaagacaaatttaaaaagaatattaaaccatatcagaaattgattacagatgaaatatatttgcgtaatgccattaatatgttgtataaggttgcttgtactttgttttatgaagttcaaatagcatataatcctaaatatgaaaaatggcatatcagtttgggaaatataggatttgatttactgcaaaataaaaattatgatgtcgcagagcaactttattttattcttagtagttgtaaacaaatttgttttagagataaagcaatgtatcgcattaattatataaatgcacttaaacaacagggaaaaacagaggctgtaaaaaaagaactgaacgatttagatgtctctattgctactgatgattataaaatagcgaagctctgtttggaggataaaaatgaggaagtctatgaagaaattggtaagaactatccagagccgtttaccgcagatttaataagagattggcctatatttattaattttagagaatctgaatattatacattatttgtaaaagaacatcaggaagatttcggctcctttgtatttgagtttgaagaattaccaatggatgaggagcatgagagttagatggcttggctctattttggctctaaaaatttcgacaggcacaaatatgagagcgaattttgaagaatatgaacaataaacttaataaaaataggcgaaaacagccagtacaacctatccgccgaggagttcgaataacttgaaaggtcaaagaaatccagtatttatgcgggtttgcggtacttcaagaggtcttttgataacaaattgataacagtcatagcaggtgcaattattcttgttgtccagtggtttacgggtaacagaatgattgagaagtggctttgtgactggaataaatccatattataacgcccttagctgtgggtaggaactcatggctaagggcgttttttgtcgttatctttttttgtcagattggagatggtctttgaaagcgtcaaccattgcgtcgcttaattcctgcgaaggaactttcgcccagatttgcgtggtatcgaactttggatagtaataacgccaacggtcatattcttccctgctgatttcatcggcagagagtttgtccgcctgttctttccatgcagagagcattttcagcagctcgtaggcttctttgcctttatccttgttgacttttaggcagacttctccgtctgcttcgctgacggtcagaccgtaaatatcttcaagggtaaataaggtgtgcataagtccgatatagctgtcaatgtcaggaacatcgagagcctgcggagaaacatcgagtacctgcgctaatgcggcggttaagtctgctttcggcttgcgtgagcctgtttcgtactgtgccagacgcacatccgcactcttgtcgggaaatcccacaagcgtaccgagatatttctgcgtcataccccgcataatgcggaaaaagtgtattctttcgccaatcgccatagtgtttcactccttgcgtatgtagtgtaatcagtatagcagatatgtttaagagatgtcaagagaaaacgaaacaaaaaagtttaatattttcttgaaaaccacttgacaatagcaaatatgcttagtataataaaaaagcaactaagctgatatgcttaattaaaattaaatgaccgtccgaaaagtataaaccgcaatgaccttgcctgaccgcaagcgagcgcctgatgtactgcggtgtgtcaggacagtacagcgccgaaaagggaatgcctgctggaaatttaactcggatagaacggcagcaaacaaattttaaaagaaaggattggtgctatggaaaatagatttatccgtgctgatgatgtggcacgggaattaagcgtatcaaaaccttatgcctataagctcatccgacagttaaatgaggaattaaaagcgcaggggtttattacgattgcagggcgtgtcaaccgccagtatttttatgaaaggctctatggagcagggcaggaacagggaaaggagatggagtaaatgccggtatttaagaacgaagataacggcacttggtatgtgatggctcggtatgtgaactggaaaggcgagcggaaacagaagtgcaagcgtgggtttgccacaaagaaagaagcgcaggaatgggagcggatgttcctgttgcagacttcttcagacctcgatatgagctttgaagcctttacggagcgatatgtgaacgatattaaaaaccgcctgaaagagaacacatggctgacaaaagagcatatcatccgcacaaaaattttgccttatttcggcaagctgaaaatcagcgagattaccacaaaagaagttatcacatggcagaatgaaatgcttgcctaccgtgacgagaagaaaaagccgtattcgcagacctacctcaaaacgctgcacaatcagttatcggcaatctttaaccacgctgtccgttattatgatttgcgctccaatcctgcggcaaaggtgggaaatatggggagtgaggaacacaaggaaatgctgttttggacgagagaggaatataagaaatttgccgatgaaatgatggataagcctgtttccttttatgcgtttgaaatgctttactggtgcggtatccgagagggcgagctgcttgccctgaccgctgccgatttcgattttgaaaaggaaacggtaaaaatcagtaaatcctatcaacggttgcatggcgaagatgtgattaccacgccgaaaacaaagaaaagcaaccgcacaattaaaatgccgcattttctctgtgaggaaatgcaggagtatatcgggatgctctacggtctgaaaaagaaagaccgtattttcacggtaacgaaaagctatcttcatcacgagatggacagaggggcgaaagccgcaggagtgaaacgcatacggattcacgatttaaggcatagccatatcagtttgctgattgatatgggattttcggcggtggcgattgctgaccgtgtggggcatgaaagcattgacatcacttatcagtacgcacacctgtttccgtcaaagcagacggaaatggcgaacagactggatgatttggggaaaggagattttgaaaatgtcggctaagaacagggataacaaaaaccgttggagaaatgtcacggtagggtttcgggtgtctcccgaagaaagcgaacagattaacaaagcggtgcgcctgtcagggcttagcaagcaggattatattacaaggcggctcttgtgtcaggatgttgtggtacagggtaatccgagggtatataaggctctccgcaatgagcttgccgccgtccttgcagaattgcagaggattgaagcgggcggcggtgtgagtgacgaactgcttgacacaatcgaactgattgcgattatcctcggcggtctgaaaggagaggatgggaatggaaaataaaaaagaaatgcctgcctttggctcatctgttggcgcagatgaaaggcagacaatccctaaatgtactgaccatagtatatccgactctgacgaaaatatcaagagttttgaggaaatgcagagggaactgctgcggcaattagacccatcctatctgaaaacggtatctatgacaactctgtatgatacggtattcgaggtacagccgccgctgatagacggtctgctccagaggggaacctacctttttgtaggctctcccaaagtgggaaagagttttatgatggcgcagattgcctaccatatcagcacgggaacttcgctttgggaatataaagtgcgtaaagcaacggtgctttatttcgctcttgaagatgattacccacgcttgcagaaacggttgtttcagatgtttggtgcggaagaaacgggcgatctccattttgctacggagtgtaagacggttggcggcggtctggaagaacaaatcagaggttttatgggggaacatcccgatacaggcttgattatcatagatactttaaagcgtgtgcgtgaagcaggtggcgcagattacagttacgcaagtgattatgacattgtggcaaggctgaaagcgttggcggacagctataaggttacaatgcttattgtccaccatacacggaaacagaaagcagaggatatattcgatatgatttcaggcacaaatggattgatgggtgcggcagacggggcatttgttttgagtaaggaaaaacgcacttccaataatgccacgcttgatgtggcaggcagagaccagcaggatatgaaaatccatcttgtgagagatgcggaacggttagtgtggaactttgaaaaatcggaaacggagctttggaaagaactgcccgaacctctgcttgaaaaaatttcggatactcttttttcggatagcaacagatgggagggtactgcttcggagttttgtgaattgcttgcggtggatataaagccgaatgtgctttcacttaggcttagtatcaacgcaagcaggctgtttcgggattacggtatccgctatcagaacagcaggacgcacaatggcaggaaggttctcctttggaaagaaatcgatggggcggcgtgacaaacggtgtcaaaggtgtcaatgttttgagcgcggaggcggtatctcaaacattgtcatcatcgtcacacattgacaccgattaaagtttagacggggttgtaagggtgtccttttcaaaggacagcccttacccctcggagagcgcaaaacctgcttgcaggttgcatttttgttggcgtagctgacaaaagtgcttttgcgttacttttactttcgcagaaagtaacaaaggctcgccgcaagcggcgaaaggaaagaaagtgattttatacagagaacgattagcgcaatggtggggaaaggctcggtcaaccataacagccgcaaattcaaagcagagaatgtggacgctgaacgctcccacctcaatgtagactactgtaacgagaatgttaggaaagtgtatcataagctctttgatgaagcgttacagagatataacgaaaagcaaacgagggcagaccgccgcattgatgattattacgagaagatacggaactcaaagcaggaaaaaccgttccatgaattgattttacagattggcgataagggaaatatgaacgctgagagcgaaaacggacaactcgcaaagcggattttagacgaatattatcgggagtttcaagcaagaaatccgaacctatatgtgttctcggcacatctgcatatggacgaggcaacgccgcatctgcatattgattttgttccgttcactactggcagcaagcgtgggttagatacgagggtatctctgaaacaggcgttagcagcgcaaggatttcagggtggttctcgcagcgaaacggaatggaatcagtgggtaaagtccgagaaagagcagcttgccgccgtaatggggcggtacgatatagaatgggagcataaaggcacacacgaaaaacatttgtctgtcctcgattacaagaagcaggaacggagcaaggaggttgaaaaactggatgccgccatagagaaaaagcagacggaatatcaggtgctttccaacaggataggcagctttgataagggtatcagagacttgcagcggttggaaaccatgcttgatactgcggaagaatatcagcttgcagagccgcaggggttaatgtcggcacggtcatataaaacaaaagtggcagagccattggtaaaaaagctgaagtctctcgttaaatcggctctggcaaggtgctttgacgctatggacaattattacagactgaatatcacgaatggcaatctccatcgcaccaacgagcgattgacaagagcaaatgagaaactgaaagatgaaaacgaaacgctccgtgcagaaaataaggattataagctgctccgcaaagtatttggcaggaagcagatagacaatctcttagagcaggcacgggaaacagaacagtccaaaaagcgggaacgctttcggaaaaatcaatatgaaaggtaaggtgcaaatttatgaaaaagcacatcacgggcgaaaaaacaggtatcagttatacactccacggcgattattacttgcctgacctcacattacccgccgaaaaagaaaagccgattggcatttgggggcagaggcatttgcagtatctcaaagagcataagcggattgtttatctcaatctgctgacaagcggcaggctgaacgaataccttgcgagcgtagataaacaggcagaggatatgttttctcggctggtaaaggaatatgccgacagacagggagtgacagagcggttaaaggcgaaaaatcagcttgaatgggttggaaaaatgaataatattcgggcgtgcgtaagggaagttgtagagcgtgagataatctattcataagtggtgggcggcacttctgcgttgtgtgggagtgccgcataagcctaaataaaagcagttaggggaattgaaaaagcctatgctttcgtgtataattgagaaaaatcaaagtgaaaaatgatttatcggaggaacgatatgaaatatataagggcaacttctgatatggcgaatgatgttcaaaatgttttacatatggctattaaaaccatatatccgaaatattatccaaaggaagtagaggatttcttttgcagacatcataataaagaacatattctaaacggaatagcatcgggaaatatgggagtgttggtggacaatgatgtgattgtcggaacaggttgttttgacggcaatcatattacaggagtatatgtgctgcccgcttatcaaaaccaaggctgaggctcgtatattatgaattgtttggaaaaggaaattttcaaaacatatgatacggttattttggatgcttcgctttcggcagcgtgtttatatgagcatagaggctataaaacggtggggcatgggagatacgaattggaaaatgacgtaaagctggtttatgaaatcatggagaaaaagctaaaagaaaattgaaaatgtggattgagaggaattgaaaaatgaaatgcagaataagaaaatgggagctatcagacgcaaaagatttggcgactgcactttcaaataaacaagtacaagataatcttcgtgatggtttgccctacccttacaccgaacaggatggaaaagattttatttctgctatgctttccgcagatgaaaacgaaacctttgcttttgctattaccgtagataatacagtgattggcagtatcggcatttttcggcaagaaaatattcatagacaaaccgccgagttaggatattatattgctgaggaatattggggcaacggcattatgaccgaagctgccaggcaaatatgtgagtatgtttttagtgaaagtgacattatccgtatctacgcagagccgtttgcttataatatagcgtcttgcagggtgcttgaaaaagcaggatttcaatatgagggtacattgagaagcaatgctgtgaagaatggtaaggtgcttgatatgaaaatgtactctttgctaaaagaggaatgaaatgataactaaattaaagtatggaaacacaagtacttatttcgtgcatggcgtaaatggtggcttgctgattgatacagattatgccggaactatgcagtttttttataaagccttaaagaaaaacggcttatcaataaccgatattacttatattttggcgacacactatcatccagaccatatcggacttgttagtgaactgcaaaaaatgggaataaaattgttgctcatagatactcaatgcggctatgtgcattttgctgatgctatatttaagagggaaaaactcttgcgatatgaacctattgacgaaaaaaatgctacgataattggttgtgatgaaagcagagagtttcttgctgatttagggattgcaggagaaatcattcaaaccgcaagccatagtgaggacagtatatccgttattctggatagtggggaatgtgtagtgggcgatttagagccaatggaatatcttgacgtttatggggaaaatatcgttttgcaaaatgattggaaacttataacgagttaccatccgaaagtcatatattacgcccatgcaaatgaaaaacattttgcgtgatagtgattgagtggagaataattatggactataaaatacgagaaatcaaagagagtgaatatccagtattgtctgactttttgtatgaagcggtttttattccagagcaaatggaaaagccgccaaaatctattattgaacagccagagcttcaagtgtatattgctgattttggaaaagcggatgattggtgcttggttgcggaagtgaaagaaacgattgttggtgcagtatgggtgcgtattatgaatgattacggacatattgatggtgaaacgccctcgcttgccatatcgctgtatgaggaatacaggcatttggggttaggtacagcacttatgaaagaaatgctacaatttctgaaaaacaagggatataagcagacatctttatccgtacagaaagcgaattatgcagttaatatatatcggaaagtaggctttgaggtagtaaaagaaaatgaagaagaatacataatggtttgtcgattgtaaatagaaagtatagaagtttaatagtgcaagatgaaattctgagatatagggaaaaatgaaatatgagaaataataaatattttttaataagtttttgcgctatttgcggagcaatagcgatagcatttatagttaatgtgttgtttaagataaagacagcgggaatttttagcgcagagtggtcggctggagatgcgctaagttatgtcggtgcaatggcagggtcaataagtacttttgtattaagtttagtagcatattggcagaatgaaaaattaaaagaaatggagaataacaattatattgccacaaatagctgtatggttctgattgatgaagtacaaattaaaccaaaggcttctatcccagtaaattatgagttgcatacagaacaaattttgcaagaaattgacaataatgatgtgtatccgtcaggatatggtgtagaaataaaccttaagaaaatatcagaatcaatacaggcaacgccttcgttgatttatgtatcggattgtacactttttgttggcaataatcaaaaaaacacattagaaagtgcattgtggttaaaaaatgttcgagaaggttatacaagagcagcaatactagagtcaggcattgcatttaattgtaacttgcttgtttcaaaaagaaatcaagagaagtttgaaaatgatataaaggctgaaaataatagactaactatagaaatccaatttgagattattacagataaaaatgtgatgacaaaatgcaaatgccgagcttattgtaattataaaaataataatggagttattacatggaaaagtgataaacctatggtgttcttttatgggcatgagttaaaaaagaatgacgaaatatcggtactttagaagaatgggttataaaaggagacaagtaaaaatatgaagaatatgaaaatagatgccaacggaacagaaatcagagtaatgggcgatgttgttaatgaggacgcttatatttcgctgactgatattgccaaatataaaaatcctgacaatgcttttatcgtggtggcaaattggatgcgtaaccattccacgatttcatttttgggcttgtgggaacaaatccataatcccaattttaaacctatcgaattcgataggtttaaagcagagtcgggggataatgcgtttacgctgacgccccagcaatggataaaagcgacggacgcaatcggtatcgtatcaaaatcaggacggtatggtggcacttatgctcatacagatattgcctttgagtttgcttcgtggatttcgccagaatttaaactttatattatcaaagactatcagcgattaaagaaagatgaagcaaatcgattagcgattggatgggatgcaaaaagggaactttcaaaaataaattatcgtatccatacagacgcagtaaaggaatttctgataacacctacattatccccgcaggagatggcatatacatatgcttcagaagcggatattttgaatatggctttgtttggaaaaacagcggcgcaatggagaagtgaaaaaggaataagcggaaaaacgccaaatatcagagattttgcttcagcggaagaattggtggtacttatcaatctggaagatacgaatgctgacttgataagacaggaagtgcctaaaatcgaaaggctaaaaatattaagggaaaaagcctacaggcagttagagcttttgaaaaagaaccaagatacgattgaagcactaaagaaaaatcttattgaagatacgggaacaaacaattgattttctaagcaaaatcgcttataatctaacacgaaacatatagctattatccgcagttgccgagcaggtgttatcaatgccgataacaaaatgataacattagcccgtataggcaggataatatggatatatcaaataatcaaaagatttacatactcgacagagaataattcttaaacaaaattgattagtacttgtcgggttcgagtaacgctctaaagtccggaaagccagtgtttatgcgggtttccgggctttttctttgcgccgtgacagtaagtaggtaataatcagtatctgcaaatttccatccacatttgataagataagttcaaatgatggaggtgataccaataaatacgaatgacaatgtaacctcaaaggctgacctttgggcagaccggttccatgcttttcaggaaagcggtttatcccgcaaagaatggtgtcagcagaatggaatcccacagtctacactgggttactggatccgaaagctccagtcagaagcagctgagacagaaagtgcttctgatccggtgtttgcaaagctcccttcggaacatgaactccatttcagtacagcagatacaggaaaacctcctgtgatgctctgtctcccggaaaatatccggattgaagttgctgcggactgtccagccagactgttgactgccctgcttcaggccttaaagaactatgcttgatttttacggaagtactacagtctatctggcatgtggctgcacggacctccggaagagctacactggtttagcggccatcatcaaactgaaattccatctcgatccgtactcccgctgtatgttcgcgttctgcaatcgcaggcgcacattgctcaagatccttcagtgggacgggtcagggttttggatcctgatgaaacggctggaccgcgattccttccattggcctgacacaccggatgaactgcagaaagttacgctgaaagagatccattggctgtgcgatggtttatccctgaaccccagcggcgcatttgaagaacgtcacccgaagatcgtcatatgagcccggatcctgtcaattcgcaaaaagccgaaaatcactttgttttgggcggattttcctccgtcccggaatgcagtttcctataggaacggaatgctttttctggtatactttctggtagagatttcagaaagttgaggctgtgttatggatccgctttttacagaggaacaactgaacaagatgagcagggaggatatcatctccctgatgaaaaccatgcgggagcattatcagaaacaggaaacaaagatccagatcctcgaagaaaaaacaaaggaactggaattcctgaacgcgatgctttctgaccgtctgactcttgcgcagcggaaacagtttggcccatccagcgaaaaatatgcggatggctatacgcagctgaacctttttaacgaggcagagcaggaagcagagcctgatgcgccggagccggaaatggaggagatccatccgtcttcctataaaagaaagaaacgttccggcaaaaaggaggaagatctttccgcctttgagacaacggaagtaattgagtataagctgaccggcgcggaccgaaactgtccggactgcaataccaaatataaagtcgtgacaaaagagacggtgaagcgcctgaagtttgtgcctgcacggtttgaagtggtggaggaggtcacctatgtttacagctgcccgaaatgcggggcgatgaaacgtccggaaaaggcgccttcccttctcaaaggcagtgtggcaacaccatccctggtggcaggcatcatgaacgcaaagtatgtgggcggcatgccccttgcgcgtcaggaacgggaattcgcccgttacgacctgaacctttccacaaagaccatggcgaattggatcatccagtgtgcggaccggtatctgcagccgctttatgaactgatgaaggaagaattcctccggagccggtacgctcatggggatgaaacccgtgttcaggtaatcgatgagccggaacagaaaggttccacccagaactggatgtgggtctatctcactgatgaatacagcggcgcaccccggatggtcctcttccaatacgaaagaacccgggcgggatatcatccggtggaattccttggggatcagtaccagggatatttcacctgcgatggataccaggcataccacagccttccggaaaggatcaccgtgacaggatgcatggcccatgcgaggcgcagatttgatgaatccctgaccgttttgaaaaaggactttaccaaagagcagctgaaggaaacaaccgcatatcaggcaatggcacggatcgggatgttctataagatcgaagagatgatccgtgacaagtcaccggaagaaaggtatgaagagcgtcaaaagcaggcaaagccgcttttagaggcttttttcgagtggcttcataccctggaggatgctgtggacagatcttctaagatcggagaggcggtcctgtatacgctgaaccaggaaacctatctgaaaaggtatctggaagatggccatctgagtattgacaatctagctgcagagcgggcactgaaaaattttgccatagggagacgcaactggctgtttgccaaaagcatccgcggggcacaggccagtgcgactgtgtacagcatcacagaaactgcgcttctgaatggactgaagccatacaactatctcacatatgtgatggaaaagatgaaagaactcggtgcgtttccggcaaaggaagaaatgctggagcttctcccatggtcctccaatctgcctgatgattgccgcagcaaacttaaaaagtaaaagacagatcttcccccggtaagtgctgggggatttcttattttgtcaagatacggattattacttacttacccgtgacattattatgacattatttttcagagccagtatagagccagggggcttgatagcctggttgccaattctgcaaaactctgttataatgccgtaagtaggtaataatcagtatctgcaaatttccatccacatttgataagataagttcaaatgatggaggtgataccaataaatacgaatgacaatgcagcctcaaaggctgacctttgggcagaccggttccatgcttttcaggaaagcggtttatcccgcaaagaatggtgtcagcagaatggaatcccacagtctacactgggttactggatccgaaagctccagtcagaagcagctgagacagaaagtgcttctgatccggtgtttgcaaagctcccttcggaacatgaactccatttcagtacagcagatacaggaaaacctcctgtgatgctctgtctcccggaaaatatccggattgaagttgctgcggactgtccagccagactgttgactgccctgcttcaggccttaaagaactatgcttgatttttacggaagtactacagtctatctggcatgtggctgcacggacctccggaagagctacactggtttagcggccatcatcaaactgaaattccatctcgatccgtactcccgctgtatgttcgcgttctgcaatcgcaggcgcacattgctcaagatccttcagtgggacgggtcagggttttggatcctgatgaaacggctggaccgcgattccttccattggcctgacacaccggatgaactgcagaaagttacgctgaaagagatccattggctgtgcgatggtttatccctgaaccccagcggcgcatttgaagaacgtcacccgaagatcgtcatatgagcccggatcctgtcaattcgcaaaaagccgaaaatcactttgttttgggcggattttcctccgtcccggaatgcagtttcctataggaacggaatgctttttctggtatactttctggtagagatttcagaaagttgaggctgtgttatggatccgctttttacagaggaacaactgaacaagatgagcagggaggatatcatctccctgatgaaaaccatgcgggagcattatcagaaacaggaaacaaagatccagatcctcgaagaaaaaacaaaggaactggaattcctgaacgcgatgctttctgaccgtctgactcttgcgcagcggaaacagtttggcccatccagcgaaaaatatgcggatggctatacgcagctgaacctttttaacgaggcagagcaggaagcagagcctgatgcgccggagccggaaatggaggagatccatccgtcttcctataaaagaaagaaacgttccggcaaaaaggaggaagatctttccgcctttgagacaacggaagtaattgagtataagctgaccggcgcggaccgaaactgtccggactgcaataccaaatataaagtcgtgacaaaagagacggtgaagcgcctgaagtttgtgcctgcacggtttgaagtggtggaggaggtcacctatgtttacagctgcccgaaatgcggggcgatgaaacgtccggaaaaggcgccttcccttctcaaaggcagtgtggcaacaccatccctggcggcaggcatcatgaacgcaaagtatgtgggcggcatgccccttgcgcgtcaggaacgggaattcgcccgttacgacctgaacctttccacaaagaccatggcgaattggatcatccagtgtgcggaccggtatctgcagccgctttatgaactgatgaaggaagaattcctccggagccggtacgctcatggggatgaaacccgtgttcaggtaatcgatgagccggaacagaaaggttccacccagaactggatgtgggtctatctcactgatgaatacagcggcgcaccccggatggtcctcttccaatacgaaagaacccgggcgggatatcatccggtggaattccttggggatcagtaccagggatatttcacctgcgatggataccaggcataccacagccttccggaaaggatcaccgtgacaggatgcatggcccatgcgaggcgcagatttgatgaatccctgaccgttttgaaaaaggactttaccaaagagcagctgaaggaaacaaccgcatatcaggcaatggcacggatcgggatgttctataagatcgaagagatgatccgtgacaagtcaccggaagaaaggtatgaagagcgtcaaaagcaggcaaagccgcttttagaggctttctttgagtggcttcataccctggaggatgctgtggacagatcttctaagatcggagaggcggtcctgtatacgctgaaccaggaaacctatctgaaaaggtatctggaagatggccatctgagtattgacaatctagctgcagagcgggcactgaaaaattttgccatagggagacgcaactggctgtttgccaaaagcatccgcggggcacaggccagtgcgactgtgtacagcatcacagaaactgcgcttctgaatggactgaagccatacaactatctcacatatgtgatggaaaagatgaaagaactcggtgcgtttccggcaaaggaagaaatgctggagcttctcccatggtcctccaatctgcctgatgattgccgcagcaaacttaaaaagtaaaagacagatcttcccccggtaagtgctgggggatttcttattttgtcaagatacggattattacttacttacataatgccttcatggaagagtacccatgacagggtggtagcctcccgagccaatgaaaccggcttgccggaatacataggaagggaggtggcgctcatgacggcttatgagatcgtttcgattttcattgggatattagctttgctgatgtctttcggcagcttgattgttgcgttgcttgcctttctcgacagagataggaataacaagcgaaaaaaataatgcccctcctgtctgatccacaggagaggcgcctctcacagagaggtaaatagcctattcgggagcatccgcttttggagtgggtgctctttctatgttcattatatactatgcccctggattttgcaagtattaaagaaatttcgggcagcgtcaatttactttcggaaacgaaaggtcagaaatcacccttgtgattggtttcgatttgcttcccctattttaccaggttccctacctttattctactggtttttttatccatccattgcttctgtattttacggatgggaaagaaagaactcaagggttcatgaactgctgcgcagcccttgacttctttctttgtaagtaggtaataatcagtatctgcaaatttccatccacatttgataagataagttcaaatgatggaggtgataccaataaatacgaatgacaatgcagcctcaaaggctgacctttgggcagaccggttccatgctttccaggaaagcggtttatcccgcaaagaatggtgtcagcagaatggaatcccacagtctacactgggttactggatccgaaagctccagtcagaagcagctgagacagaaagtgcttctgatccggtgtttgcaaagctcccttcggaacatgaactccatttcagtacagcaggtacaggaaaacctcctgtgatgctctgtctcccggaaaatatccggattgaagttgctgcggactgtccagccagactgttgactgccctgcttcaggccttaaagaactatgcttgatttttacggaagtactacagtctatctggcatgtggctgcacggacctccggaagagctacactggtttagcggccatcatcaaactgaaattccatctcgatccgtactcccgctgtatgttcgcgttctgcaatcgcaggcgcacattgctcaagatccttcagtgggacgggtcagggttttggatcctgatgaaacggctggaccgcgattccttccattggcctgacacaccggatgaactgcagaaagttacgctgaaagagatccattggctgtgcgatggtttatccctgaaccccagcggcgcatttgaagaacgtcacccgaagatcgtcatatgagcccggatcctgtcaattcgcaaaaagccgaaaatcactttgttttgggcggattttcctccgtcccggaatgcagtttcctataggaacggaatgctttttctggtatactttctggtagagatttcagaaagttgaggctgtgttatggatccgctttttacagaggaacaactgaacaagatgagcagggaggatatcatctccctgatgaaaaccatgcgggagcattatcagaaacaggaaacaaagatccagatcctcgaagaaaaaacaaaggaactggaattcctgaacgcgatgctttctgaccgtctgactcttgcgcagcggaaacagtttggcccatccagcgaaaaatatgcggatggctatacgcagctgaacctttttaacgaggcagagcaggaagcagagcctgatgcgccggagccggaaatggaggagatccatccgtcttcctataaaagaaagaaacgttccggcaaaaaggaggaagatctttccgcctttgagacaacggaagtaattgagtataagctgaccggcgcggaccgaaactgtccggactgcaataccaaatataaagtcgtgacaaaagagacggtgaagcgcctgaagtttgtgcctgcacggtttgaagtggcggaggaggtcacctatgtttacagctgcccgaaatgcggggcgatgaaacgtccggaaaaggcgccttcccttctcaaaggcagtgtggcaacaccatccctggcggcaggcatcatgaacgcaaagtatgtgggcggcatgccccttgcgcgtcaggaacgggaattcgcccgttacgacctgaacctttccacaaagaccatggcgaattggatcatccagtgtgcggaccggtatctgcagccgctttatgaactgatgaaggaagaattcctccggagccggtacgctcatggggatgaaacccgtgtacaggtaatcgatgagccggaacagaaaggttccacccagaactggatgtgggtctatctcactgatgaatacagcggctcaccccggatggtcctcttccaatacgaaagaacccgggcgggatatcatccggtggaattccttggggatcagtaccagggatatttcacctgcgatggataccaggcataccacagccttccggaaaggatcaccgtgacaggatgcatggcccatgcgaggcgcagatttgatgaatccctgaccgttttgaaaaaggactttaccaaagagcagctgaaggaaacaaccgcatatcaggcaatggaacggatcgggatgttctataagatcgaggagatgatccgtgacaagtcaccggaagaaaggtatgaagagcgtcaaaagcaggcaaagccgcttttagaggctttcttcgagtggcttcataccctggaggatgctgtggacagatcttctaagatcggagaggcggtcctgtatacgctgaaccaggaaacctatctgaaaaggtatctggaagatggccatctgagtattgacaatctagctgcagagcgggcactgaaaaattttgccatagggagacgcaactggctgtttgccaaaagcatccgcggggcacaggccagtgcgactgtgtacagcatcacagaaactgcgcttctgaatggactgaagccatacaactatctcacatatgtgatggaaaagatgaaagaactcggtgcgtttccggcaaaggaagaaatgctggagcttctcccatggtcctccaatctgcctgatgattgccgcagcaaacttaaaaagtaaaaaacagatcctcccccggtaagtgctgggggatttcttattttgtcaagatacggattattacttacttacggccttttgacgtcttagctgttccgtgttacaatgacataaaaaagcatgggagataccatatgaaataccattggagcgaacacaggaagggggatggggatgccggggcaggggccggacagtcccattcggttgaaatcctttccatggaagaattccggaagtcctggccggatatttacaggagaacattttccggcagcggtccggaccatatccggttctgcaaggcggatgtgctgcggggaacagtggcaggcacctttgccattccatccaaggaggacccctccggggataagcaggtttttggctactgccttaccagggaacagctgatttttatggatgacagcggctatgtaagaaggcttctggacgaaatgcaggattaccagatgacggatgtatcatccccttccctgcagctctttgatgtgatggaatatctgctgaaggaggatgtgatttttctccagcagtatgacgacagcctgacccgtctggaggaagggctgcttaagagggagacagaagaatttgacgtgagaatcctggcagccagaaaggatttgtccgcattgagtgcttattacgaacagctctccgacatgggggagacactccagcaggatgcggcagagagggggaatgagagggacagcctgcttttcggcctgttttccgacaaggcgggacgcctctattctacggtgcagatgatgaaggagtattccatgcagttgcgggaaatgcaccagacccaggtggacatacgccagaatgaaatcatgaagttcctgactatcgtgacaacggtattcatgcctctttccctgattgcgggctggtacggcatgaattttgtcagcatgccggagcttaaattcccctatggctacgcggtggtctgcattgtatgcctgctgattgtggcattggaaatatggttctttaagaggaaaaagtggttttaggcctggaaaatggcggacatcagaatgggaattaaaaatggaattaaaattttgttaagattctgtgtataacattgacaatccattgcccatttcgtataatgctgcataacgcagaggtgtctgcattcagactattttttaatacggctgttttaatacagtgtatcaaggattggcaaaaggagcttggaataaggatggacgacgctgacggcgacggaaaccaggattgcaaccataataaaataggattatgcaccggcagatttagggcataacctgcatcttacacaagattgcaggctatgtctttttgcgttgcagcaatacctcatcttggaagaaagtgcaggaatacctgccggagaaaagccgcctgacagagtcctgtctgccggatgaatattttgtgggtattggcagggttggcatacatatagaccactacagggtaaaggaaccaaagacgcgaatcatactgtttcacggcatgggggaggggatgtaacggagggcttctgtcgttcatagcagtgcctctcatgaagcggggatacgaggtaatatgcccggaccttcccctctacgggatgacggagtactatggaacggttgtcaaccggaaaatgacagatggacggatgccagtttcagcaggctgttttttgaccggctgaattgcagtaaggatatgaagctgttaaagggagccggccattttcccatagaaaaggaagggctggtgcatctggagcagtactgtgtggaatttttggaggaatgtctggcccggcactgtgtaagcggcttccagttgagggcgctgtattgcaggaacggatggggatgtatgggtgttgtaccggttggattgccatgtggtaaatcatatgaaaagatggtatgataataaacattggcataggccgtatgattgtatgggagagtgcgcgcatggaagaacagatattgcaaatcataaaagatgaggacagtaagaatcccctgacagacgaggagatagcgtcccgcctgcaggtgttcagggaggatgtgaccacggtgcgccggaagcaccatatacctgattccaggaagaggaggaagccggtcatatttgaggacatgaagaggattctgacagaaaatccggacttgtctgacagagggcttaccaggatgttggaggatgccggctacaggataggaaaatatgccgcgggcaagctgcgggaagaactgttggagttatggattccttccggcgtctgccgggagaaggaaaacgccagcccggcaccggaatatgcgaaacatgcggaatatgcggaacatacagaatccggggccgaggatgacagggcaaatgtgttcagcgcttttgtggggtttgacggaagcatgaagactcagattacccgtgcccaggcagccgtattgtatcctcccagggggctgcactgccttatatacggaccttcgggcgtgggaaagagctttctggctgagctcatgcatgagtatgcctgcggttcggaaaattttggaaaggacgctccctattttgagtttaactgcgcggattatgcggataatccccagcttctgctggcccagctcttcggatacagcaggggggcattcaccggcgccgctgacaataaaaagggagtggtggagctgtgcaatgggggaatcctgtttctggacgaggtgcacaggcttttgccggagggccaggagatccttttctacctgatggataagggaaggttcagacgcctgggggaagtggatacccagcgggagagccatgtgatggttattgccgcgaccacggaaaatcctcagagctccctgcttctgaccttcaggcgcagaattcccatggtcatagaaattccttccttaaaggaccggccggcgggagagaagctgcagtttatcctgcgtttttttcagcgggaatccaggcgtctggggaaacagataaaaataagacagcaggcgctgtggtgcctgctgggcggggactgccccggcaatgtgggacagcttaaatcagatatccaggtgtgctgcgccaaagcgtttttggaagggcgggccagaaaggacgggcgtatcaccgtgtctttcccgagcctgactgagaacctgaggaaggggtatgtacctgaccggattaccaaggagataaaggagctgtgcccggacgactgttatgtatttcccgatgattccggggaggatgccgggaaatccggaacggaaacctttctggagggctttaacatatatgaatccctggaggaaaagtatgaccagctgctgagagacggcctgagggaacgggacatcgaagtccagctcaccgacgagatagagtccagattccagcgccatatccatgaattccagaagtcgggcatccgggaggacgagattgcttccatcgtgggggacgacatcctgagcatgacaagggatatctgtgaactggccaggaaacggcttccggggctggaggaacaggtggtgtttcctctggctattcatctgaacatggccatggagaggatgcgcagccatgggcgtatggtttaccccggcatggaaaatattcgtcagcagtcctacgaagattatgaggccgcctgctatgccgtggatgaaatacaaaaaaagtattatctcactctgccggaggaggaaaaggcattcctggccatgtactttaggaaattcagaaaaaaggacatggcccaggaggggaagattgcggtgctggtggtatcccacggtccggtggccagcgcaatggcccaggttgccaatgccatcatgggaacggaacacgccgttggtgtggatatgaacctgtgggatacgccggcccagatggcggaaaagacagtggatatggccaggcgcgtaaaccagggaaaaggctgcatcgtgctggcggacatggggtctctcctgaatgtgggccagaagattcgggaggagacaggtatgcgggtccgcgtgctgtcacgcacagacaccatgatggtggtggaagcagtgcgcaagaccatgtggacagacgaatccctgaacgagattgcggatgagctggacaagataaagcttaccggaaccagggaacaggcggaagccaggaaaaaggcgattctgtgcctgtgcatcacaggccagggggccgccgtgaaattgaaggagcatctgacggagcgcctgaagagcaacctgtccgggacggttatagtgaccaggggatatattgaggattccagcattgaacgcatcattgccaacacggaaaaggagtatgagatactggccattgtgggcaccattaatccggagtcaggcacctatccgtttatatctgtaagccggatctacagcccggagggcatcggggagcttcgcggcatattaaagcggagcgccatgttcgaggaaaaccagctgtcagaggttatctccccggaccatatttatataaggacagaggcggagttcaaggaccaaattatagatgaggcagtgggacatatggaagaggaaggattggtccggcaggaattccttctcagcgtctataaacgggagggaatgatgaccacccggctcagccagggtattgccattccccacggcgaccccggattggttacaaaaccagtcatttccgttacaaaattagacaaacctgttttgtgggatggggtcaacactgtggatgttatttttatactggggattcaggaagattccagaaaatattttgaacagctgtatcagattatttctgatgaatctatggtttctgccatccgtgccagccggacacgagaagaaatatggaatctgttatgtaaaaatacaaaattagtcaattagttggcatcattcttgctctatatattgtcagaaaggagcgagaatgatgaatatagagaaatttccgaaagtgacagtaatcttaagaggctatacctattcacagacccgcacggttgtcaggaacctggtggggacctgcttaggctccgttgaaattaccatgaatactccgggagccctggaatccatacggaaaatcagccaggaatttggaggacaaatcatggtgggagccggcacggtccttacctatgaagaagccgtggaggccattgaggcaggtgcagcctttttgttgtctcccacggtatttgagaagcgtatattggacctgtgccgggagcgcggcgtggtttctgtgccgggtgctttttcaccttcggaaatcagacagagcttcctggacggggcggatatcgtgaagatattcccggcaggcaggctgggaagcagatatgtgtcagacatccaggcgcctctggggaaaatgcctctgatggtcgtggggggcatcggcacctcaaatgtgcaggagtactttgcggcaggggcatcatttgcgggaatcggttcgggtattttcctgaaagaggatatactgaatgagaatgaagagggaatccgcggttccatagcagccatggaagagaaaatgaagagtatggaggaaaaagaatcatgagcggcattgcgtttaatgaatcattgattctgaaatttgacaaacccatgacggaccgggaggttttgtccgccatgacagattatctttgtgaaaagggcattgtaaaggatacatataagcaggccatcctggagcgggagcagtccttccccacaggacttaagacagggggaatcaatgtggccattccccatgcggatatctgccatgtcaatgaggcggccatctgtgtggccgtgcttaagacaccggctccattcagggctatggatgagcctgacaatgacgtaccggtaagcctggtcatcatgctggccctcacagaggcccacggacatattgaaatgcttcagagaatcgtgaagctgattcagaaccaggaggatgtgaaacacatagtggaggcgggacagcctgacatcatccataaaatcatcaagcagtacctgctggaagatgggaactaaaaataagattatccaaaggagaatataaaaatgaagcgtatattagtggcatgtggaaatggaatcgcaacatcaaccgtagtggcaaccaagatcagggagaaatgtgaggacaatggaatcccggtatcagtaacccagtgcaagcttctggaggtggaatccaaggcagatgattttgatttgctggttacgacgggaaagttcacgggcggcaatgtgaatattccggtggtaggcgccatttccctgctgacaggaattaacgaggacgcgacgctgaatgagcttctgtcctatctgaagtaaaaaggggtttaggcagacagccattggctatgaaagacaaatgaaatcttaggggagattaatcatatgcagatactttataatattttcaatacgattctggacgcaggcgcagtggtcatgcttccaatcatcataaccatcatagggcttattttccgcgtgaaattatcaaaggcattcagaagcggtcttaccatcggcattggctttgcgggtatcaatctggtcatcaacatgatgaagagcaatctgggacctgccgcccaggccatggtgcagaatttcggcattaagctggatattctggatgtgggctggggtgccatagcggcagttacatggtcatcgcccattatcgccatccttatattttgtatcctggcaactaacattgtcatgctggtactgaaggccactgatactctggatgtggatatctggaattatcatcacatggcaatcgttggaatcatggtttattttgtgactaaaaatgtggcaatgggtatcggcgcaacggttatcatggccatcatcacattcaagctgtcagactggaccgcgcctttggtagaggattacttcggcattcccggcgtatcccttccaaccatgtcggccctttcctccatcattatcgcagcgccccttaactggcttctggataagatacccggaattaacaagattgattttgaaatcaaggatgctaagaaatacctgggattttttggcgaacccaccatcatgggtctggtacttggctgcattataggtgttctggccaaatactcagtggctgatatcatggcgctgggcgtgaacatggcggctgttatggtattgattccaaagatgacctctcttttcatggaaggactcatgccaatctcagaggctgccaaaaagtttacccaggagaagtttaagggcaggaaattcctcattggtctggatgcggcggttgtagtgggaaatcctgatgtcatcaccacatccctgatagtcattccgttgactatccttatggctgccgttcttccgggaaaccgcgtgcttcccttcgcggatctggcagttgtgaccttccgtgtggccctggtggttgcaatcaccagaggaaacctgtttaagaacatcatcatgggcctggtatgcacaggagccattctgctggcaggtacggccacagcgccggttctgacccagctggccacttccgtgggactggacctgggagagggaatgattacatcctttgcggccaccagccttacggttagctttctggtgtatgaggcattcatcaagaggccgtacatctttgtgccggtactgattgctgttatggcagccgtatgggtgctcatgaatcgttataacaagaagaaagcagttttagcaggaggaaacgatgttgcgggcaattgataaattggagccgttccagaaagccatatccaaggcccatctggcatcggcaagtgtttctattgactccctggaccacaagcctctcattgccattgccaacagctggaatgagatatgtcccgggcacgagcctttaaaacagctggctgaggaggtaaagaagggaatactggaagccggcggcgagcccattgagttcaacacggtagccatgtgtgacggcattgcccaggggcattccggtatgcgttactgcctgccccacagggaaattatcgcggattccatcgaggccatggtggtgggagagggcgtgtttgacggagtggtgtacatgggctcctgtgataaaattgtgccgggaatgctgaacgcggcggcacggattgacctgccgtcagtcattgtcacagccggtccctgctatgcccagataaagcccaatgagtcaaaggagctgcgccagcagttcctgcggggcgagataacagagcggcagctgattgaggggacgcttaagtattacacagggcccggaatctgccccttcctggggacagccaataccatgggcgccctctgtgagtcactgggaatgatgctgccgggaggaagcctgattccttccagcaccagcatgcgccgtttcagcgcaagggaatcagggcgggccgtgatgaagatggtggagatgcagattcgtcccagccagattatgacgcgggaggcgcttaagaataccatcacccttctttccgctatcggagggtccctgaatgccctgattcatcttccggcgctggcggcagagctggggatttccctggactgggatgatttttcaaagattaccaccaccacgccggtactgtgttccattgtacccaacggaaacaggaccgtggtagacctgcactgcgcaggcggaataccggccgtgatgaaagagctggagtctgtgatgaacaaggatgtgctgactgtgacaggggaaacgctggggcagattctggagcgtacgcctcagggagacagggaagtgataaagtctatggacgagcctgtatccagggcggacggaatccaggtgctctatggcaatctggcgcctcagggagccctggtaaagacatcggcagttcccacggaggtgcgccgctttaagggcacggccagggtatttgagggcgaggatgagtgttatgccgctttccgtgcaaaggagataaaggaaggcgacgccgtcatcgtacgctatgaaggacctaagggaggtccgggaatgaaggagctgcaccggattacggaaatcatcaagggcattcccaacacagcggttatcaccgacggccgtttctcaggggccagcggaggcttaagcattggctatctgtgccctgaggcagcggatggaggtcctattgccctggtaagggatggggacaggataaccgtggatttgtataaggattatctgcatctggaggtcagcgacgaggagctggaagccagacgcagagaatggaaggcagtcacacgtccaagggaaaagggccttctcggccggtacgcccgcctggtgaacacagccaggtcaggcgctgccctgaacagggagtagaaagcagaggaatgataagggaaaccataacagaatatatgatacgatgaggaaaaagagtgtaaaccggttccgggagcagacggtttatgctctttttcaatttgcgggaaaaccggcagggccggatgtatgtgtgtgtccgggcggccggatgatttttgggggacggggtggataaagagcgggaagcggatgcaaaaacgcggatgcaaaaacggaaaaaataagtattaaccgggatagggattatggtatactggaatgagattgtcttgagaataagaaataaatggttaatgggaggatacgacaatggaagaacaaaaaacgggatgtctggtgtgcggagcgccgctggaatatcttcagagtcagattgaaatggaatgtacctactgtcacaaaaagtttatgagtaatgccagatgtgtgaacggtcattttatctgtgacagctgccatgagcagatgggcctgcgtgtcattgaagatatatgcaggcatacagacagcagggacccggtggcaatcatgaagaaaatcatcctgtccccctatatctatatgcatggaccggaacaccatgtgctggtgggatccgtgcttctggccgcctataaaaatgccgggggagaactggatttggacgctgccctggaggagatgagaaacagaggaacgcaggtgccgggaggtatctgcggtttgtggggaacctgcggggcggccgtgagtacgggcatctttatcagcctgattaccggggcatcacctttaagcggaaaagagtgggggctttgcaatgagatgacttccagaagccttggggctattgctaaaacagggggccccagatgctgtaaacgggattcctacacagccatattgcaggcggtggattttgtgggagagaaattcgggatatggatggaacggcccaaaaagacagtatgcggattgtacgaccggaacgaacagtgcctgaaggaaaaatgtccttacaatccgttgggataaatggctgaacaagtgaggcgggtctaaggacaggatatccccgtgcccgtccgtccggtgggtcatcagattatcattccggcgagctctgattctgccagctattgatatgaatatggtatacaataagtttggggttaagggtgcctgcgccgtctgggctgccgcaaataaagaccggaaaagacggtttaaaaagcagttctgccatgtcagtcatagacagccaaaacggtgcaatgatataattatataaatacccggagatttccgggaaaaaatccagacaacaggaatgacatacaactgtccgcatggaggagcttatgcaagaggataccctaaaacaattcctgcccgccactgaaagatggtttaggaaaacattcggagaacccaccaaaatacagaaggaagcttggcctgccattgctgacggaaggcatgtgctggtcagcgctccaaccggtacaggaaagaccctttcagccttcctggtgttcatagaccagttgggcggactggcagggagaggggagcttaaggatgagctgtatgtgatatatgtgtctccccttaagtctctggcaggggatatcagggaaaatctccgtaaacctttggaggggattgaggcggaagctcttgaggaaaacagattccgtccggaatccgaagaacctggagagggcacgccgggaggcggaccgggtaaacaatccatagggcagattcaggccgccatccgtaccggggacacgcctcagaaagagcgccagaggatggtaaagcatccgcctcatatactgattatcacgccggaatccctgtatctcatgcttacatccaaatccggccgccaggtgttaaagaccgcaagggcgatcattttggacgagcttcacgcccttatagataccaagaggggagcgcatctgatgctgtcagtggccagactggataaactttgcgggcgcaggcttcagagaattggcctgtccgccaccattgagccgttggagcttgcggccgcctatctgtccccggaaccggccgtcatctgtgccccatccatggataagcaggtggaaattcaggtcgttggcacggctcctgctgtgggaagacggaaggacccggtatgggaagaaatgggaatggcagtgtaccgccagtgcttaagctgtaagagtgtgattgcattttccgagggaagacggtatgtggaaaaactggcatattatgtaaatctgctgggcggggacgggtttgccagagtccaccacggaagtctgtcaaaggaacagcgggatgaagtggaacgggatttaagagagggacggctgcggctgttatgtgccacatcatccatggaattgggcattgacgtgggggacgtggagcgggttttgcaggtcggatgcccccgtaccatttccagcaccatgcagcggctgggccgggccggccataatccgggccgggtcagcgtcatgtacatgtatcccaggaccgcgcctgaggcagtatattgcggcatgaccgcacaggtggctcgccatggaggcgtggaacgggccaatcctccgcgcatgtgcctggatgtgctggcccagcatttggtttccatggcttcgggagagagctacagcatagctgatgtgatggaagtcctggagcggtcctacccattttatcaggtgaccaggaaggatgtggaggatgtccttgccatgctggcaggagattatgagcacagccgggaaataccggctcgtccaaggattttgtacgaccggatacacggacgggtggccggggatgtttacagtcgtatgctggccacggcggcaggagggaccatacccgataaagggatgtatgcagccaaaacagaggacggggtgaagttaggagagctggacgaagaatttgtctatgaatccaggattggggaccgtttcatgctggggtcatttggctggcgtgtggtccgtcaggataaggactctgttatcgtgacccaggccccggctgaaggcgccagacttccattctggaagggggagacaaaaggaagggatcttcggaccagtcttgcctttggccgtatattcggagagctggagaaggcctgccgtgacggagagctggaaaaagccctgggaaaactggggttagacgagtccgcgtcgtccaatgcgtccggctttatacaacgtcagattcaggccacagaaggactgcctgatgacaggaccatagtggtggagcattttaaagacagtacagggagccaccaggtcatggtccatgctttgtttggcagacgggtaaatggcccgctgtccctcgtcctgcgtcatatgatacggaacaccatgggattggatgtgggaagtgtggatgaggaggatggatttcttctgtatccttacggcagggagcaattgccggaagggcttttgttccaaatcaacccggaccaggtacggccggtgctggaagcaatcctgcctgatactcctctgtttggcatgacattccgctacaatgctgcccgtgccctgatgatgggcatgaaacggggcgggcgccagcctctttggatgcagcgccttaaaagcacggaaatgttaagctccctgatggaccagccggatcatcccctgattcgtgagacgaaacgggaatgtctggaacaccagtgggatatcagcggagtgatggagatactggccaagatccgttccggccttattacagtcagagaaatctggctggatgtcccttctcccatgtctctgcccttccagtggcaggcggaggcggaagaaatgtatgagtactcaccggtgacacctaaaatccgccagactgtgcaggaagatttgaagaaggcactgctcaagcccacagcagaggaactgtccaggggatggacacggaaaaaaatgccggagaatgaggaggagcttcattcccttctcatgatggagggggatttggaggcaggggagctggacataccggctgaatggctggataccctggctcggcagggactggcctgttatgtggagcccggaatctggatagcggcagaacacgaggacgaatatatgagggcattgcggcagcaggatgaggaggcaggaatgcatattatccgccggatgctctactaccgaggcggtcggactgcgggggatgtaagggaacggtattttctgtctgagaaaatgacagaggagcttttggataaactgtgccgctgcaaacatgcagtggaggaccagggtgtatattatcacgaaaagctctatgagagagccagggaaggccatatacgcagcctgcgaagccacgcggtcacacagccggcttcccattatgccgcgcttatggcctcaagggcagtggtacattccacgtcagaagaacagttaagggaggccatggaaagaggatgcagaaaaccatgccctgtacgcttttgggaaaatgtgtactttgccaggcgggtggagcgctatggaggcagctatctggaccggctgctggcacagggggattatttctggagaatgtcgccggaaggaaccctttgcttttgcagctatgaggacattgactgggaggcagacgtcggagcgcaggcagcaggatttgagggagatgtgattgaaggagaggtgattaagagagatgtatttaaggaaaatgcgtttaaggaagatgcgtttaaggaagatgaacctaaggtgggggagcttaaaggagatgagcttctcatgtacagggagttaaaacgcagaggagccagtttccttaaattccttacaaagataccgaaggaaggcagcgcccaggaagtactgttaagtctggctgaaaagggtctggtatgtgcagacagttttgtgcctgtaaggcaatggcagaaccaggacaaggtgaggaaagctgctgtcagacagcgcgtgaataccagggtcatggccctgtcggcagggcggtgggacatagtaaggccagtaaaaaagtatgggccggaggaatggctggagctgtttttggatgaaaatatgattctgtgccgtgagacttttaaaaagtccatacaggctgtgtcagactctccctatgccctgaccggagaagatgggaagaagtgggattggagctgggcgcaggcattggaaattctgcgtgtctgggaatatacgggccgcattcgcagaggctattttgtggaggggatgtcgggcgcccaatttgtccgcagcgaggattacgatgccgtgaccggtgcactgagggagccggatgaccatgtggtgtggttaaacggaacagacccggccctggtgtggggaaaagtcctggaatttccggagaaatgtggatttctggcagtggccggaacagcggtggccctgaaagcgggaaatctggcagctgtaatggaacgccagggcagggtactgcgcatttacgatgtcaatgatatgaaggaagtgatggcggaatttgtccgtgcgttcaagcagggagctatatatccggaacaaaagaggcttgttttgaaagagtatccggcggaggcggcagaggcactgcagcatgcgggatatatgcgtgaaatgaaggattatgtagtgtataagtagagtgtgatttctgtgaagcggaatcccatcaaaccaggtgcgaatgccaagctaacatgaaatgcctgggagattcgcacctgaaaaacagcggaaaagccgtgaaaataggctgggtgaatggatggaggaggttgaaataaggaggggaggacataatgcataaaaagttagggggatgtggagggattgttggatagttttgctgtcgaggcccgcgagggccttgtggattgaaatgccgtcccggttggcttatctccatagctactggtcgaggcccgcgagggccttgtggattgaaattattttatgagaggagtgcataacatggtagaacgtcgaggcccgcgagggccttgtggattgaaatcatatctcccttacaaagtccgccgtggttttctgtcgaggcccgcgagggccttgtggattgaaattggctctccacgtatgccttgttatcctccagtggtcgaggcccgcgagggccttgtggattgaaatgtttcattttgttttctcctgattttttataaggtcgaggcccgcgagggccttgtggattgaaatacgaacttgaaggtgaccgcctacaacgcatacggtcgaggcccgcgagggccttgtggattgaaattgctgaaatgggagaatatatccccatcgaagagtcgaggcccgcgagggccttgtggattgaaattgtcttaaaaagtttcaataggtcaatttcttggtcgaggcccgcgagggccttgtggattgaaattcttatactcataataaatttcctccatggtatggtcgaggcccgcgagggccttgtggattgaaattattgccaaaaaggacaaaacaattgcacagaggtcgaggcccgcgagggccttgtggattgaaatttgtatctttatttagatagtcgaaacgaatttcgtcgaggcccgcgagggccttgtggattgaaataagagatatcctcggagcagttgagcaagtagacgtcgaggcccgcgagggccttgtggattgaaatcccctccatggtcagggcttccaggcggatgtcctgtcgaggcccgcgagggccttgtggattgaaatctctccttccggccctgttggaagagccattatttgtcgaggcccgcgagggccttgtggattgaaatggaaaacggaactttgaaattaaccgccaaagcgtcgaggcccgcgagggccttgtggattgaaatgccagatgaaccttgacggaaaggcagaagaaggtcgaggcccgcgagggccttgtggattgaaatgaaatattacagatttctgaaaatgcttcggacgtcgaggcccgcgagggccttgtggattgaaatctgactatggccccaaaagaaaacagccgtcagatagtcgaggcccgcgagggccttgtggattgaaatgacttaatgttgactggcggatataaacgttcgagcgtcgaggcccgcgagggccttgtggattgaaatagcaaagacgccttgaccattgatttgctagactatgtcgaggcccgcgagggccttgtggattgaaattccgttactgccagtcccttgattaaaaaggccggcagtcgaggcccgcgagggccttgtggattgaaatgccatgacagggcagatatccgtatcaactgtgtcgaggcccgcgagggccttgtggattgaaataataaatggttatcatcagtaatgccgtattgatagtcgaggcccgcgagggccttgtggattgaaatctcatactgcatacagaagtatttcagctcattgtcgaggcccgcgagggccttgtggattgaaattgttcagacagacaaatctaagagatgcccattgtcgaggcccgcgagggccttgtggattgaaatatggaatttgactggattcagattggtaaggacatgtcgaggcccgcgagggccttgtggattgaaataaggttacatcatggtcagataaccgtcatggtggtcgaggcccgcgagggccttgtggattgaaatatttctaccgcgtatatggcgggcaggggacctggtcgaggcccgcgagggccttgtggattgaaatcagtacagacctgacagcggatgacctgcttaacgtcgaggcccgcgagggccttgtggattgaaatcacagacgggtgagcttgcggctcagttaatgggtcgaggcccgcgagggccttgtggattgaaataagttaatgcgctgattgatgcgaaaaatgcccgtcgaggcccgcgagtgccttgtggattgaaatcatccggtatctcgtcaatcatttcggccttctgagtcgaggcccgcgagggccttgtggattgaaattcgtttaccgcatcgaatgccagtccatgttccgtcgaggcccgcgagggccttgtggattgaaatcataaaccaatagggcgagtgactaaagcagttacgtcgaggcccgcgagggccttgtggattgaaataaagtatctgaaccagaaaggggaaccaacccagcgtcgaggcccgcgagggccttgtggattgaaatatttgaatgtgattggcggtcaacctccagtaaggtcgaggcccgcgagtgccttgtggattgaaatataacatgctttatatacatatgcttttcctttccaccactgctggatatgtggttgattttagctggctgattccgtgataggcttccagaataccatttttggctgctttttatacagtatcaatatcaacacaataccaacactcacccaataccaccccaataccaccccaatactaacaccaattcttaatcatgcagaaccattaggcaattgcgaaactcactgaccagaatttatgcacatcgtataggaatgaatctaaattgaatatattaagcaagatattttgtgcaaggtgaatataaaaattcagagtttcgtaattacctaatgcagaaccatttatgaaaggagagggaaaagccatgaaacagatgtcattattcgatgacagagaagtgtacaatcccctggccagcaggctgcgtccggatgacctggatggatttgtgggacaggagcatcttttgggaaaggggaagctgctgcgccagctcatagagcaggataagattccatccatgattttctgggggcctcccggcgtgggtaagaccacactggcgggaatcattgcaaagcggaccaatgcccagttcattaatttcagcgctgttaccagcggtatcaaggaaatcaaggaggtcatggcccaggctgagaacagccggaggatgggaattaagactcttttatttgtggacgagatacaccgttttaataaggctcagcaggatgcatttctcccttatgttgaaaagggaagcatcattctgattggggccaccacggagaatccttcctttgagataaacagcgctctcctgtcacggtgcagggtctttgtgctccaggcattgacggaggatgacctggcccgccttataaagaacgcgcttaaaagtcctaaaggactgggctatttgaacgtggaaatcacgaaccatatgatcgaaatgattgccgggtttgcagacggggatgccaggacggctctgaacaccctggaaatggcagtgacaaacggggtaatcagtccggataagaccacggtcacagaggatgtgttgaagcagtgcatcggaaaaaagagtcttttgtacgataagaaaggggaagaacactacaaccttatatccgcgctccacaagtccatgcgcaattctgacccggacgcagccgtatactggctggcgcgtatgttggaagctggggaggatcctctgtatgtggcccgcaggctggtccgttttgccagcgaggacatagggatggcggacagtcaggcactgacgctggcagtgtctgcctaccaggcctgtcattttctgggaatgcccgaatgtaatgtacatctgagccacgccgtaatttacctgtccatggcgcctaaatccaactccgcctatatgtcctatgaatccgccaaggcagacgcccagaacatgctggcggagccggtgccccttaccatacgcaacgctcccaccggactcatgaaggacctgcattatggcgacggctatgtgtatgcccatgatacaaaggaaaagatagcccggatgcagtgcctgccggactccctggagggaagaaaatattaccgtcctacggaccagggcgcggaagaacctgtaaaaggcaggctggaggaaatcagaaagtggaagaggggggaataaagcccactggctgctccctccaaccgtcccatatcccgttcaataagttaaacaatcatcagttcctttgtcatggtattcagggattcacagcccttttccgtaatcacgattaaatcctctatgcgtatgccagaccttcccggcaggtaaatgccgggcggtccgggattatgtggacagcctcgcaatcccccaggatttttcggttgaggacaacggccatatcgttgtaaaggctgccgggaaaacagcgcatgccgcctttcccgagggttctgacagcgcggcggtgaagctggcccgtgtgctggccggagcccccttcctgacagagaaggaaaaagcctgcttccggttcccggaccagggatttgctgattattatggggaaggtatgggcatcggctttgagggtggactgtccggcaggcttaccctggcgggaggcatggccaggacagagaggggacggttcatacagaattttaatatccgttatccggtgacggccgacgcggaagcactggtgcggcagatgagcgcgatagccggaacatacgggtggattctggactggaaccgggataacccgccctgtgtcattgacccggaaagcccggtggtaagggagcttacgtccctgtgctgccaggtgctggggacagaggcagaagcctgctccatggacggcggcacctacgccaggaagctgccaaatgcggtcgcctttgggccgggcatccggggacagaaaaagccctgtcctccgggccacggcggcggccagccggacgaatgcgtgaagattgaaaatctcaccaatgccatggagatatacatagaagcccttaaacggctggatgttctgatagggggataacacatcccctgttttctcctccttattttgaccgtaaatattaagaaagccgtcaggtctctcccggctcttacgtgctatactaaaaccaccacaacctgcgccgggcgcgcaggtttgcaggaacatgtatataaaaggaggtttgtgagggattggaagagaacagggagaaaaaggaaaagacaggctttatggcccagggcagatctgtgcttatcgcactcatcgctgcgctcagcgccattatctgcgtcagcatctttacaggcggactggtggattataagaagaacggcgggggaagcggaatcacggccaccggttctgccagctgtgattttgagtcggacttgattgtgtggagaggcagcttttctgtccatgggaatacgcccagggatgcctacgccatcatcaagaaggacgcggaactggtaaggcagtatctgaaggagaaccaggtggcggaggatgagatgatattcagttccgtcaacatttcccagacctatacatccagatacgatgacgagggcaaatacctgggagatgagccggacggatatgatctgacccagagtctgacggtttcatcctatgatattgacaaggtagaaaatatttccagggatatcactaagctgattgaatcaggagtggagttcgagtctgagctgccggagtattattacaccaagctggatgaggtgaagctggatctgattgagaaagccactgccaatgcaaaggagcgcattgatatcatgtctgccggttcaggagcaaaggcaggcaagctgttaagcgcggccctgggcgtgttccagattactgcaaagaattccgggtcggaatcctacagctacgacggatacctggacaccagctcccggtataagactgccaatattacggtgagattgaattacgcggcggagtagccaatgcaatcagatcggcaaacgggctgtttgggaatataatctgttcccaaacagcccgttttgtattgtttatccagacataaattagtagccggcattcataatctgatataccttatccggcattcatcaggcggctggctgtcccagtggttttatcttatccagataaatcttgcggaacaggacggagctgagcaccacggaggtgatttcagccagaggcagggagagccacactgcatgcagcccaaaggtccgggcaaaaaaccaggccaggggaaggatacatacaagctgtctggctgcggatataatcaggctgtatacgccgttgcccagagcctggaacacggatcccactatgatgcagtatcctgcgaacaggaagctgaggctgatgatccgcagggcggggacgccgatggacagcatttcctcgtctgcctggaagagcgtgagcagctggggcgtcataaggtggaacaccatcagtccgatgagcatgatgcccatcgcgatgccgatgctcagccagaccgtttccatgatgcgttttttgctgcgggccccgtagttgtaggccacaataggtatcatgccgttgttcagtccgaatatgggcatgaagataaagctttgaagcttgaaatatactccgaatacggctacggctgtttcggaaaatccaatcaggattttattcattccaaaggtcatgacagagctgatggactgcatgataatggagggcacgcctacctggtagataatggaaatagttctccagttaggggtgaacgatctgaaattaatccgtacctccttgttcttggcatggttcaggatgagggccaggaacatggccacaatctggccgaatacagtggcggcggcagctccctggattcccattttcggcactccaaacaggccaaagataagaatggggtccagtataatattgataatggcgccggtgccctgtgtaatcatgcagtaaaaggtctggcccgtggactgaagaatacgctcgaacatcatttcaccaaatagcccgaagctgaagatgcagacaatctgaagatattgtacgccgtattcaatgatgaccgggttgtttgtctggctctcaaagaacagcctggagccgaacaggccgaagactgcgaaggccaggaaactcaggaaggccaggaacaggccgttgacagcagccagattggccgcctttgaatttttctcccccagggaacgggacagcagggcgttgacgcccacacaggttccggcagatactgcaatcagcaggttctggatgggaaatgccatggataccgcagtcagggcagcctggttaatcatggatacaaacacgctgtccacgatgttgtacagggcctgcaccagcatggagataatcatgggcagggacatggatatgagcagcttattaatgggcatgacgcccattttgttttcttgtgacatgtagtgcgacttcctttctcatttgtgcatgaaagatattgtaacattacttataacggtaagtcaatgacatatgggggtataaaatgctggacattgagctttgtttgtgctatatttaaaatagtaataattactattattgacgatgaacaagagaagggggaaacataatggcagtataccgttgcagattctgtggttctatttatgatgaggaaaaggagggggtaccggtatccgatttaaaggtctgtcccgtgtgcatggtcacggccgacaagctggtgagggcagaggatggaacggggggaggaaagactccggacagggagaaggaggagcccgttaaaaagcaggagacacgggaaacatgcaaagactgcggcggcagaacaggggaagctgagtcctatgaccctgagtatgccaggactcagaccgacgcccgctatatggacgagattcacgagatggccgtgaagggacagtccatcattgctgccatgggaacccagatgcccatgccgggctgggacgacatcctgtttctgggggctcagctgaatcccatgccgttggacgaacacgccccggtaaagacagaaaccattataggaaaacatgcggcgaagcccatggtgctggaccatccggtttatatttcacacatgtcctttggcgccctttccagggagacaaagacagcgctgtccaggggaagcgccatggcacgcacagccatgtgctccggcgagggaggcattctgccggaggagaaggcggcggcctacaagtatatatttgaatatgttcccaaccagtacagtgtgacggatgagaacctgagggaagcagacgccattgaaataaaaatcgggcagggcacaaagccgggcatgggaggccacctgcctggaggcaaggtgacgccggagattgcggccataaggaataagcctttggggcaggatatcatcagtccgtcgcgtttcccgggcattgacacaaaagaggatttgaagggcctggtggacaggctgcgcctggtatccggcggacggcccatcggcatcaagattgcggcgggaaggattgagaaggatttggaattctgcgtctatgccggaccggactttattaccattgacggaaggggaggggcgaccggagccagccctaagattatcagggattctaccagcgtgcccacgatttatgccctttacagggccagaaaatacctggaccagacaggctgcggcgcccagctggtgataacgggcggtctgcgagtatcttctgattttgcaaaggcactggctatgggcgcggacgcagtggccattgcttccgctgcgttgatggcagccgcctgccagcagtaccgcatatgcggcaccggaatgtgtcccgtgggcgtggcgacccaggacgagaggctgcgcagccgctttaaggaggatgcggccgcgcagagagtggctaatttcctcagggtatctctggaggagataaagacatttgccaggattacggggcatgacaacattcacgatatggatgtggacgatttatgcacagtcagcagggagatatcggaatttaccaatatacgccatgcttaagggcggtcaggaacaatattccccgtataccttttcaaaaatttccacatgcagccgttcgtccaaaataatacgccttaagttttcagtgatattttcatcccgtatgtaggaaatctggtgctggtatttgctgatggctgccttttctccgtcgatgacattgcgcatcagggtccgcagctctccgggatactggttgcagctgggggaccagtatatctttttacatccgtgctgggtccacagccgcggttcctcccccagctgcagggctagttttccaaatatatccagatgatgcatttccacgatgctgaccttgtggaatacggcgctgacatctggattgtatccggtaatcagatgattgaagacatagagggatatggcggacatctctgaattgtttccgcctatgttgtccaacatcacccttgcgtaggccggattcacggattctgccctgacgggtggatagggtgcatcggaggaatactgaaaatcatggatggataacatcatgagctcctttatatgtatagtagtttccatattgcagtttatgccaggcggagcaaaaatatgatatgccgggacctgctttccaaccgtttcatggaatggcggcagactctttcaattatcacaataaatattcagacatgggatgatttatagtcaaattatctaaaattcatcccggataaacatttgtccttgactttgaatcagtgatgtactattttagtaaataaataatcaacagcaatgaaagagactctggcctgagaaatgtgacaggaagggggcgtcaccgactgagagcgccgccgggcaggactgggctaagggaacactctggagctggtatatcgaagcggtcagggcctgaaccggaagatgccgggcagaagagggctgatagtaggtatatccgttgtacacgttacgtacgtagagaggggagctggaaaagcagggaagtttgctgcgggaccaggtctcaatgcgggtggtaccgcgggaaatgtctgaatttaatcccgtcccggaatgcagttactgtgttccggggcgttttttatttgtggaccagacagccggctcatgtccatgaaaaaaacaaccggaaccgaaatccaactggacatcaaaagtacagatgtcaagtgctcatagcaaatgctcatagcgaggagagagagtcatggaatttgtaaacggagttaaggagaagagagtcctggatatcagggaagtgcttgaaggggaatacgaggggaaggaaatacggatgaacggggctgttcataccatacgccatatgggcgaggtagcctttgtcatcctgcgcaagtcccggggactggtgcagtgtgtatatgaggcggggggtacggattttgacatcagggatttgaaggaagagagcgccgtggaggtgatgggtgttgtgaaggccgaggaacgggcgccccagggctttgagataaggctgaaggaaatccgggtgctgtcccagccagcagagcccctgccccttgccgtcagcaaatggaagcttaacacatccctggagacaaagctttccctgcgccccatctccctgcgcaatgtgagggagcgggccaaattcaagattcaggaaggcattgtaaggggatttcgggactatcttttaagccagggctttacggagatacgcaccccaaaaatcgtggcgagaggagctgagggaggctccaacgtatttaagctggagtattttaataagaaggcagagctgggacagagcccgcagttttacaaacagaccatggtgggtgtatatgacagggtgtttgaggcggcgcctgtgttccgggcagagaagcataataccacccgccatctcaacgaatacaccagcctggatttcgagatggggtatatcgacagcttccgggatgtgatggatatggagacgggaatgctccagtatgtcatgcgacttctggaacaggagtataagaaggagctggatatgctgggagtgaccctaccggaggtgggacggattcctgcggtccggtttgaccaggcaaaggagcttgtttcaaggaaatatgacaggaagatacgcaatccctatgatttggagccggaggaggagctgctcataggacggtatttcaaggaagagtatggaagcgattttgtgttcgtcacacattacccttccaaaaaacggcccttctatgctatggatgacccggaagaccccaaattcacgcttagttttgacctaatgtttcggggactggaggtgaccaccggcgggcagaggattcacgactacagggaaatcacagacaagatggagaagcggggcatggatccggaggacattgcttcctatcttatgattttcaaatacggcatgccgccccacggcggcctgggcattgggctggagcgccttaccatgaggctcctggatgaacagaatgtcagggaggcatccttgttcccaagagatgtgaccagattggagccatagggacaggaaaatgactgagaggagcaggaaattatggcaaatatcataagtgacgagacaatcgagtatgtaggcatcctggccaagctggaactatccccggaggaaaaggaggaagcaaagacggatatgggaaggatgctggattatatagataagttaaatgaactggacacacagggcgttgagcccatgtcccacgtatttccggtgaacaacgtgttccgggaggatgtggtcacgggcgtggaccagagagaccggattctctccaacgccccccggcaaaaggacggagcattcaaagtgcctaagactgtagagtaggaggaatgggaacatgagcatattagatatgacggccctggagctgggaagaaggattcagtcaggggatatcaccgcggtccaggccgcagaggcatctctggcacgcataaaggccatggagccatccatccatgcctatgtgacagtgaatgaagaaaagaccatggaacaggccgggaaggtccaggcggaaattgaggcgggaaggcttagcggacctctggccggagtacctgtggctgtcaaggacaacatgtgtacggaaggaatgcggaccacctgcagttccagaatactggaaaattttatccccgcctacacggcccaggcagttgccaatctggagcaggcaggagccgttatcctgggaaagaccaacatggatgaattcgccatgggaagcaccacggagacatccgcctttggcgttaccaggaatccatggaacccggaacatgcgccggggggctcctccggcggttcctgcgcggcggtggctgccggggaatgcttttatgccctggggtctgatacgggcggatccatacgccagcccagctccttctgcggcgtcacgggcatcaagcctacctacgggaccgtgtccaggtatgggctcattgcctatggctcatccctggaccagatagggcctgtggcaaaggacgtgtcggactgcgcggctgtcctggaggttctggcctcccatgaccccaaggacagcacatccatggagcggagtgactgtgatttcaccgcagccctgtcagaggatgtcagaggaatgcgcattggcataccggaatcttacttcggacaggggctggatcaggaggtaaaggacgctgtgctggaagcagccagggtgctgggagaaaagggggccatcgtggaaacctttgaccttaagctggtggagtacgccatacctgcctactatgtgattgcttccgctgaggccagctccaacctgtcacgctttgacggtgtaaagtacggctaccgggcgccggaatacgaggggcttcacagcatgtacaaaaagagccgttcccagggattcgggccggaggtgaagcgccgcattatgctgggctcctttgtgcttagctccggctactacgacgcatattatctgaaggccctccgcaccaaggccctgattaagaaggaatttgaccgtgcgtttgcgtcctatgatgtcatactggctccggcagcgccggcaacagccccgcggttaggccagtcccttggtgatccccttaagatgtatctgggagatatctataccatttccgtgaacctggccggtcttcccggaatcagccttccctgcggcctggattcaaaggggcttcccattggactgcagctcataggggactgttttaaggaaaaaagcatcatacgggccgcctatgcttacgagaaggcgcgggagtggaagctgccgcctgtgactgccgggacgccagaggagccgtccggcgtcactgcaggggaggcagagaggaggatgagccatgagtaaacagtatgagaccgtcatcgggctggaagtccatgtggagctggccaccaaaaccaagattttctgcggctgttccacccggttcgggggagcgccaaacacccatacctgccccgtatgcaccggtatgccgggttcccttcccgtgttaaataagcaggtggtggagtatgcgctggcagtgggactggctgccaactgccagattaaccagtactgtaaatttgacagaaagaactatttttatccggataatccgcagaactaccagatatcccagctgtacctgcctgtctgccacgacggctgggtggacatagagactgagtccggccttaagaaacgcgtgggaatccatgaaatccacatggaggaggatgcgggcaagctgattcatgatgagtgggaggactgttccctggtggattataaccgcagcggagtcccgctgattgaaattgtgtcggagcctgatatgcgcagtgctgaggaagtcatagcctgcctggagaagctgaggctgataatccagtacctgggcgcttctgactgcaagcttcaggagggatccatgagagcggacgtgaacctgtccgtgagagaggcgggggcggctgagtttggcaccaggaccgagatgaagaacctgaactcctttaaggccattgccagggccatagaaggggagcgcaggcgccagattgagctgttggaagacggcaggaaggtaatccaggagacacggcgctgggacgacaacaaggagagctccaaggccatgcggtccaaggaggatgcccaggattacaggtatttccctgatccggatctggtgccggtggtcataagcgatgagtggattgcccgggtaaaggcccgccagccggagctgcgcacggagaaaatcgccagatacatggaggaatacggtcttcctgagtatgacgccaggcttcttaccagttccaagcacatggcggatatctttgaggagaccacgcgtttgagcggacggcccaaggaggcctccaactggctcatggtggaggccatgcgcctgatgaaggagcaggaaatggagccggaggacatgaggttgtccccctcccatctggctgcacttatcggcatggtggaaaaaaacaccatcaacaggacggtggccaaaaccgtgtttgaagagatattcaggcacgatgcggatcctgaggcgtatgtggaggaaaagggcctcaaggtgataagggatgaaggcgccctgcgccgcaccgttgaggcggtcatggctgccaacccgcagtccgtggaggattacaggagcggcaaggaaaaggccatgggattcctggtgggacagaccatgaaggccatgaagggcaaggcggatccggccatggtgaaccagcttgtaagggagctgcttgacggcggggatgcataagctgtgatagagacagatggaaaatgacataagtataccttttgacaatataagaaaattttgtattgacggaatgcttcaattggtgtatgcttgtgtacaatgtacgaaaatgttgaccggtggctgacagatgtatgcctgacggacacattttatagaaaatatagtgagccaggaggatattatgaagccatatgcagagatgacaaaagaggaactgctttcactgcgtcaggacctgaaagcacagtaccgtgagtttcaggcaaaggacctgaagctggatatgtccaggggaaagccgtgtgtggagcagctggacctttccatgggtatgatggacgtactgagcagcaccagcgacctgacctgtgaggacggtacggactgccgcaattacggtgtgcttacaggaattgacgagaccaaggtactgctggcggatatgatggaggtgaatccttccaccattatcatttacggcaattccagcctgaacgtcatgtacgataccgtatccagggccatgacccacggaatcatgggatgtacgccatggtgcaagctggataaggtgaaattcctctgcccggttcccggatatgaccgccattttgccatcacagaatacttcggcattgagatgattaatgtccccatgtccgaggagggacctgatatggatatggtggaggaactggtggcttctgatgattccatcaagggaatctggtgcgtgcccaagtattccaatccccagggctattcctattcagacgagacggtccgccgttttgcaaggctgaagccggctgcgtccgacttccgtatattctgggacaatgcctacggcgtacatcacctgtatgaccatgaccaggatcacctgattgaaattctggcagagtgcaagagggccggaaatcctgatctggtttacaagttcgcatccacctccaaaatcagcttccccggttccggtattgcggccattgccacctcccacaataacctggaggatatcaaggcccagctaaagaaccagaccattggccacgacaaggtaaatcagctgcgccatgcccgtttctttaaggatatccacggcatggtagagcatatgagaaagcatgcggatatcatccggcctaaatttgaggcagtggaggagatattggatcgggagctggaaggactggaaatcggccggtggacaaagccaaggggcggatattttatctcctttgattcgctggatggctgtgcaaaggatatcgtggccagatgtaagaaggcaggggtggttatgacatctgcgggagccacctatccatatggaaaggatccccatgacagcaacatccgtattgcgcccacttaccccacgttaggggatttgattacggctgccgagctgtttaccctctgcgtgaagctttcctctgtggaaaagctcttaaaaacaatggcataattggaggacggatgccttccaaggaaaatgattcaagtgtaaaagcaggcacttcatcagataatgatagggagcggcacatcgaaagcagatgtgcgagctcccttcctcattgtcccggatatccaggcaacaggcgacccgggacagatttaagagcagggatcatctgataaaggaggcaggaccatgcagggccggaatgtacggtttaaaggaaaatacgacctcttcacgatttatctgattcccggcgcgaccatattcctggcatcccttgacagctggacaggcaccaacctgtctgtcctgggcaaccggaccggaaacaagctgctgtttgcggtgtggggatttgccaccggcatctattactgtgtgtatgtgcgttatctttttcacataggaaggtacagaaattcgggaggcaggacactcatgtatacagcggcagtctttctcctcatggcagttatgattccctatatgccggaggaatatcccttaaaggcggatatccatgtgctgctggcatttttttcgccggtgctgctggctttcagcatcattggtttcctccgctttctcagctcccgcgaccggatgcgttttcgcagggcatggggtatcctgtggatgatggcagcctgctccgtcctcttcctcctggaagcgggctttatcaccagttttctggaaatattcattatcacaggcctgtgcgggtatctgcgctatatggaacagcttctggcaacgtgaaaagggtgggaaagatgaattctttcccacccttttcgggcagtaaaaacaaaccgtttatatggagtgtaacacaaaaggggcattaaaaatccacttcctcgtcatagtagcagcattttaacagctgttccatgacctttggagtgatagaccttgggttggagccggtgcaggcatcgcctacggccagttcggcaacctttggaagcttatccataaattccttctcatcgataattccgccctcataatcctttatgcaggccgggatgtccagtgccttgttcatctctaagagacgggcaataagggcatcggtcagttcctcctctgttgtgccgggaaggttgataaatttagcgatttttgcatatctggcggcggcctcaggttctttggagttgaattttataaccttgggaaggtacattgcattagcacaaccgtgaacaatgtgaccgccggaatatgcagcacctgtcttatgtgccatggagtgtacgattccaagcaaagcattggagaacgccattccggccagacactgtgcatcgtgcatcttatcacgggcttccatatccccgttataagaaggtatcagatactcgttaatcatctcgatggcatggagtgctaacgggtccgtatactcgcagtgaagggttgagacataagcctcgattgcatgggtcatggcatccattcctgtgtgcgcggtcagcttccctggcatggtctcagccagggccgggtccacgatagccacatcaggtgtgatgttgaagtcggccaggggatatttgatgcctttcttataatcagtaataacggaaaatgcggtaacctcagttgctgttcctgatgtggaggaaatcgcacagaatttagccttggtacgcagggtggggaagctgaatggtgtaatcaggtcctcaaaggatgtgtcgggatattcgtagaatgcccacattgcctttgccgcgtcaatgggagaaccgccgcccacagccacaatccagtcaggctcaaattcctgcatggcagcagcgcctttcagaactgtatccacagatggatcaggctcaacgccttcaaataatttaacttccatgccggcttccttcaggtaatcaactaccttgtccagaaaaccaaaccgtttcatggagccgccgcccacaacaacaatggcttttttgccggtcagggtcttaagggcttccagtgcatcttttccatggtacaaatctcttggcagtgtaaatctcatgataatacctcccagtatatgtaaaatgtcgttttggtatgttatttctttaacgattatatcttaacaccattggtctggaatgggtaggtatgaaaaaggaataccggtattccttttccggcatctccctaattataaaattattggaaactcgggggaaatgctatccggtatgtgaaacttatggtatacttctctaaaatgactgagaaaggggtataccggatgaattttttcatgggtaagaagttcgtgggacctggaggcggtaaaaaagaccagggaccggaagtagtatttgacaacggggaagaaagcaataagaggatgaagcggatgctccgtcccataaagatagccattgtggtggctgttttggccattgctgcctttgattctttctataccctgtcagagaacgagatggcagtgctgaccacctttggccgtccaagcagcgtcactacctcagggcccaagttcaaggtgcctttcatacagaaggtacataagatgtccaaggaaatcaagggcatgcccattggatatgacccggattacaatgcacaaaatcatgctgacagcgagaacaatccgataacggttacgtctgagtcagagatgataaccaaggattttaactttgtgaatgtggatttttacatcgagtaccagattgtggaccccattaaggcgtatatccacagcgacacggccattcctattttaaagaacctggcccagtcctatataagggatacggtgggatcctacagcgtggacgaggttatcaccaccggcaaatccgagattcaggcaaaggtgaaggcactgctgtctgagcgcctggagcaggaggacatcggcctgggcattaacaatgtgaccatccaggacgcgcagccgcctaccgatgcagtgaacaatgcgttcaaggcagtggaggatgcaaaacagggtatggacaccaaaatcaacgaggccaggaagtaccagtccgagcagcttccggcagccaatgcaaaggccgacaaggcagccaggaatgcggaagcctaccgccagcagagaatcagcgaggcggaggggcaggtatccaggttcaacgatatgtaccaggaatatgcaaagtatcctcttattacaaagaagaggatgttctacgagaccatggaggacattctgccggagctcaaggtcatcataaacggctcagacgggactcagaccatgcttccgctggactcctttgtcaccgggacccagagcagcaccggttcccagactggttcctacagcagccagtccggcgcctatgacgtggatgaaatgaatggggacaatgaccagaacggaggcggacagtaatgaagacattgactaaatttatgagaaatatgggaatacttgttatcgtgctcctggctgtcaccattttcaatccgctggtggtcacaaaatccaatgagtactccctgattatccagttcggaaaggtggtccgggtggagaattcggcgggtccatccctcagggttcccttcctgcagtccgtgcagaagatacctaagtataagatgatttccgacctgtacccaagcgatgtcaccacaaaggataaaaaggtaatgactgttgactcctttgtcatatgggatatcaacgatccggtgaaatatctggcgtccctaaacgccagcaaggaaaaggcggaggtcagactggggaacgtggtatataactccatcaaaaacgtactttcctccaccaaccaggcggatatcatatcaggccgtgacgggaacctggctaagaccatcacggagaacatcggtgatgccatggattcctacggcattcacatctacgcggtggagacaaagaagctggaccttcccgactccaacaaggaatccgtgtaccagagaatgatatccgagcgaaacaacattgccgcccagtatacggctgacggcgattaccagtcatccctgattaagaatgagactgataagacggtgaaggagaccatagccaaggccaatgcggaggcagagaaaatcaaggcggagggcgaggccagatacatgcagatattaagcgacgcctacaatgacgaggcaaaggccgacttctataattatgtgcgctccctggatgccctgaaggcttccatgagaggggataataagactgttatactgaacgaggacagtgagctggcgaggattctctccggaccatggtagaatgggacactgtcctgtctaaagatacggttccatataaagacgctgtttcatagatactacactatgtaaataggtacaaacgggatcttaacgcaaagcataagcccgtcagccgctgtaattgaggggctgacgggcttatgaaatttatatggccggtcaatcagagagacggcttaccatccgtgagaggcaccggagaaattcctcctcttccttggaaaagcggtagccgcttctgtaaatcagcaggtccttgtggatgttcccgggataactgcatgtcttttgaatcaggcctgaggaggtgagacagccgtagggcacaggcgaagtccacatataggcaccgggcagctggcgcagcagctcaaactggcttcccctgtcatagatggaaacggttttcttggagttgcctccggtggcagaggcatcctgggcctcaaaggtaaaggaggggttctggatgtcgccctggacgatttcaatgtaatcggtaaaatccaggtaagtcagattgtccccggaggccaggggatggccggaggacataaggacattgcaggaaaattgccacagctccttccactccaggttctcatcctggagaagcttcatataataagattcataaagggcctgacagcgtatgatgcccacgtcgaaggtcttgcccgacacgccgcggataatgtccctggaattggtttccatgtaatgaacattgacagagggacagctgtccatatttttaagaaattcagagaaggcataggaaatataggtggctctgggaacgcacagattcacctccagtgctttttcgctgttctttacgcacagggcctcgatctgttcctcttgcaccaggattgcctttgcatagcgcaggaattcctccccctttttggtgggaaccatcccgcggctggtcctgtcgaagatgtcgcatcccaggtcccgttccagctcacggatgattttgctcagatggggctgattcatataaaaattctgagccgcctttgtgatggacccagttttttctacttctaccgcatatttcaaataagagagattcatagtacaactcctggatgatttgtgttataatgtccacgaagcccgtgaccgggacagagggcagtgcagaaaatgcattctatccacctaccagtatatactacgaaatcacatttgaaaagctaaaataacagggggacaagatggataaacttgactataagatactgaacatcctaaaagagaacggaagggaaacagcctcagacatcagcaaagccattcatttgtctgtatcagccgtactggaccgcatcaagaagatggaagagtccggcataatcaagggctatacggtaagagtggatgccaaggctctggggaacgatgtcacagccttgatggaaatcagcctggagcatcccagattccatgactccttcacggaggttatcatggaccaccctaacatcctggactgctactatctgaccggagattatgactttgtgctgaagatatcctgcgcctcctctgatgagctggagcgcatccaccgcaccatcaagagcatacccggtgtatctgccaccaggacccatttcgtgctgaaggaaatcaaaaacatgtattccgccataccggaagaagagaagaggcggttttaacagcatgttccaatgagaactttattaaaaaggagattacatatatgaaaacgcttggttattataatggaaagtacggcgaactggagaatatgagcgttcccatgaatgacagggtatgttggtttggagacggcgtatatgacgcaggtccctgccgcaattacaagatttttgcaattgacgagcatgttgaccgcttcttcaacagcgccggccttatcaggattcaggtgccatgcacaaaggcagagctgaaggcgctgcttcgggacctggtaaataagatggacaccggagatctgttcatttacttccaggtaaccagggggaccgctgtcaggacccatgaatttccggagaatgtaccggcaaatctctgggttatgttaaagcccatgggaacaccggacctgtataagaagattcgtctgctcacccaggaggacacccgtttcctccactgcaacatcaaaaccctgaatctgctgcccagcgtcatggctgcccagaaagcaaaggaagcaggatgccaggaagcagtgttccacagaggcggccgtgtgacggaatgtgcccatagcaactgccatatcttaaaggacggaattctctacacggctcctgccgacaacctgattcttccgggtattgcaagggcccatctgattcgcgtttgtaagaaactggaaattccggtaagcgaaactccgtataccctgaaggagatgatggatgcggacgaggttctggtgacatcctccaccaaactgtgcgtggctgccagtgagattgacggcactccggtgggaggcagggcgcctgagacacttaagaacattctggacgctgtgatggatgagtacatggaagagaccaaagcctaatgcggctgccttgacttttacagggccgggtgctagaatgtaaggcatgaaaaatataggattaaagacaataataacagcaggtttgattatcatgtgcacggcttggctggcaggatgcagcaagaaagttgcggatcctgtcaccaggtcgtcttttttgttgaacacatttgtcaccgttaccttatatgatacagaggaccagaccattctggacggctgcatgacattgtgttccgactatgagaagctgctcagcaagaccctggagggcagcgagatttataaactgaaccaccgcaggccgggtgagaggaccgtcaccgtatcggagaaaacagcccaggtactggcggaggggctggagtactgccgcatgtcccggggggcctttgatataaccatagagcctttgagctccctgtgggattttacgggcaagacgccccatgtgccgcccagggaagagattgaggcggatctgaaaaaggtgggatatgaaaatgtaatcctggatggcaggcagatcaccttcctcaatgacgagacaaccattgacctgggagccatagccaagggctttatagcggaccagatgaaggcatacctagaagataagggagtggaaagcgcggtcatcaacctgggcggaaatgtgctctgcgtgggagaacggccggacggcactccttttaagatagggcttcagaggccgtatgccacccatacagagactgtggccgcactgaaaattgacggcatgtccgtggtttcctccggcgtgtacgagaggcattttgtggaggacggcgtcaactatcatcatatactggatccttctaccgggtatccatatgaaaatgggctgacccaggtatccatcatttcacccaggtcagtggacggggatggactgagcaccacctgctttgccctgggactggaagaggggaccaggctcatagagtcaatggaccaaatctacggcatttttcttacggaagacggggaactccattacaccaggggggccgaggatttcctgtacagataatggttttttctttacaattccatgatgctaccatataatagaagggattattgctccagggcttgtgcgcgcgcactctggaacagggcaggagcagaagatgttacgtaaaatatgggaaaaatgtgttaactatgagacgataagctacattatatgcgggtttctcaccacggcagtcgattttgcggtatacgccctgctgaggaagattgagataggcgtaggcctgtcccaggccatgtcatggctggcggctgtgctgtttgcctatgtggtgaacaagcttattgtgttccgcaattataatctgaggccttcctatcttgtgaaggaggtgggagcatttgtggcggcccgggcgttctcaggagccgttacctgggtgctcatggtggtcatggtaaaattaggcggtgacaggggaatgctgtatgagctgttctgcaaattcacttcctctgtaatcaacatggtactgaactatattttcagcaaactctggatattcaagaataagcctgaatagagaaaggtgactgtgatggaacgtgaagagatagaacgggttgaacgggagcttgacgcaatcctgaagcttgtgcagccggaaccgaccatacaggataaagcccgggaggaagcgctctcaaaggagccggtttccggcggggagaagatgacatcagaggaatatgatccggaagaggatgcgtcggataattatgcagcagataattatgcagcggacagttatgcattagataagtacacatcagacgaatatacatcagaggaagacgaatacggaatggaagaagagaatgagactgccggacaggacaggcagcagtacgataagagagaaacagggatgttacggacaggaaacaggcgcggccttcggctgttaaagccttcggacggtctggtggcagcattttttgtccccgtggtggccatgattatcatatttgcccagagaggtatctttccatttggggaagagtgctttctcaggacggatatgtaccatcagtatgccccgtttttttcagagttccagtataagctgacccatgggggaagcctgctctacagctgggatatcggcatgggggtgaatttttcagcgctctatgcctattatctggccagcccggtgaactggcttctgatactatgcccgaaaaagttcatcattgagttcatgaccatcctcattgttctcaagacaggactgtccggtctcagcctttcgtggtatctgaagaaacattttggagttaataatttcggcgtgggttttttcggtattttttatgccctaagcggttatatggctgcctacagctggaacatcatgtggctggactgcatcatgctgtttccgataattcttctgggactggagcagctggtgaaggagaagagggggacgctttactgtatcaccctgggcctctctatcctttccaattactatatttccatcatgatttgcattttcatggttatttatgtgattgcccagatgatactcaatccgccaaagagctttggagcgtttatgggaacagggctgcgctttgccttttattcccttctggcaggcggtcttgccgcggtggtgcttttgccggaaatttatgcgctgcaggtaaccgcgtcaggggattttgattttcctaagacattttcctcctatttttccatctttgatatgattgcccgtcatataggaaatgtgggaaccgagatagggctggaccactggccgaatatatactgcggtgcggcggtgctcatgttcttccttttatatctgggaagcaggaagattaccttcagggaaaaggcggtgtactgcaccatgctgattctgttttatgccagtttttccgtgaatgtgctgaatttcatctggcatggattccactatcccaacagtcttccatgccgccagtccttcatttatattgcgctgatgctgttcatgtgttaccatgcctacattcatctggaggatacgtcctggaaatcggtatgtctggcgttttggggagctgtttcctttgtgctgctggcagagaagctggtgaataatccggaacaataccatttctccgtgttctatgtggcgctcctgttcattgccgtatatggaggtctgatttacctgtaccacaagggaaaatggagtctggatgccattcttctcactgccttggctgtgattgccattgaggctgccgtgaatactgcggtgaccagcatccctaccaccagcaggaccgcctacgtgaaagataaccaggatgtggaggagttggtgtggaatattaagtcagataccttctatcgtgtggaaaagacagacagaaagacaaagaatgacggcgcctggatgaatttcccgtccgtatccctgttttcatccacagccaatgcctcgctgtcggatttcttccgcaaaatggggtgtgagagctccaccaatgcctacagcattgcaggaagcacccctctggtggacagcctgctgtccgtgcggtacggcatatatggggaccagcagcctgccgatggactcagagatttgtccgcaagaaaagggagcatgtggctgtacgagaataaatttaccttgcccgtggcattcatgctgccatcggatgtggagggtaactggataatggattccgggaacccggcccatgtccaaaacgatctctgcgatgtgctggatactgagcatgtgctgctgcccaacgaaagcgttacagagggcaggaaacttacatttacagccgaagagaccggagattactacgtgtatgtgaccaataagaaggtgaaggaggtcacggctgtaatcggagagcagacagagagctttgataatgtggaccggggctacttcatggagctgggccgcatcaataaggatgtggaggtgcgcctggaggcaggggatgacggcagcccgactctgcaggcagaggtgtggcgtttgaaccctcaggccctggaggctgtttatgggaaaatgaaccggaatcccatggtgctgtccaggtggacggatacggagctgtcaggcagcattacagcggatacggcaggcgttatgtataccagcattccctatgataagggatggactatcctggtggacggcaaggccgcggcgccgcggaagatgtttgacacgtttctggcagtggatatcagcgaagggacccaccgaatcagtttttcctatgaaccggaaggacttgggaccggggcgtggattaccggagtcagcgcggctgtcctgggagtcactgtgctggccggaatcagccggaggaagaaaaaggaccgtgcggtaagcggatacagcataagaaagaaccacaaagagaacaaaaagagtcagaaaaaagagagcggcagcaaacaggaaaacaggacaaaagaaaatgagaaataaggagataagagccatgaaattatggggtggacgttttacgaaagaaaccaatcagctggtacacaattttaacgaatccctttcctttgaccagaaattctaccgtcaggacatcaggggcagcattgcccatgtgaagatgctggcaaagcagggaatccttacagaacaggacagagatgatattatccgcggattggaaagcattctggaagatctggataatggcaaattgactatatcatccgattccggatatgaggatatccattcctttgtggagggaaccttgactgagcggattggagaggcgggaaaacgccttcacacaggacgcagccgtaatgatcaggtagccctggacatgaagctctataccagggatgagattgacgccatcgaagcgctggtgaaggaactgctggaagaactgctggcagttatggagaagaatacggacaccttcatgcctggcttcacccatcttcagaaggcccagccaattaccctggcccatcatatgggggcttacttcgagatgttctccagggaccgctcccgtcttaaggatatacgcaggcgcatgaattactgtcccctgggctcaggggctctggcaggcaccacttaccctctggaccgggaatacacggcagagcttctgggatttgacggaccaacccttaattccatggattcagtggctgacagggattacctgattgaacttctcagcgctctgtccactatctccatgcacctgtccaggttctgcgaggaaatcataatatggaataccaacgagtaccgttttgtggagattgatgattcctacagcacaggaagttccatcatgcctcagaaaaagaacccggacatcgcagagctgatacgcggcaaaagcgggcgcgtatacggcgccctggtgtccatgctgaccaccatgaaggggatacctctggcttacaacaaggatatgcaggaagataaggagcttacctttgacgccattgacacggtaaagggatgtctggctctgttcacaggcatgatttcctctatgagctttcggaaggaggtaatggaggccagtgcaaagaacggctttaccaatgccacggatgcggcggattatctggtgaacaagggagtgcctttcagggatgcccacggcatcgtgggacagctggtacttgcgtgcatcagcaagggaattgccctggatgatctcagcctggaagagtacaaggccatcagtccggtgtttgaggaggacgtatatgaggccatcagcatgaagacctgcgtggagaagcgccttaccataggagcccccggacaggaggctatgaaaaaagtcattgggatatataaaaaacagctgggaatggatgatgcccagtaatatgatatgagattttatctcacataaaatccctcttgacggaaaaatctcttgattatataatatttacagcaaaagagttgtaaatacaacggaaagaagggcgaatatggaggaatggctgcctcttgtgaaaaaatctccgctattttacggcattaatgatgacgagctctatactctgttaaaatgctgtgcctcggagcaggtgctttatgaggacggggaatacatcttccgcatgggagaatccgtcaatacggtgctggttctgctgaggggaaaggcatgtgtcatccaggagaatttctggggacatcaggaacacatatatcatataaaggaaggggagctctttggccaatcctattcctgcgccaggaccccggtgctgccggtgagcgtggtggcagagggaggatgcgaggccctgttcctcaattaccagcgtatgattacattttgtcccctggcctgtgatttccataccagattcatacacaacatgctgcgtctggtgtcggagcataatgtgaagctggaaaataagctggagcatgtgtgccgcaggaccaccagggaaaagcttttatcctatctgtcagagcaggccatggcaaaagggggaagagattttgacataccccataaccgccaggagctggctgagtatctctgtgtggaccggagcgccatgtccagcgagctgagtaagatgcgggctgaggggatactggattttcagaagaaccactttgtgcttcatgacagagatacgggggagcgcggggaaggggcttaagggcaatccatatatcagaacaggtatttattaaaaaagggagacaacaggcaggcatgcagtgttgtttccctttcataatttgacacaacctcacatatgactcacattactttgggtaggcagcattcaggcaacgcactgccgcctctttggatatcaggtttacagctctggaatcatcctttctggtatagtagccggttccatcctcggtgagacttccaatcaacaatgtcaggccgccattcgtatctccgctttcataggtccaggaaagagtcatagttggatcagacaggccatagctgcttaattcttcatcgctggctttatatgatacgcaggactggaatgacaaaccgcttatggtatccgccagattattaagagcgccattgtcatccaggcggttggactcgtccgccgcagaatccttgtaccaggctatattgcccgcgtcatccacggcctttttacagaaccggctggtctgcccgttcctggaaacagtgatttcccggatgtcggcgcccgccacatggggaagggattctgtctcgacaaaatcgtaaagacccttggcagctgtctcggtcaggtaactgccgatcgtataaatctggctgtccccttccatggctgcgtagtactgggcagggggctgggaaccgtccgagcccgcacccccggtaccgggaacctggcttcccagcagtatggtatgggaggaaccgtcaggggaaacggtatcaaaccgcacggaagggttatccaggccatatgcttccggagaatccgcgccttttaacttccgttctgcttttaagtgggacagggtatccgccagggtagtcagtggatattgacggatagggcagtccttatcccctttatagtaccaggtgccgccttccagggtaaaagacagacttttgtcatcctttgtccaggacagggaagatagctccggaaggtcagtcatatatacagagtcgttttccggagacagagcctgtgctttggcattcctcccctgctgccaggtgatggctccataggcagcgcagagaaggatcagggctcccagagcgggaaccattggccgtatatgtttcttcatgtcaaacctcctcgttatgagcatttagtgaccgtattatggtcacttacgtgcgatacatgccagctccacttggtgaggtctttcacgaacctagtggagtggcccgttatgagcacttagtgaccgtattatggtcactaagtgcgatacatgccagtatgttttaaagcttccggcgcttcagccagattacaaagcctgcagccaggaaaatgaccggaatcacaataatgaacagcgcgctccacagtccggcggatgttaccatattataggtaatatccaggcttttgccggggatggacaggggcgttactccgggcagtccattggtcgcggcgttcatgaacaaagtcaggttggtgatgctggggaaacgtgacagaatggaatcatcaatcatgcttggcgccgtgataacggtaagcatggaggatgtgccctcttcctcgtttacagtttccgtggccacagctcccagcacataggccccctgcgtcttctcctgtgtgagagggtccgccagaaacgcggaatcagaggtggtaaggaagggctggaccgtaatgtgctccgatggattttcctgtatggtcattccggcgggctggaccagaagggctgccgcggaggagtcgattcctgagagaaggctgctggcaaagtcgtaatccggaataacattaaagggattattgttgtagaaatgctggggagccgggtcagccacaaatccatttttcaggtccattccgtactgggaaatgaaatcggtcagattggccagggtatcctgggtacagcccgcaaggagcagcatgcggccgccgtttttcaggtaatcagtcagcatttctttttcatccgcggagatatccctggcaggggcattcatgatgagaaggctgcagtcctggggaatggctccctgggtgagcagattcagttcggttacattcatgccggatttatccatggcatctgctgcggctgatgcgagggcagcttcgccgtgtccggtcagagtatatacagcagcagccgtatcgcttgtgacatagcggatggcgctggtaatctgtccttcgccgtcaaaggctgtttccttgatttgcccgtactggtagtaaaccatggggtcaaactggattatatcgtcaaatgaaatggtagtcttttttccggtggactcacaggatacaatcaggttgccgggttctgtgtccagtaaggcaagtacgtccgggtgaagcactgggtcattggcttccaccgaaatatgcggagaaaggtctttatacagttctacaaaggatggtatcctctcatccacggagttgggatcagctacgatgtgtatggtaacgtctctgtccagctgtgcgagaatgtcccgggttgtatcacccagggtaagaattttgctggaacttaagtcgtgtttcaggtatttggcaggaagctttcccactatcaggttgagtacaatgacagcggcaatgaccacaagggtgaacagtgccatatagctgccttttttaaattttctggtcatatgattcaactccatcttcttttctcgattgactgaacagtcaggaacagcaatataccggccacactcagataatagacaagaccgttgacatccagcatatggctgctgacaatgccgtcaaatacatctgtcaggacgatttttcccagaagtccggtcagggcccgttcaaacatgctctgcttcaccaaaaagattcctataaggactgctgccccggctgcttccagtccgagggaaaagggaatatggccggtcagccggtatatgataaaacaaacaagggtccacagaatgagaaaaccggccagcgaacctgctgcggtaaccggtataaagtttaaaagccctggccagaggatgctgagcagcagtatgccgaaggtccctgcagcggctatgagctggctttccgtgagggaagagatgaaaagcccaatggcaatgtagacacatcccaaaaggaagaaggccagtatggatgcatagtcctctgtcagataggcggtcccggcgcttcggatgatgagggggcaaaggcaggcgatggacatggggacggcgaaaacagtgaccatggaaagaaattttcccatgacaataccccatacggatacgggggaggtcagcagcagctggtcggtccgtgccctgtgttcgtccgacatgctccgcatggtcagaatcggcaccgcaatcataagtatcatcaggatggaattaagtgtataggaaaaataggggtaaccgttaatcatattgtagaccatgaaataaatgcccatgaacatggtcatgaaagcaataaaaacatagcctgtcatggagcagaaataggatttcagctcccgcttatagatagctctcattgggaatcctcctcctttgattggtctgtggggtctgtgccaccgctgtcctcccgggattttggggagtcctctgtcagctccagaaatatttcctcaagggatgccttggagggagccatggacaggatgggaaggcggtgattggctaaggcgtaaaacatggtttcgcggatatctgtttcccggtcgggagactcggcgctgtctgaatcaatggtatctccgcccccgccaaactgcagattcgcaacacaggtgccatcctcgctgccagcctccatacgctctatggacagtccatgaatttcctccagcacaggcctcagtgcctccgcactgccttttaccgtcagctccaggcctgcggcgccttttaaccgctgttccaggttttcaggagtatcgctggcaatcagctttccgtgggcaatgatcatgatatggtcgcaaacagcacttacctcggacaggatgtgggaactcaggatgacggtgtgttgtttgcccagacctcttatcatatcccgtatctcaatgatttgtttggggtccagtccaacggtaggctcatccaggatgatgacagagggctttcccaaaacggcctgggccatgcccacccgctgccggtagcccttggacaggtttcggatcagccgtttcctgacatccgtgattttaaccaggtccatgacctcctgtatggcgtccatacgccctggtttcggcagttttttaatacaggccgcaaactccaggtattcgtccacggtcatgtccatatacagaggcggaatctccggcagatacccgatgcgtttttttgcggcttccggctcctccagtatgtcgtggccgtctatgatgacctggccctctgtggcgcccagataaccggtcatgatgttcatggtagtggacttcccggcgccgttagggcccaggaaaccgtatatctggccgtcttccacccggaaacttaaatggtccactgccagatggccgccgtaatctttcacaagatttttaacttcaatcactgaatgtgtcctcctgtcagttttttataatatactcactaaacagttttaaaattaaaatgtgatgaaaatgtgtttaaattataatctttttataacaattgtttttaaatttgcataataacgcagagaaccgcaaaatgttgcactgatttttgcgagaaaaagtattgccctgtatggatggaattggtataataaagggcagttggtaaaaaaataacatctatgatgcgtgggcccctttgggggcaccggaatggagggaactatgaatcagattgataccatgtcagtcaatgcaatccgcgttctggcagcagatgctgtacagaaagccaaatcaggccacccaggacttcctttgggagccgcagccatgtcctttgagctgtgggcaaaacatatgaatcataatcctaagaatccaggatgggagaacagggatcgtttcattctttcaggaggccatggctccacactgctgtattccctgcttcatcttttcggctacggccttacaaaagaggatatgatgaatttccgtcagatggattccctgacaccgggacatccggagtatggccatacagtaggcgttgaggccaccacaggcccgctgggcgcaggcatgggcatggcagttggcatggccatggcagagtcccatctggctgctgtgttcaacaaggacggatatcctgttgttgatcattttacctacgtgctgggcggcgacggctgtatgatggagggcatttcctctgaggcattctcactggcaggcaccctgggacttggcaagcttattgtattttatgattccaaccgtatttccatcgagggaagcacggatatcgcatttacagaggacgtacagaagcgcatggaagccttcggattccagctgattaccgttgaggacggaaatgatctggatgccatcggcaaggcaatcgaggaggcaaaggcagataccacacgtccatccttcatcaccgtaaagacccagattggctacggctgccccgcaaagcagggcaaggccagcgctcacggcgagcctctgggggatgacaatgtaaaagccatgaaggaattcctgaactggccgtccatggagcctttctatgtaccggatgaggtatatgccaattataaggcatacgctgagagaggcgctgagacagaggaaaaatggaacgcattatttgcggaatactgcgggaaatatccggagatgaaggaattatgggataaattctataatccgaatctggctaatgatgtttatgacagtgaagactactgggcatttgaggacaagccggatgctaccaggagcctgtccggcaagcagcttcagaagcttaagaacctgatgccgaacctgattggaggagcggcagacctggctccgtccaccaagacctacatggctgacatgggcgatttctccaaggataactatgccggacgcaacctgcatttcggtgtccgcgagctggccatgtccgctattggaaatggtctcatgcttcacggcggcctgcgggcattcgtgtccaccttctttgtgttcagcgattatacaaagccaatggcaaggctgtccgctcttatgggcgtgccccttacctatgtatttacccatgacagcatcggcgtgggagaggacggacctacccatgagcccatcgagcagctggccatgctgcgcgccatgcctaacttccatgtataccgcccggcggatgccacggagacagctgctgcatggtacagcgccgtatcttccaaaaagactcctacggccctggtactcacaagacagaacctgccgcagctggccggatccagcaaggaggcattaaagggagcctacatcctggaggattccgcgaaggaagttccggatgccatcatcattgccactggttccgaggtggagctggcagtaggtgcaaaggccgaactggcaaaagagggtgtggatgtgcgcgtcgtcagcatgccgagcatggacgtgttcgaggagcagcctgaggattacaaggagaaggtccttccaaaggcagtgcgtaagagagtggcagtagaggcgctgggcgatttcggatggggcaggtatgtgggccttgacggaaccaccgtcaccatgaagggatttggcgccagtgcgccggcaggacagctctttaagaaattcggatttacggttgagaacgttgtggcagccgtgaagtcactttagacataatacaaagtgcattggaagtttaaaccggccccatagaatttgatcactgccggcacgagatacccgtgctgctttcagacccgttcagcgcttccggtaaggatgtggcggcattttcctgccgtacaggctctgtcatactgattggcatttacagccgggattccttccggtccctctatgattccaccaccttcggggacaatgcatcctatatgattaccactgattcagggctgattctctcacgcgcccatgtgaacagggaacagggggagacccttaatctgtttacatatatcagcggcagcgaccgtcaggcggtcctggaccttaagagccggattcggaaggggaagtgtgccagcggaagcatgaagctgcattttatccgccctgatgcccaaaaggatattgtgctgtcccttaacgcttatctgattgcggaacaggacataacctgaccgatgcggtgagagcagaccagtccagtgtgttcggcggcatggtgattccctccggtttcacctgtaccattacctatgaaccggtggagggaaacgcatatggaggaaaggtggaaatcagtgacgttcgtctgccaaacggagagccggtggaccctgaagcctggtatacggtgagggcacggactatgaactaaatatggcaaaggcatagagaaatgccctggagatggaaaatccgtatctccggggcattttttaaaagcgtattatactcatgcatcactgcttatgtatcatttatcatttgctatataatgttactcattatttaccgtcttggttcccgtcctctttactgtcccttcctggcagattccacctcagccatcttcatggcccttaccttaaggggcagtccgaacagggtgatgaagccgtctgcgtcatgatggtcgtacaggtcgcctgtggtgaaggaagccagggactcgctgtataaggaatatggggatgtggttccggccttgatgatattgcccttgtacagtttgaatttcacttcgcctgtcacatattcctgggtggactcaacaaatgcctggacagcctcgcgcagaggggtaaaccacttgccctcatatacaatctgggccaacttatcagccatggtctttttggtctccatggtggcgcggtctaataccagctcctctaactgctgatgggcttccatgagaatggttccgcctggtgtctcatacacgccgcgtgacttcatgcctaccacacggttttccacgatgtccacaataccgatgccgtgttttccgcccagctcatttaacttgcggataatatcggaaaccttcatcttctgtccgtttacgctggtgggaacgcctttttcaaaggtcatggtcacatactcgccctcgtctggtgccttttcaggagtcacgccaagtacaagcaggtgctcatagttgggctcctgtgacggatcttctaactccagtccctcgtggctgatgtgccataagttcctgtcacggctgtagctgctgtctgcggagaagggaaggtcaatgccgtgctgcttgcagtattcaatctcatcctcgcgggactgcatggtccatacatcggtcatacgccagggagcgatgattttgatatccggggccagggccttgatgcccagttcaaaacgaatctggtcattgcccttgccggtagcgccgtggcagatggctgaggcgccttctttacgtgcaatctcaaccagtctcttggcaatggcaggacgggccatggaggtgcctaagaggtatttattttcatatactgcatttgcctttacacagggcatgatgtaattgtcgcagaaatcatccactaaatcttcaatatataatttggaagcaccggataatttggctctctcgtccaggccgtctaattcgctgccctggccgcagtcgatgcagcagcagatgacttcatagccaaaatgctcctttaaccacggaatgattgcggtggtatccagtccgccggaataagctaaaactactttttctttcatattaatatcctcctgagattgctgtactgtttgaactttcataaatatacaacattatgtgataaaatgcaagtgctaaataaaattttttaaaatatgttgcatattatgcatttgtaatgtataattatgaaatccgaaggatgaccaggaaatagggtccgtggaaatgcttcttttcatttaaagaaaaactgactataatgaaggcagcagccaatatttataaatataaggagatacggatatgattaaggcaggtattatcggttccacaggatatgcgggaggagagctggcaaggctcctgctccagagggatgacatagagattaaatggtatggttccagaagctacatagaccagaaatatgcatctatctaccgcaacatgttccgaatcgtggacgacgcgtgtatggatgataatatgaaggagctggcagaccaggtggacgtggtgttcaccgcaacccctcagggcctgtgcgcatccctggtggacgaggacgtattgtctaaggtaaaggtcattgatttaagcgctgatttccgtattaaggatgtgtctgtttatgagaaatggtataagctgccccatgtatccccccggttcatcggtgaagccgtgtacgggctgcccgaaatcaaccgggaaaaggtgaagagggccaggctcattgccaatccgggatgtttccccacctgctcctttctgtccacgtatcccctggtaaaggaagggctcattgaccctaataccatcatcattgatgccaagtccggcacatccggcgcaggcaggggaagcaaggtggacagtctgtactgtgaggtcaatgagaacattaaggcttacggagtggcctcccacagacatacgccggagatagaggagcagctgtcctgcgcggcaggaaagccggtaaccatcagcttcacccctcatctggtgccaatgaaccggggaatcctggtgacggcctatgcatcccttacaaagaaagtgtcctacgaggaggtaaaggctgtatacgacaagtattatagggacgaatattttgtgcgcgtcctggaaaaggatgtggtgccccagacccggtgggtggagggcagcaattttgcagatgtgaatttcaagatagacaccagaaccaaccgggtggtgatgatgggagccattgacaacatggtcaagggagcagcaggccaggccatccagaacatgaacctgatgttcggactgccggagaatacggggctgaagcagattcctattttcccctgatggttcagggtattggttcagatataccctcaaaaggataaaagagggaaaaagaaaggaaacatgagctcatggcaggtacgatggatatccttatccgcgaaatgacaatagcggattacgaccaggtttacggcctgtggacagaaatcaaaggctttggaatcagaagcattgacgattcatgggagggagtggagcggttcctcaggaggaatcccactaccagcgtggtggctgtccagaacggtcatataataggaaacatcctctgcggccatgacggcaggaccggttgcttttatcacgtgtgcgtggcgccgggatacaggaaacacggcatcggataccgtatggtgcgctttgccatggaggccctgcagaaagaaggcgtcagcaaaatcagtctgattgcgtttaaggagaatgaggtgggaaatgcgttctggcagggaatcggatggagggagcgggaggatgtgaatacatacgaattcatactgaatgaggaaaacatcacccggtttgtacggtaaaatgaaaggttggtgcaccgtggcaaaggccggtgcatctccatatgacataaaggtatggaaatgaatggaggaacgagagatatggatgagtcaggaaagggaatcaaaatcataaccggcggcgtcacggctgccaagggctttaaggctgcttccacggcagccggaatcaagtataaggaccgtcaagacatggccatgatttacagccaggagccctgcaggtcagccggcaccttcaccaccaatgtggtgaaggcagcccccgtaaaatgggataagaaccaggtgacaaacggagtgcctgcccgggcggtggttataaacgcgggaattgccaatgcctgtaccggagaggaaggcatgggatactgcgggcagacagcgggggcagcggcccaggcactgggaattcccgctgaaagcgttctggtggcatccacaggcgtcatcggcatgcagcttcccatggacaggattacggcaggggtcaaggctatggctcctctgctggacgaaagcctggagagcggcaccggcgcatccagggctattatgaccacggatacaaagaacaaggaggtggctgtccaatttgagctgggaggaaacactgtgaccatgggcggcatgtgcaagggttccggcatgattcatcccaatatgtgcaccatgctgagctttgtgaccacggatgcggctataagcaaggagctgctccaggaagccctcagccaggatatccgggatacatacaacatgatttcagtggatggggacacatccaccaatgacacagtcctccttctggcaaacggcctggccggcaatcaggaaatcacagagaagggtgaggattaccataccttttgccgggccttaaagattgtaaatgaaacattggcaaaaaaaatggcaggcgacggcgagggctgcaccgcgctgtttgaggtgaagatagtgggggcagagacaaaggaacaggccagggttctggccaagtcggtcatctgttccagccttaccaaggcagccatcttcggccacgacgccaactggggaaggatactctgtgccatgggttactccggggcgcagttcgatccggaaaaggtggacctgtattttgagagcgcagcaggaaagatgcagatcattaaggacggcgtggccgtggactacagcgaggaacaggccacccggattctgtcagagcctgcggtgacggctgtggctgacatcaagatgggggatgccaaggccactgcgtggggctgcgacctgacctttgactatgtaaagattaatgcggattaccgttcataatatgagcgctaagtgctcataacgagaggagtgggaggatgaatttggaaccgatgcagaaggcggccgtgctcattgaggcactgccctatatccagcgttttaacaggaaaatcgtggtggtgaaatacggcggaagcgccatggtggatgaggagttaaagaaaaaggtcattcaggatgtggtgctccttaagctggtaggctttaagcccatcattgtgcacggaggcgggaaggagatcagccgctgggttggcaaggtggggatggaggcccggtttaagaacggactcagagttacggatgaacccaccatggagattgccgagatggtccttaataaagtgaataagagcctggtacagctggtcagtgagctgggcatcaatgcggtgggaatcagcggcaaggacggcatgatgcttaaatgccataagaaatacgccggcggcgaggacatcgggtttgtgggagatgtggaggaggtgaatcccaaaatcatatatgatttgctggaaaaggattttctgcccatcatctgccccattggttttgacgaggacttcctgagctataacatcaatgcggatgacgcggcctgcgccattgccacggcggtggaggcagaaaagctggccttcctcacggatgtggagggcgtttataaggactacgaggataagtcctccctcatatccgagatgacggtggaggaggcccagaactttgtggacagcggaatgctgggaggcggcatgcttcccaagcttcagaactgcattaacgccataaagaacggcgtatccagggtacatatcctggacggacgcattccgcattgcctgctgctggaaatctttactgacaagggtattggaaccgctatctataattccgaagaagacgagaggtattatcatggctgagaaacagttgatggaacgggcggaacaggccctttataaggtgtataaccgtttccctgtggtatttgaccatggggagggagtgaagctctacgatacagagggaaatgagtatctggattttggcgcgggcattgcggtcatggcgctgggctatggggatgaggagtatacaaaggccgtggaggaccagcttcacaagctgacccatatctccaatctgttctacaatcagccctccattgaggcgggcgagaagctgcttaaggcatcccatatggataaggtgttctttaccaacagcggcaccgaggccattgagggcgctcttaagattgcaaagcgctttcactataataaacttcacgagaccatgggagacggctgctgcggctgtgaggacacggagccggacatgaccggggaaatcattgccatgaatcattcctttcatggaaggagcctgggcgccctgtccgtcacaggcaatgcccattaccaggagccctttaagccccttgtaccgggaatccgcttcgctgatttcaacgacctggacagtgtgaagaagctgattaacagcaggacatgtgcggtaatcatggagaccatccagggagagggaggtatctatcctgccacggaggaattcttaaaaggagtcagggccctgtgcgatgagcacgacctgctccttatactggatgaaatccagtgcgggatgggccgttccggggaaatgtttgcctggcagcattacggtgtgaagccggacgtgatgacagtggccaaggcgctgggaaacgggcttcccataggtgcattcctggcatgcggcaaggcggccggtgccatggttccgggcgaccacggcaccacctatggcggcaatccactggtgacggcgggagccagcgcagtgtttgatatttttgagaaacgccgtatcacggaccatgtaaaggagattggcgcctatctctacgagaagctggaggagctgtcaaaggaatttgactgcgtcaggggacaccgtggaatgggattgattcaggggctggagttctctgtaccggcaggacctattgtgtcaaaggcgctgctggaacagaggctggtgttaatcagcgccgggaccaatattatccgttttgttccgcctctggtgattgaaaaggcggatgtggatgagatgatgaaacgccttagaacgtgtctgaaaattgctttctgacagcgtaaggaataggtttaaggtaagaataagccatagggcaaaggaagatggcacgccaaaggcggcaggaaatacctgtgatacaggatcctgccgcctttttatatggtttgcccggttccttaagcaaatctttcgttttcatttatgaaatgttatgaaaatactagatgaaatatttatggcaaacctatataatagccttattaaatgaacaacaatagcgcgagtgtttatttttgttgtataagtataccatatgtgatataattgtattaatataaataatacactatccgctggtattaaggagggagtcatgggaacagagaaaaaagccggtgattcagaggaaatccaggttttggaaggcatttcagagtcagaggagattgaccgccgcgtggaggagctgatggctccggaagaggatggaaacggaaagaaaaagaaaaaaagcataagaccggacaccggacaccgtacgccggagggaggattccaccctgtccggcgctttaagggattcagccggaaacgtaagataatcacggtcctgctactggcggcagtggttttgtttggattctcccgcatgtcaggaggaaaaaaggatatgggaatccctgttgccgtgatgcctctggcaaaacaggacgttcaggaaaagctcacggtaagcggtcctgtatcaggaacagacagcgtggacgtggtgtccaatattcacgcggaaatcaccgccatgaatgtgaaggaaggcgataccgtgacaaagggacaggtactggccgtggtggacagcacggacctggagcgggaagtgcagattgcccagaacgcctacgacctggcggtggctaataagcaggaaaaggataaggaagcagctcttggatacgaaaaggcagtccaggatttccagaaggccagcctggatcacagcaggaacagccagctctttgccaccggcgacatttcccagatggaactggaaaccagcgccaatgccctgaatgatgccagaaggcagatggaaggctacacggttgagaacggaagaggtgttgcggattcatcctacggcattcagatacagaatgcggcctttgatttggagaagaaaagggaagaactggataatacccagataaggagcaccattgacggcaccgtggtccgtgtcaattccaaggtgggtcagtttgcggataaggtggaggatgataaacccattctcagcattgagaacctggagcagctggagctggaaatcaaggtgagcgagttttccatcggcaaggtaaaggtaggacagatggcgaccatcacagcggatatcctgggcggtgagaccgcggaaggagaagtcataaagatatcgcccacaggcgaggaaaagggcggcggttccacggagagggtcatccccactaccatacgggtggacggcgggagctcgaagcttattgcgggaatcacggcaaaagcagaactgttaatcagggaggcaaaggatgttttcgtagttcccacatcggcgctttttgacgacggggaagtgacatacatagccattgtgcaggatatgaaggtgaaacgcatacctgtgaccatgggcgtggacggagacgtggtggtggaggtcattcccgctgacggcactgtgctggaggagggaatgcaggtcatcaccaatccgggccctcatctggctgacggtgctgccgtgctgatcaccaagtagcaggaggcgctgtatgaataagtggatgaagtttttgcacagggacagcataatgcaggaagatgtccatgacggccccctgattaagctggagaatctggtcaagatatatgataccggagccatcaaggtactgggacttaaaaagataaaccttaccatcgaaagaggagagtttgtggccattatgggacactccggttccggaaagtccaccctgatgaatatacttgggtgcctggaccggcccaccctgggccactattacctggacggcattgacgtggcggacatgacgccggaccagctctccgatatcagaaaccggaaaatcgggtttgtattccagtcctttaacctgatatccaggacatcggcccttaagaatgtggagctgcccatgacctatgccagggtgccaaaggccaaacgggcggtcagggcccggctgcttttggagcgggtagggctgggagccagaaaggaacatatgcccaatgagctctccggtggccagaggcagagggttgccatagccagggccctggccaatgaaccgccgttgattctggcagacgagcccacaggaaacctggataccgcctcctcagtggaaatcatggagctgtttacaaagcttcaccaggaaggggccaccgtggtgctggttacccatgaggaggatatagcggcctttgcccaccgcgttattcggttcagcgacggacagatacagagtgacaagctgaatgtggcccgggtggtttcagggaatggaaagggaggagagcaggatgctgattgaaaacatgaagatggcgttttcagccatccggtccaataagatgcgctccgccctgaccatgctgggaatcataatcggcattggttccgtcatagccatcgtgtccatcggagataccatgcggggacttttctcggatttgtacaaggacgtgggtattacccaggcatatgtttccattggttactgggtggatgatgtgcggcagagcgattactttaacctggacgagatggagcgggccagggaggcgtttaaggaccaggtggcttatatagacagcagcgcctttaccagcagtgatgcagagtataagcggactaagattaaatttggttatcagggaattgattacaattaccaggacgtccagccggtgaatgtggtgtacggccgttatctcaacgagggagacatcctgggaagaaggaagaatgtggtcatggataccaagagcgcccagatgctgttcggcactgagaatgcggttggacggtctttcaggaccaccttatatggctctaccgacgactttacggtggtgggagtgtaccgcaaggagaccaacgccctccaggccctgatgatgggcggcagcaatgacaagggttcggcattcatgccttacaccctgctgacctggcccaatgataatttttaccagctccatgtgtacgcaaaggaagatgtgaacctggaccagttcttcagccagttcaaggcatatgctgccaagatgcacggcaggcagccggaggatatgtacatgtacacggccatgcaggaaatgacctcggtggacagcatgatgggaaacctgtccatggcagtgggcggtatcgcggccatttcactgctggtaggcggcatcggcatcatgaatatcatgctggtgtccgtgacggagcgcaccagggaaatcggcatcaggaaagccctgggcgcaaggaccagagatgtgctgattcagtttttaacggagtcagccatattgtcagcctgcggcggcattatcggagtcatactgggagtgggaaccgtatccctggggggattcctgctgggatttgcggtggtcataaaaccgggggtcatcatagttgcggtgtcattctcggcagtggtgggtatcttctttggactgtatccggcttccaaggcagcccaggcagaccccatagacgcgctgcgttacgaatagacggtcaagaagcatcgacgagaaaatcataaatcgggacaggaggaaggcaagtgagacggatgaacggtacatggaagagagcaggagccattggattggccctgatgctggtcccggcccagggtatgctgcggccggtgactgcgtgggccagcccggaatttgcctattctgcggaaaaatgggcggcgttgagggatgatgtgctggaatacggggagctggctgacctgatccatgaatacaatgccacggtcatcaataaccgtctggaatacgatgaatacagaggcaaggaccacgatgaaatgaagaatgcctaccaggacattgctgacaggctttacgattccagcgacaagatgatggattccgtcaatgaggaccagccgggatacgcggggacagcggtgggggccataagcgcccgtcttcaggctgaacagaaccaggagctggctgattcccagaatgaggacggacgggtaaagaaactggagtacgacagacaggaggccgtccttgtaaaggatgcccagacaaagatgatatcctactggcagaaggccaaggcgcgtcctgccctggaagaagatgtgaaccaggccaggtcaaggtatgaagccatggcagtgaaagccggccagggcatggccactcaggctgagctgcttggggcccgggaaaagatggaggcagcccaggcagccctggagaccaacggcagggaacgggacggacttcgcagagagctctgcgtcatgaccggatgggatcacgatgcccggccggatatcagggaagtgccggtgccggacgccggggagatggatcagattgacctggagctggataaggaaagggccctggagcagaactttacccagtcagccaatgagcgccgtctaacctttacaggcaacgggtcccagtgggatgtgatgaatcagaaggtggagacaggccgcaggcagattgcggcggatgtggaagccaagtataagcttttggagcaggctagggctgattatgaacaggccgcgggcgagtttgagctggcccgtaccggggctcagacagccgagcgcaaatacagcctgggcatgatttccaaaaatgaatatacacagcagcagggaaccatggtctccagccagtccgcatgcgacacagcgggcctgaaatacaggcaggccctggaggattacagatgggcggtcaatggccttgcacagacagagggggcataggatatggtgaaaaaatgtttactgctctgcatcggcatcctctttgcctgccagcatcctctggaggtccatgcagacgcaatgcccgacgtcattcgctatgaggaactggagactctggtgaaagcctacagcccccagatacagatggaacaggcgcagtatgacagccgcctggcacggtatgaaaatgccagagaggaaatcatggaaaccagacggcttctcagggaggaggccgaggatctggagaaggacggcgacaaagacagtgccagccagtaccgggcccaggccaagacactggaggatgcggccaaggatatggataagcagatacggtcggcccagggcagccaggcatccatgtcccttcgcaggatggaggataccgtgctctggaccgcccagaatctcatgggcacctataatacccttaaagcggaacaggaggctgctctggctcaggcagagtggaaacagagccagtatgagaagctgctgcgccaggtccagacaggaagcgcttctgccgcccaggcggaccaggcgggaaaggaagccgatggggctgccgccagggcaaaggctgcccgggacgagatggaacgggtgaagaaggaattactcattctaaccggatatccggaaggatcccagacggaaatcggtcccatgcccgcgccccggccggagcgtgtccgtgagatgggaggcagcgtcgacaaatggcgggcactgggaaacaattattccctgagggaacaaaggagcgggggagccagctccaataaagaacttcatgcccgccagcgtgatatccgccagagcgaggaggcaatgtacggtcagctggataccctgtatcaggatgtcctggccagccagactctctggaccagcgccttaacgtccatggaatcacaggaagccgcgtttcaggccgcgtccaacaagctggccctgggaatgctgtcgcgccaggaatatctggaggcaaaagcggcctacatggacgccgctgctgccaaagaaagggcagacgcaggtttccagcaggccatggatacatatgactgggctctgaaaggtttcatgacataatcattcattatttgtttcatcccttaccgcttcatcatccggtaccccactcccacgtgggtctggatgtactggggctgtgagggatttttttcaatctttttgcgcagggaggccataaagacacggagggaggccacgtctccttcccaggcagcgccccatatctcccgggttatataggagtgggtcaggacctttcccacgttgtgggccaggagacagaggagcttgtattcataaggggtcaggtgcagttcttccccgtccaggcaggcgcatcccgccgcatagtcaatggtgagcccgccgttggtaaacagggaggactggacttcctccagggactgcatatagcgcaaccgcctctgggtggagcggagtctggccagaagctcatccacggaaaaaggcttggtcagatagtcgtccgccccggcgtccagggcggctatcttatcgttgtcctcgcttctggcgctgatgacaatcatgggggtattggtccaggaacggactttgagaatcacgtccactccgtccatgtccggaagccccaggtccagcaagatgatgtcaggccgctgggaagcagcggacaggataccctgttctcccttatccgcccatgtataatggtaatcgtgcatctccagggtagtggcgatgagatttttcactgctttgtcatcctctataatcaggatggatggcttattcatgtaaggatacctccttggctggtaatgtaagccggaaaatacttccggcaggtttgttgtccaaaacttcgatggtgcccctgtgggcgctcagtattgccctgcaaaggggcagccccagtcccatgccccgctttccgtccgcggatttatgaccggtggtatagaacatttcaaaaatcttttccttggactcatcggggattccgggtccgttgtcgctgacatcaatgacagcagaggagccctcctggcggctgtttaccataatggtggagccttccggcgtgtacttcaccgcattgtccaccaggttggttatgacctgcatgatcagcctggcatccatgtcagccaggatatagtcacctatctgattcactttgatggtgtggtgttcatgacgccggttaatatggcgcatggcctcatctatgacttcctccagcagttcggtttccatgtgcagatggacgccctgcccttccatacgggtgatggacagaaggttttccaccagattgataagccacatggaatcatcgtatatatccctgtatatccggttcctgtgttcggctgtcaggctccctccatcgctcatcaggacgcctgcattgccggatatgctggtgagaggggtgcgcaggtcatgggagatggagcgcagcaaattgcttctgagctgttcagcccgggccatggcagcctcctcctcccgctttctggatatatattctttttccagcgccatggaacactgggctatgattgctactgcaaggctgttttcaaagtcgccgggaggtgtattgcccacaaggattcccatgacgccatagacagcaccggagctttgaaggggcaggaaatggtaagccgccgcgggaaacacttctgtggcagcccctgtttcctttccttcccggaagcatttccgggcagcagtcagttcctccagggtatccggggacgggccccgccctgttgcgggggacgagtactcacggaaacaaagaggggacttaaggccggcaccatcctgttcaaagcaggtaatgtcccttttgagcagcttgttcagctgtctggcggtacaggaaaggatgtccgccggggcagcggccttttggagcatctggctggtgtccaggatgacgccggagcggtaggcgtcctgttgggaaagccgcgccttttctttcatctgtacggtgtaggagctggtgaatacggctgccaggaacgtaatcagaagggtaagctgggtgcctgcgtcctctgccttcagaacgaacatgggctctgtgaatatgtagttgaacagcagtacgctggccagggatgcgctgatgctgtaccagcggctggccgtgactgccgccaccaccaggactcccagaatatatacggtaatgatattggcctgggacaggccaatggtttctaacaggaatccaacggcagtggctgcggccagaactgccatggtctttagggtgtcaaggattcgggtacgggccatggaatgaaaaacctccttcattgtttacctggacagtatatcatatctttgagttaaatgactgtatctttatagaatatttacataatctttataccggagacggttccgttatacctgctttatgcccttagtggtaagcttgaaggcactgggaggtgattatatgaagtatctggaaaggcagtctcctgccagaatcattgccattggttttctggccgtcatccttacaggtttttctttgctgatgctgccggtgtgtgtgaagccgggagtcaggcttcattatgtggacgcgctgtttacatccaccagcgctgtgtgtgttaccggcctcattgccgtggacacggccgatacctatacggccctgggccagaccgtggtggcccttctgattcagattggcggactgggtgtaccatcaaaggagctgcctgcaatgaggagccccacgccttccattaccggattccccaggaggcattttacaaggcagccattgtgacggctctgtcggccctggtggtgtgtctgggaacatttttcatgtgtatcctggagccggctgttccctttgaggatattttgtttgaaatcacttcggctttcggaatcgtgggtctgtctaccggcattacgccggggctcagctccctcagcaagcttctggaggtgctggtaatgtatatcggcagactggggccgttgaccatcgtgacgatttgggtattcaaacccactaaatccgtatcctatgcggagggaagcatttccatcggataggataggagtattgatatggctgtaaacacattttaaatggatagaggaggttttttatatggtacgaaaacagacagaggcaatgtcttatggaatcataggtctgggaaggtttggaagcgcactggccgcaaccctggccgaggcggataaagagcttatggtgttggacagaagtgaggaaaaaatcaggcaggccagaaactatacggaacatgcgtatgtggtaaaggatttgcagaaggagacgctgcgggagacgggaatacaaaactgtgatgtggtagtggtctgtatcggtgacaaggtggatgtaagcattctaaccaccctcaatgtaatcaatctgggcgtgccccaggtggtggccaaggccaacagtccggaacagggcgagattctggagaaaatcggggcccaggtggtgtatcctgagagggatatggcagtccgcctggccagaaggcttatctcaaagcgcatattcaatctctttgagccggaccagaacgtggatatatctgaaataaaaaccaccagaaagcttacaggccagtctgtcagggacgcccagctgaggaaccggtacggcattaacataatcgccatcaccagaggcagatggctgaccacagatgtcagcccggattatgtgtttcaggatgaggatacggtgcttgtgattggggagagggagaagatcaagcgtctggcggacgatttggtgcggtgatgagaaattccggttgagagctctgcgtcaaatcacatcgttgtatttttaaaagaatattggtttcgcacaaagaaaagggaaggatttcatatatctgccaattattttatacaaaatgtagaaaatgcacaaaaaatacgagatatattgacacagagttgtctattgtgatagactcaaggtgtcagaagatgacgcaattgaatagaagtataagtattcaaaacttatatatgctcaagataggttgagcgtttctaccaactaccgtaatagttgactataagttttcacatcaggtactgcccggggcgccggagacaggctgatgtggagccttaggaacagcggtggtttttttgtttgcaaaaaatgcagatggacgcccgggcccgccgctgtacgggtgaatacaagggtgcgccggtcaacggcgtatcacggaaaaggaggagcatatggcagagaattttgtattaaagggcaatatctgctacagccaggattcccgcgcactgatatgtgtggaacagggatatctggtatgtacagatggcatatcagccggcgtgtacaaagaacttccgcagatgtatgcaggctttcctctgacggattatggagacaggctgattgtgccgggtcttacggaccttcatctccatgccccgcagtattcattcagaggtctgggtatggaccttgaactattggaatggctgaacacgcggacgtttcctgaagaagccaagtacagcgatatggagtatgccaaaagggcgtataccatatttgcggaaaacatgaaacacagcgcaaccacaagggcttgtatatttgcaaccatgcacagggaggccacggagcttctcatggatttaatggaggaaaccggacttaagaccatggtaggcaaggtcaacatggacaggaacagtccggatattctggtggaggagacagaggaatccctgagggaaaccagacagtggctggcggacataaagggacggtacaggaacacggttcccattctcacgccaaggttcattcccacctgcaccgacacactgatggaagagctcaagaagcttcagatggagtatgaacttccggtccagtcccatttgtcggaaaacaagggagagattgactgggtgaaggaactgtgcccgtggtctgagttttacggagatgcgtatgaccatttcggcatgttcggcaacggcgtaaaaaccatcatggcccactgtgtgtggcctccggaaaaggaaatacagagaatgaaggaaaacggcgtatacgtggcccattgtccgcagtccaacaccaacctgtcctccggcattgcgcccgtaaggacatatctggaacagggaatccacacaggacttggcacggatgtggccggaggtgcgggagagtccgtattcagggccatggctgacgccatccaggtgtcaaagctgcgctggagactggtggatgagacactgaagccccttacggcggaggaggcattctacctgggaacaaagggcggcggcgggttcttcggaaaggccggtagctttgaggaaggctatgagctagacgcactggtgctgaacgacgagagccttaagcatcctcagcctctgagcttaaaggagcggctggagcggttcatctacatttcggatgagcgccatattgacgccaagtatgtggcgggcagcaagatattttagctgaaaactgaataggtataaaaaggacggaatggggtatcgttcttttatatagaaacagcggaaaactataggcatgaattcaaggaggtatgaagtatggagaacaaatcaaatcagggattcctggaaaaggtatttcacctatcggaaaaccacacagacgttaagacagaggtaattgccggcatcaccacgttcatgacaatggcctacatccttgcagtgaatccgaacatcctgagcgtcgcgggaatggacagaggcgctgtctttacagccactgcccttgcatccctggtcgccaccctgctgatggctgcatttgccaattatccttttgtgctggcgcccggcatgggactgaatgcttattttgcatataccgtagtactccagatgggttatacctggcagatggctctggcagccgtattcgtggaaggtcttatcttcatcgcactgtctcttaccaatgtgcgtgaagctattttcaatgccattcccatgaatctgaaacacgcagtatccgcaggtatcggactttttatcgccttcattggtttgcagaatgctaaaatcgtggtggagagcgccacacttgtatccgtattttcattcaaaggatctctggaggcaggaacatttaattccgttggaatcaccgtactgctggctctcgtgggcgtacttatcaccggtatcctggttgttaagaacataaagggaaatattctctggggaattctcatcacatggattttaggtattatctgtgaagtgaccggactgtaccagccaaatgcagagctgggaatgttcagcgtactgccagatttctccggtggctttggtattcagagcatggctcccaccttctttaagatggatttcagcggtatcctgtccctgaactttgtgaccattatgtttgcgttcctgtttgtggatatgttcgatacactgggaacactgattggcgtggcatccaaggccgatatgctggataaggacggaaagcttccaaagattagaggcgcccttctgtctgatgccatcggtacctctctgggcgctgtattcggtacctccaccacaaccacattcgttgagagcgcttccggtgttgcggaaggcggaagaaccggactcacatccgtagtggcagctattttcttcggtctgtccctgttcctgtcaccggttttcttagccatcccgtcctttgcaacggccccggcgctgattatcgtaggcttcctgatgataagctctgttttaaagattgatttcaacgactttacagaggcaatcccgagctacatcgccattatcgccatgcctttcatgtacagcatttccgaaggtattgcaatgggcgttatctcctacgtggttatcaacgtggcaaccggccatgcaaagggtaagaaaatcagccttctgatgtatgtattggcggtattatttgtacttaaatatgtattaatttaaaatatgcggcatataatgcagacgcctggaatacaggcgtttgcgcattcaagataaggaggtagagcacaccatgggaattggcaataacatgacccgcgttgacgcatttgataaagtcacaggcagtgccaagtatacagccgatttagagccccagggacttctggcggcaaaggtaatacgcagcaccatcgccaacggcgtggtaaaaagctttgatttggaagaagcactgaaggtgccgggggtagtgaagattgtcacgtgcttcgatgtgccggacatccagttccccacccccggccatccatggtccgtggaaacggcccatcaggatattgcggacaggaaacttctcaataccagggtgcgggtctatggagacgatattgcagccgttatagcggaggacgatatagcggcagccagggcagccagacttgtgaaggtggagtatgaggagtatgctcccctcctgaccgtgaaggatgccatggcagagggcgccacccggcttcacgatgaaaaaccgggaaatgtcatcgcccattcctcctttgtggtgggcgaagggacttacggggaagcagtgaaggaggagggactggtggagatagagaaggactaccggacccagagcgtgcagcactgccacatagagacgcccatctcctttgcctatatggaaaagggaagaatcatcgtcactacatccacacagataccccatattgtgcgccgggtcatcagccaggcgctgggactgcccatgggccgtatccgcgtcatcaagccttacatcggcggaggtttcggcaacaagcaggatgtgctctatgagcccttaaatgctttccttaccacccaggtgggaggaaggggcgtgaggatggagatatccagagaagagactctgggctgtaccagggtgcgccacgccattgagtttaaggtaaaggcagccgccaggaaggacggcactctggttgccaggaagttggaggcctattccaaccagggcggatatgcgtcccatgcccatgccatcgtagccaactcctccaatgagttcaagcagatttacaaggatgagaaagtgctggagtcagatgcctggaccgtgtacaccaacctggccacaggaggagccatgaggggatacgggattccccaggccgcgtttgcggcggaatgcatggcagacgacctggccctggcccttcacatggacccattggaattcaggaaaaagaactgcatgaggccgggatacgttgatccccacacccatgtaaaatgcaatacatacggcctggcggaatgtatggaaaagggccgtgaatttatccgctgggacgaaaaacgcagggaatatgaaaaccagacaggacccgtgcgaaagggaatcggaatggctatcttctgttataagacaggcgtataccccatatccctggaaacagcgtcctgccgtatgatacttaaccaggacggttccatgcagcttcagatgggggcaacggaaatcggccagggcgccgacaccgtgttcacccagatggcggcagaggtgaccggaatcacggaagacaaggtaaatgtgctgtccacccaggacacggacgtaagtccctttgacacaggtgcatacgcttccagacagacctatgtcagcggaatggcagtgaagaaaaccggcgctatatttaaggaaaagatactggattatgctgcttatatgctggagaagccacaggataccctggatgtaagggataaccacatcgtggataaggagaccggaaagcagctgcttcccatggaggatctggctaccacggcattttacagcctggaccgctccgtacatatcacggcagaggccaccagccattgcaagaccaatacatttgccaccggtgtctgcttcgcggaggtagaggtggatatgcctttgggcaaggtgaaggtgactaatatcgtcaatgtacatgacagcggaaaactgattaaccccaagctggccgccgcccaggtacacggcggcatgagcatgggactgggctacggcctcagcgaggagctgctctttgacgcgaaggggagaccgttaaacgataatttgctggactacaagcttccaacagccatggataccccggacttaaacgcactttttgtggagttggatgaccccacaggcccctttggaaataaggcccttggggagccgccggccataccggttgccccggcagtgcgcaacgcggtgcttaacgccacaggtgttgccgtggacagtctgcccatggatccccagaagatggtgaagcatttcaaggaagcaggattaatatagaaagggcggtgaaacagcatgtatgatatcgggaaattttatcaggcagcagatgtggaagatgcggtgcgcgccctagtgaaagaccctgaggcagtagtcatttccggaggaagcgacgtgctgattaaaatcagggagggaaagctggccggctgctccctggtaagcattcacgggattaaggaactggagggcataggaatggaggaggacgggaccattgtcataggtccggccaccacattttcccatattgccaataatgacatgattcagaagcacattcccatgctgggggacgcggtggacatggcgggcggtccccagctgcgcaacatcggaaccataggcggcaatgtgtgcaacggcgtgaccagcgcggacagcgccagcagcctgtgctgtctggacgcggtcctggtccttaaggggcctgacagcgttagggaggtgcccatcagccagtggtacaccgggccgggaaggactgtgaggaatcacgatgaggtgctgacggctatcaggattaagaaagagaattaccagggatacggcggtcattatatcaaatatggcaagaggaatgccatggagattgccaccctgggatgcgctgtgagcgtgaagctgacagaggataagagacatatccaggaccttcgtctgggatacggcgtggctgcgcctactcctattcgctgtcataagacagaagaggctgtaaagggaatggaaacaggggaggccctggcccaggctgtgggaaaaggcgctctggaggaagtaaatccgcgttccagctggagggcttccagggagtttaggctgcagctggtggaggagctgggcaggcgtgccgtaaagcaggccgtaatcaatgcaggaggtgagtgggatgcttaatatagtgcatatgactgttaatggaaaagaagtggagttggcagtggacccaagagaatcccttctggagacattgcggaaccgtctgggactgaccagtgtgaaaaagggctgtgaagtaggggagtgcggcgcctgcacggtgctggtggatggagaggccatagacagctgcatttacctgaccatgtgggcagaaggccgcagtatcatgacagtggaaggactgaaggggccaaacggcgaactgagccccattcagaaggcatttatcgaggaagcggctgtgcagtgcggcttctgtacgccgggactgattatgacagcggtggaaatcgtaggtacgggaaagaggtataaccgcgacgagctgcgcaaactgatatccggccacctgtgcaggtgcaccgggtatgaaaacatccttaacgccatggagcgtattgtggaggaaacgtataaggtggtgggaaaatagaagaggtatgcaggtgtggtgaaggcggcagccctgaggaagctgcggctgacacctggatatacaggattttaggataagaaacgaaggaccatagtgaaaaagaagggcgccgcggattggaagcggcgcctttctttttttaaccactcttttttactctttttttactctttttttcactcgttttttaccgcagatggttacaaacattgtggaggcagattaaaattacaaataaaataaaccagttgaaaaaatacatattttatgtaaaatatggagggggattatatgtattttaatggatatacaactggtcttacaatgacatttatgttaacatataaataggccctgatggttgaggaggacacaaagaggaggacacaaagagaaacagattctctttgaatacgggatgataggtgagcatgaatcatgtttgatataacatcagataaggtatatgtaaaaacatttggtggttttgacttgtattatcaaggtgagctgatatacttttccagcagcaaagccaaagaacttctcgcaatacttgtggactggagcggaaaggaagtaacattatctcacctggctgaaattttaaatgaaggagaacgggacgaaaccgcagccaaacaggctgtccatttagcgtggcacagactgaagcagacattgaagaaatatgggattgagaaaatcgttataaaaggcaggggaacctatgccattaataaagaagcggttgtctgcgacagctacgatatggtccgccaggtcaagggggcttctaacttttttgtgggggagtatatgccggagtatagctgggcggaggttactttgtcgaatttgataagggattattttgatgagggggagtcgtagggagcatatagtacaggtgcaatggagtttagagaacagaatggccggattttaacaggtaagttttaaacgtgtggagcgctcttatgtgagcgttcctttttttaaaaagattccccaaccccccagattggcaagagataggaacaatggtatgataggtcaacgcagatggttaagactggctgcgaaaattaaagggagaagaaagatacaataaatggaaaagagcacaataaaataatatctaaattatgacttgtctatggataatttacataagcattttcatgtgatttttaatcttctatgaactataaatccaaacaaaataaaatagaacctatatacataaattgaaaaacaattgacaggtaaacagtgatatagaatcattgctgtttttacgcaagccccatcgcttactaaaagtttatttctacaattttggttttgtgcccagtgggttgtcttttacggtttatacccatttggaattaacaaatagtaataaatatttccagaatactacaaaaattgttattatatgccatttgaaacggttttgtaacgatattgaaagcaactgagtggtatatccttacaaagaacggtggcatgcggcctgaaataacgggagaaataacgctaatggcagatacggaaaatgtaaatatatttataaagacattcgatggattcgatgtctatgtcaatggtaaaatgttgtattttcccagcagcaaggcaaaggaaatgctcgctatcatggttgaaaaacgcggaagcagtgtctccctatcccaaatgacgtatctactgtatgaaaatatagaagaacgtacagcaaaaaataatttaagggttgtatactatcgcctccgtatgaatttaatggaacatgggattgaacggatactgattaaaaagagagggagttatgcagtagacacggagcagtttatctgtgatttttacgaattcatcaagggaaatcctgattatattactcttttttcaggaagttatatgcctgaatacgcgtgggcagacgacatgcttccttaccttcggaatttatatcggaaatataatgggggactcatatgactggagttattgatgttcatgcccatattcttccgggaattgacgacggttccagggattgggatgagagcaggagattgctggaggagtcctaccggcagggaatcagatatattatagcaacaccgcattattcaagacgaggactgccttctgacatatatgatttgtcggaaaagctgaaggaggaagcacgaaagatcgcacctgatttccagattggattgggacaggaaacttattatcacgagggactgattgagaatcttaagaacgggagagcacttacgctggatggaagccaatatgttctggtggaatttgaacctcaggtgccttacatgaagatgtaccaggcggtcagaaaactgactatggccagatatattccaatcatagcgcacgtggaacgatatgcatgcctgagagaggatagcaatatgtctgagttagtccagtgtgactgcagactgcagatgaacttcagcagcctgaagagaaacagcatattggataaagaggtccgatggtgccggaaacaggttatgcaggacagagtttattgcctgggaaccgacatgcatcgaatggattatagaaagccggatattgaggagagttttcaatggttagttaagcacttggatggacttaaactgcatggtctgctgcggggaaatgcgaaaaaggtaatacaaaaaagacaatacaaaaaagaaaaacaggagaatacaaagacgtatggaaaagacttatgatgacgacgagattgaaatcgatcttttggaactgctgggggagtttcgacgtaagatatggattatattgggaatcattatattgtttgggggtgtatcaggtgcattcagtgcattcgtgctcactccccagtataaatctactgcaatggtttatattctttcaaaggagacgacattgacatcactggccgacttgcagataggaagccagctgactaaggactataaaatcattgtgacaagcagaagggtcctcaatcaggtaattgaagatatggaactaaatcttacatacaaagagttagtggagaaggttaccattgataatccccaggatacacgaatcctctccatctctgtggaggatccggatcccaacatggcaaaattgattgcagacaagattgcagtcacatcttcagactatattggtgacatcatggaaatggtaccgcccaaattaattgaggagggtgaggttccaatccttaaatctagtccgagcaatacaaagaatgcattaataggtggttttctgggggccgtgctggtatgcggctttattacagtgcatgtaatcctgaacgatacaatacgtaccgaggaagatgttacaaagtatcttggattatccgtacttgcatccgtgccggaacgtgagggagagaagccggaagataaagaggccatgatttcctctaaaatcagggaacaagccagtggtaggaaaatccagaaagaagaaaaggggaggccgtgatcatgagtcaatttgttacactaaacaggataatgaaggatgactatcattataacgaagctatcaagactttgagaaccaatatacaattctgtggaagcgggattaagacaatcatgctgaccagttcccttcctgacgagggaaaaagcgatataacatttgccatggcatcgtccctcgcccaaatcggtaaaaaggtagtgatgatagatgctgatatccgtaaatctgtactggtttcccgttaccaactggagcgggaggtgtccggattgtcacaatatttaagcggacaaaggtcgctggagaatgttctctatgatacaaatatagaaaatctcagcattatatttgcaggcccgtattcaccgaatccggcagatcttttggaggagagcctgtttggagacatgatttccaaattgaaggaaaagtatgattatatcattgtcgatacgcctcccatgggcaatttgatagacggagcgattgtggcccgtcaatgtgatggagcagtgatggtgattgaaagcggctccataagctaccggctggaacagcgggttaagggacagctggaaaaaagtgggtgccgcattttgggggttgtcctcaataaggtgaatatgaagagaaatggatactacagtaagtactatggaaaatacgggaaatattccaaatatggtcattatggaaaatatgacagatacgggaaggcagaggcatgagctggctccgaaaccataagaatttggtatgccggctggctgtgggtgctgcggccctttcacttacctgttttatatggacaggtgtgaaactgtatcgggacaggaaggtcctggaggcagagattgcagccaggaatcacgggaaacagtatgaggtacaggaagacagtatgtgcagttttagcggagatgttgtggaatataagggaaaacagtacagacgcaacagctatgtcaaggctattttgtgtatggggatagaccggtcgggaaatatgacggagaagaccaccactggtttcggaggacaggcggacggtttatttttgatagcccaggatacagtaaggaataccataaagatattgatgataccccgggataccatgaccgacatcatgctcactgatttaagcggaaatgagttgggaaaagacatgcagcatctgaacctggcttatgcgtatggggatggacgggagagaagctgtgaatatatggtggaagcagtatctgagctttttggaggattgaaaatagagtggtacatggcagctgatacaaatgccatccctgtgttgaatgatgaagtcggcggggttaccgtaaccattggaacagaaggaatggaatccagggacccagcgctggtgaaaggggaaaccgtaactctgcaaggaaaacaggcggagatattcgttcgataccgtgatattcgtgttgatcactcggcattgtaccggatggaccagcagcagcaatacataaaaggtttttttgaggcagtccagaagcattcggttaaagacagcgggcttgtggtcagattgtttgaccgggttcaggaatacatggttactaatatggccaaggaccaatatcttaaagtagccatggacgcggtgggcagtggaaaactgagtgatgaagatttttacacagtgcctggtgaaggcgtggtgacccccagatatgatgaattttatgctgacaaagaagcattgacgcctatactgctggagctgttttatcgggagattgaataggctggcagtacagagaaacgcaataccggctgggacagtaaaataccgcaatattcagcatggtatcatgctgtttattgaatataactactctgaggagagaaaggagaggtgaaggatatgaaaaagaaatgcatagcagctttagtgctggcagcagctttggcatcacagcctgcatgggcttttgcagcaggcagtgcatccagcagcggcagtgatggcagcggttctattagctcatccagcagcagtagcaataaaggcactacaagctctaagtccaacaccacagtatctgtatcagctactggtgtcaagactacaggcgccacaaccagttcaagcccaacaggcagcacgattggcgttgcagtagacacagtaacgactacaggacagcaggtaacaaccaattccaagggagaggctgttatcggcgacaccgctgtttcatttgcagacagcgcagcagcaacagcaggacttccttctgatgtggtatcagctatcaacgatatcaatgcgggaagaccactgaaccaggttgtacagggtgttgatctgacaggctataatgctttgacaggaacacacgcaatcattaccaaggatgcggctaccggcgctgttaagactggtgcagtagaggtatccctgtatgtgcctaacctggtttccaatgtaaacaacgtgcaggtattgttctatgacaatgctactggccagtggcagctgattccggctgttaaggtggatccggtaacaaaaacagtagctgtcaatgttcctgggtctggtacattatccgtagtgtataagaactagagcattgagaagatgctggccggggggcagaaaatggctgatgccgggccccccggttttacagaagtacttaggagaaaagagtggtggaagaaagatgtatcgaaaaacagataaaggctggctgaagcattgtgactttaccttaatagatgcagtatgccttcaggtcgcatatattgctgcatattttatacgccaggggatccgttggccttatgctagccggttgtaccgaaatatggcatttgtatttctgttcatacaagtattcgtaactttttttggcgagagctttaaaaatgtgttaaagaggggaaaatttaaagagtttacggaaacattgaagcacgtatgcctggttatactgattgcggctttttatctgtttgcgactcaaaagggggaagagtattccagaataaccttagtaacaacaggtattttatatgttgttattagttacatagccaggatttattggaagaagtatttattaacaagaggtttggaaggaaaaggaaagcgttctttacttattcttacatccaagggaatggtggaagaagtggtacagaatattctaaataaaaattatgaatgttttcatatcataggtgtatctttgttggacgcggattgggctgggagaactataaatggagtaaccatagtgacagacaaaaatgggattgcagagtatgtgtgccacgaatgggtggatgaagtgtttataaatctgccaaaggacatgcctttgccccaggagcttatggatgatttcattgacatgggtgtcaccgtacatctgaagctgattgagatgggaaggttaaagggacagatacagcatgtggagcgtttgggaaattatacggttcttaccagctgcattaatatggcgtcgtggagacaggcatttgttaagaggaccatggatattgcaggcgggatgttaggttgtatattggcaggaatattgttcttgttcgtggcaccttgtatctatattcagtcaccgggaccgattttcttttcgcaggtgcgtattggaaagaatggcaagagatttaaattatataagttccgcagtatgtatatggatgcggaagaacgtaaaaaggaattaatgaatcagaaccgtgtaaaagacgggatgatgtttaagatagagaatgaccccagaattataggcggaaaaaagggaattggaaatttcatcaggaattattccattgacgagttccctcagttctggaatgtgcttaaaggagatatgagcctggtgggcaccaggccgcctactgtggatgagtgggagaaatatgatttacgccatagggtcaggctgagcgtaaaaccaggaattacaggtatgtggcaggttagcgggagaagtgagattacggattttgaagaggtcgtgaaactggataaaaaatacataactgagtggaggatgggattggatattaagattctgcttcagacagtgcaggctgtgttggggagagacggggcgatgtagggatggtgagggaaacaaacgtaataggtcacttttgtggtgagaatgtagaactatattaatagcattatgaacaacatttcacttgagagaagatatgataaggacaaaccaagaaattccttgatttcccccgattttggcgcagttttatcaagctttcaaatcaaaattttttgagtcagctaataaaagggacgattaagtggcataaagatggcgaataagtgaactgaaaacacatgccctcatggggtatacgagaaagcgacagatgttgtttcacatgaaatttagcgtagacctatgttgatgatgttatcaagaggggtatgcacacggcgttgaaaataaagaaagaaaagatattgagggattaactctgaagaaaaaggatgctatgggcagggataatacaggcaataaaaaactgaaaatagcaatgcttggggctggtgaaataatagggacaacacgtaaaaatccttgatttatgtgggttttcgaggactgcgcaaaaaatatttcctctgaaaaggtattgttgaagtacttgaaagcatcgaaaggattggttcgccactgtggataaatgagatttgttgcagtgtttataaatagtttaacaagattggagtaacagttatgagttgtgtggatttaaaaggcaaaacaatattggttacaggagctgccggttttattggtagtaatcttgtgaagcgcctgtacagcgatgtggaggatgtgacagttatcggcatcgataatatgaacgactattatgatgtccgactgaaggaggcacgacttaaagaactgtctgttcatccttcttttgtttttgtgaaaggcagcatcgctgataaagaaactattattgaaatttttgataaatacaagccgcagatagttgcgaatctggctgcgcaggctggtgtgcggtattccatcacgaacccggatgcctatgtcgaatctaacctgattggcttttataacatcttggaggcttgccgtcattcctatgatgatggagcaacaggtgtggagcatttggtatatgcttcaagctcttcggtctacggttctaataagaaggttccgtacagcacggatgataaggtagataatccggtaagcctatatgcggcaacgaagaagagcaacgagcttttagcccacgcttattccaagctctacaacattccatccacgggattgcggttctttacagtttatggtcccgctggtcgtccagatatggcgtactttggtttcaccaataagctggtgaatggcaaaacgatcaagattttcaattatggcaactgcaagcgtgattttacatatatagatgacattgtcgagggtgttgtacgtgtgatgcaaaaagcgccggataaggtaaatggcgaagatggtctaccgttaccgccatatgcggtttataacatcggcaacaacaatccggagaacctgctggatttcgtgcagattttgagcgaagaattggtgcgggctggtgtactgtcggaagattatgactttgaagctcataaggagcttgtgccgatgcagctaggagatgtgccagtgacttatgcggatacaagtgctttggagcgagattttggatttaaaccgagtacgagcctgagagacggtctgaggaaattcgctgagtggtacaaagagttttatatgaatgaaaataaataattcccacagtgatgtggaaaatgataccccacagcgtgggagaggagaagaaagattatgagagattttaaggatttgaagattgcagttgctggtactggatacgttggcctttcgattgctacgcttctggcacagcatcataaagttaccgccgttgatatcatcccggaaaaagtggagttaattaataataaaaagtccccgattcaggacgagtatattgaaaaatatctggctgagaaggaacttgatctgaccgctacgctggatgcgaaagaggcatatagtgatgctgatttcgtggtaatagctgcgcctacaaatgtctactcaacaaaccgtattgacgtagcatcgtcgaaaagagcctgttttgcacactatatggggcactgaaattggttatatttcacagctgcatgaactgaaaacgccgaatgtttatacaaaacgctgaacttttggcccgtgcggcacaaaattggcacatctttttcagaagttatgaggaaatggcggaaaacaggagaaaacaacaaaaatccatgagtttatcattaacgtctgaaactgctgttgagtacactatctgacccactaatgacacctacatcattacggtttgttgagtcatgaaaattacggaaaaacagatgatttctacttcataaaacagctgttgagtagagcatgtatggtgatgacaaatacatgttttgtgcagtgagagtgaatgatttgttcataacgaacaatgaatggtgagaggtggattgaatgatatgtacagttttaacaaaactcatgcgccgacagggttcgattcaacaatccaacacttagaaaaaacgtcattgcagggtatacggggttcgactgtataaaacagcacttcggttatagagaaatagagacgagtgtactcaacggatgttttatggagtagaaaacaagagaaatacgattgctggtgtaattggatatgacagcataagaaaacacttagccgagtgtggttatcacacagcggaaattagagagaaatactatctgtgaagagcagatgtgtacatagatgaagaaatgagatgttaacccgtgaaggggtggaggagtacataatggaaaaatttgattatttagtagtgggttctggtctttacggggcgatttttgcccatgaggcgaaggctcatggaaaatctgttttggtagtggacaagcgtccgaatattgcgggtaacatttatacagaaagtgttgagggcatcaacgttcacaagtacggcgctcacattttccataccaacaataaaaaggtttggagttatatcacacaatttgcagaattcaaccgctttaccaacagccccgtggctaattacaagggcgaattgtactcgttaccgttcaacatgtatacctttaacaagatgtggggtgttgtgacaccggaagaggctgccgccaagattgaggagcagcgcaaggagattactggcgagccgcagaatcttgaagagcaggccatctccctcgtcgggcgcgacatctacgagaagcttatcaagggctacaccaagaagcagtggggacgcgactgcaaggacctgcccgccttcatcatcaagcgcctgcctgtgcggctgacatttgataacaactatttcaatgcactttatcagggtattcctgttggtggttataccaagatggttgcaaatctgctggatggtgttgaggttcgtttgaacacagactatctggagaacaaggccgagttggatgcattggctgataaggttgtgtacactggaccgattgatgcttactttaattataagttgggtacgttggaatatcgttcggttcgctttgaaacggaaacattggacaagcctaatttccagggcaacgcagcagtgaactataccgaccgcgaaactccgtggactcgaattattgaacacaaatggtttgaatttggcaaggatgaaaatggaaacaatctgccaaaaacaatcatcagccgtgagtatagtagcgagtggaaaccgggagatgagccgtattatccggttaatgatgctaagaatggcttgctttattctgaatataagaagctggcagacgcagaagaaaaagtaatcttcggcggtcgtcttggcgagtataagtactatgatatggatcaggtaattgcagctgtattggataaatgtgagaaggaactgggagagtaaaaatggcaaagaaaaagattttgatggtatgtgaagcttttggaggtggcgtattcacttacgtatctcagctctgcaacgatatggtggatgattttgatgtctatcttgcgtattcgctcagaccgcagacccctaagaattataaagactttctggatcagagagtgcatttgatcgaaatgaaaaatgttggcgtaaagggattggcaaatttaaaaagtgatgttgcggcaatcaaggaattacgtcaaattgaaaaagatgttcagccagatgtgattcacctgcattcttcggttgcaggtggtttaggtagacttgcatataacggaaaaaataatactgttgtgtatacacctcatggatatgcacatattcttatgggtccggggaagaagagcaaagtctataagtttgcagaaaaggttcttggaaatcgagcacttacacttacctgttgtgaaagtgaagacgaagaggcaaagaaattttctaagagaacagcttatgttgagactggtgtgaaccttgcagatctttcagcatcccttgacggtataaagccagtaaaaaatgataagtttacagtatttacacttggtcgagcctgcgtccagaaacaaccacagctttttaacagaatcgctgaattggtgccagatgctagatttgtttggattggcaatggtgaacttgaaaatgagttgactgcccccaatattgaagttacaggatggaaacctcgaaaggaagctttggcaatggctaaaggtgctgacgcttttattttgtgtagtcttggcgaagcaattgcaatgagccttattgagaatatgtacattaaaaagttgattctcgtcagcaatacaatgggaaataagagtgttatcaataatggcgttaatggctatgtgtgtgataaagcagaggagtatgctgaacatataaaggcggccatgaagaaatttcctaaagaacttcctgaaagagcctatcaggatgtccttgagatttataacacagataccatgaagaagaagtatattgagttttataaaaaatgttaaattagaggatttagagaatgaaagtgctgatattaacagcagactcaaatggtgcttatcctgtaccagcaactaaaggtggtgcagtggcgacactaattgagtacttggttgaaggaaataatgagagagagcagtgtaagttagaagtagtgtcttattatgaggaaagggcatatgaaaagtcaaaacagtatcctcatgttagatttacttgggtgagaattccgaaaatcgtaacactgttggaccgaatggcatttaattttattaggattatgaagaaagatgaaaaggcggtttccttcaagacaccattttcacttctgtattatatccataattctagaaaaataattaaatttacagatgcagataaaatagtaatagaaaacaatatacccttggcattgtgctttaagaacacaaagtataagggacagtggtactaccatttacataatgtgcctagaatagacgctaagagcagagacgtgatgcaaaggacgacaaagtttctgtgcgtgagtcaatttgttgcaaacgagatatgtagtgaaaaaagcgcaataggaaaggtgccgagtaataaagttgaaatactttataattgtatagacacggatttgtttagacctataaaaaaagataatcagagaattatagaattaagaacaaggtacggccttcaagaagaagatagggttttgatatttactggacgtttgacagaagaaaagggtgcagatgttcttcttacagcgatgaaaaaacttcccaacaatgtgaaagccttaattgtcggcagctttcactacaatgcagaggtaaaaagcgattatcagaataagttacataagatggctgaagatcttggaaagagagtgaattttactgggtacgttcagcatgatgatttaccctatctgtataatctagctgatatagcaatactgccttcgatatgggatgaaccggctggactaacaaatcttgaagcaatggcgtgtggaactccgattatcacgactaatgctggtggaattccagagtacattggagaaggaacagcctataaacgagatgacaacttagtcaataatgttgttaaagaggtaaataggttacttgaagattctcagtattatcagaataaatcttacagcggtcgccagttggtggagcaaaaattcaacaaaaatatttatatagataatcttgttaagtgtctaaactaaaaagcaattaatgaaggggtgtgtaatgattgatagccaatcgttacacgggtgagtattatggagcaaaggcaaatcagtaaaagaaaaaattatatcgatattgcaaaaggactgggcataatttgcatcgttataggtcatgcgttgactaaaggcacactattgagaagatgggtgtttgcgtttcatgtccctttgttttttattgtggctggattaacctttgtaccaaagaatagtagaggttatataaaaactagatttaaaaggctgatggttccttattatctagtataactcgatttaaataagcttacaatttaagcattggtagtaatctgatttcttggcttacgtgtccatgctttgggcgcacgtttcccttggttttcaggataataatgtaaacttattaaaattgagttatactagtatcaattttaagcatagttatctatttggttcttggtaagtatgtaggtgtttcagatcataaccagatgagctttgtcaataatatcgcaagtatgttttatggaagctcaaaacttggctatatgaaatggaatcttccattatggtttgtaccgtgcttctttgctactatgtgcatatttaatgtaatagtaaattttctgggaaatcggaagtggaatgattgtaaactgttactggtttcagtggctttactaataataggatacgtcatttctaatgtttgttatatatatttgccgtttcagctagaaacatcaatgaaccttctcttttttgtggtgtgcggttatctatgcagtaaagcaattgggggggggggggggcagagcgtaccgtatgtttcgcggagtaagaaggcaattgtaggagtagcagctatattaattggctgtatcttaagtttctttaatgatggaataggtgtaagaacagatacctatggaatgctcccgctttatatatttattgcattattgatgagcgtgggagtgataggtgtttcggtagcaattgaacaaaataagtgtttagaatacataggaagacatagcttctttataatgctttttcaccgttttgttctgatgtttttctctgaggtctttccattaacaagaaaaatactgtcggatactaataatgtaaaagggaccttggtagctgtttgtatatcactaacgagcgttataatctgtcttgtgggtgagcatatattatgttggagctacaataaatcaaaaaggatattaaggaaaaaagcatgaaaaaagtaggaatattgacttttcattctggattgaattatggagcttcacttcaggcatacgcactgaagtgtgtattgaacattaaagatttggaaacgtcagtaattgattttagaaaagaaaaatcatatggagacaatttttggaagaattttttttcctgtgctagactggcaagatgtatctatgaaataccttatagcaaacaaattggacagaaaaaaaaacaatttgaaaagtttgtcagcgaaaaattgacggaaaataagacatgtttagttaaagaagatacgattgaaaatgcaacgcagtcgtatcaggctttgatatttggaagtgatcagatttggaatcttgatccaagaatatacgatagaagtaaagtcttttttgcggattttaattattcaggaaaaaaatacgcttattcggcatcgtttggggaagatatttcttttgcaaaggaacataaagagtatattattaagcaattgacagacttcagaagcatttctgttcgcgagaagagcgggcaagagtttttgatggcaaatggtataaatgcagtacacacggtagatccgacactgttgttaaaaaaagaagaatgggaaaaattgataaaagatacagcgacaataaaaggaaaatacattttatattattccgtgaactgtagacgctattcttgggaaattgcaaaaaagctttcggagttaactcatatgccggtgataaatctggtggagcaccccaaagtttttatggctggttttaagaactgctatgataaagggccattggaattcttaaacataataaaaaatgcagagtatgtcgtaaccaattcttttcatggagttgctttttcaattaactttaagaaaaaatttgcgcccgtatttcaaatgatagatgggaaaatacagcttgaagagagaaagtatgatttgctaaagagggtaggacttgaaagtctgattatcacagatatgaatgaagaagttctaaaaaaaatcagcacaatcgattattcggctgttgagaaaaaactagatatgattcggaaagagtcgttaagctatatcgatggcgtagtgaatgatttaaataattgaggtattggaacatgctaaaagaaaagattaaaagtaataagagtgcatatcgaatagcacgctttgcaaaatatggattggttaggccagttcatttgaaaatatatactgctgaaagaaaatttgcaagaaaggttttgccaaagacagataaagacttagcattagaaaaaatgcataacagatataaaggcaagacggcatttattatcggcaatggtccgagtctaaaggcatctgatcttgaaatgataaagaaaagtggtggttattgttttgccacgaatagaatttttttgatttttgatcagactgattggcgacctgatttctatgttgcagtcgatggtgcaattgtgggcgataaaacaaacacgattgaaaggatattcaaggagaatatcaagtattatttctttgcaccagatgtgtttgatcatctacctatagatttaaagaaaaaggataatgttattcgctttcacaagaaaagaaataacgtgataagaagtgttgatgagttttcacctgatccattggagtatttagttgatgggtatacagcaacatatccttcgatccaattggcttattatttgggttttgaaagaattgtctttttaggggtcgattgtaattattccaatgttattaattctgatggaagtatttcaaagacgagtgaaaagcaacagtatttttctaaggactatgatagcgcgacaactaatgcgggaaatgtagttggaatgatagaagcatacgggtgtgcaagaagattcttagaatcgcatggtgttaaatgtataaacgctacgagaggcggagaacttaaggcctttgaaagaatgagcttggaagatgtttgtttagaggtgaaatgatggctaaaagaaaagttgcaatttgcgcatacagaatgaataaaggtgcaacaggcggtgctggaggagtgcttttcatgcttcaagatgctcttggaaagcagtttgaggatgttgaatttcaatatatctttaaagagaatgaaggcaagacagcactagctcaatatttcagaacccttatggattgtaatccagatatgtatatctgccatgatgttgtaagtgcttttttactgtctatggtcaggaaaaagtacatattgatataccatcagcagggacctttgattcaagaacgaatcaatttaggcgtaaaaatcggaaaaactaagcaaattaaaactaatttttacgagggaagggcattaaagagcgcagaatctgttcattttccgagcaatggtgctaagaaaatgtatttcaatagtgaattcagaagtgcagatgaaaatcaagttagaattggagaaccaatgtacaatacgatatatgttgattcggacttgaatgactcgatagactcgtatggtttggaaagagacaatagctacacgacattctattctgttggaacacttacagaggcaaagggacaggacagagcagttatttttctggataaatactgcgaaaacagtagcaggaaagttagatatattttgattggacaaggggtcttaaaagatgctttgctgaatgaactggaagtactaaagaaaaagcatgataatttttcttacgtgtatgttccgagattagagcataaagatattttatctgtgggaatgatttcagatgtgtatttgatgcttcatcgaatttcaatttttgatttgtcgacgttggaggcaatgtatactaataatgcggttgttttaagtgatattggaggaaacctagactttaataagaatgaaaatatagttttttgcaattgcacggactatcaaagcgcagcaaagaatcttgactctattggaatagaaaatttgaaacgaaaaaataaggagtgctttgagaagtatttctcgcgtgctgcatttaaggaaaggtactatgaattggccctaaatggaggcactaaatgatttccataagcagactatgtgaaaaaaaatggttcattatattgggaataatatgtgcagtacgacccgaatattatgcgaaccaattaccaatagtggatagcatactaagtaatgtatcctacatgttttttccgtttctgatttttttatattattatggggccggaaaaggaaaaataaagacatcgcctgttgttaatttggtgctgattttgcatttgtcgtatttgttttcaactgcgttgaatcatggaaatttttataccatacagcgaacaacagtatatgtcgtaggtttttgcgtatttacggatttagtatgtagacataacccacgaggctttattgaagcgtattattggataatgttgatctatgtcacaattaactttattacgattattaaatatccagatggaatttggtattctgcttcattgacaggcaatctgaaatatttgacacattggttctttagtacagaaaataattttattgtttatattttgccagctttatgtattacggtaatgcgttgctatatagttaataaggtatcactattatcaatttggatgtttattgcatcggcattatctattctcattacgttttcaggaacctgtgttgttggtctttctgtttttgctatttatatggtattaatgtataaaaacaagttgttggaatggattcattttccgcaatatatgcttgccagtttaggaacattcttattcattgttattttcagattgcaagagttttttgcattcattatagaaaatttgcttggaaaaagtttaactctaacgggacgtacaggtgcatgggactgggctatgtattggataagagtcaaacctattttcggaagtggctatgaaacgaatgaagttatcacttcaaagttgcatgacacagcggcaacgcattgtcataatatgtttttggatataacatatcgtggcggatttgttgcattgataatatttattttgattctctatttttgtggcaaagcagaaaaacattacaagtataattcactgactaggattttaacattttcgatatttgtattcaccggtattctatttttgacggaagcatactttaatcaaagaacattttttatgcttttgacaatgctatatcagattagttatatagtgaaatgttactgacctcctgatatgacgctgaccagatttgttcatttttcagcaggctgctctaactcatgtcagtcattgcggtggcttctgggtggatttctccacccttaaaaccatcgttttgatagagagtgctcctgcataggcttttcagtcaaatggaagcacgccttgatctttgacaacttcatactgctttgcatgcggcgatttgaacctgcgcagtttactgctgacgttatccatatgctcctgaagatcttcaagctgtccgctgatgtcatccatggcgatcctgatatccccatggagcagttctatggaattgagggcttcctccagttcgtcccggatgtccatgtattcctccagcagatccaatacgccggactggcgcatgcggtcagcaaaggtctctgccgggcgatgttctttgttctgaaccatcaggcctcacctcccagcatctcatgttcgaggacaaaccttacctgatgttcgtccgtgagacgctttccctgctggctggcgtacatcaggcagccgttacagatccggttgatgcgccttgggatccccgtggactcgcggaagatctcgtccatggccttatcggtaaagatatcctgcctgcctccggcatacgcaaggtgggaacggatatatctttccgtctgcgcacggtcaagatggggcaggatgcagcttaaatcaatccgctgcctgacggccgcataccgctggagccggagtttatcccacagctccgtctgcccgacgagcacgagtgccatagggctcatagaatcgaatttataattcagcaggaagcggaattcctcaatggtctctttttccagaaggtgtgcttcatccaggatgcagacgactttcctgccctgcacgccgcggatgatctccacctccttctgaagctgcctcttggcatcgccgcggtagaactttgattccacgcccagctggtcgagcatgcctttgtagaaccatcttggggtcagtttggagtccgacaggtagaggaagatatattcctctttggggagcgtctccacaaaacggcgcaccagcgttgacttgccgcacccggcatccgccgtcaccacggcgaacagctggcggtccgccgcataagacaggcgcccaagggtgtccgccatcgccggtgactcatacagcatccccgacgggatatcgcgcacgaaagggagacgctgcaattcgtaaaaagctttatacattgctgccaccatccttcctgtactgtccgaaagagatggcatctgccatgtgctttttggatgctgcgctcttctttttcagcgcctccagcatacgggaattatccggctccgtttcctgcatggaaatcggcagggggtcttttttatcacaaaacggcctcatttcgagcggctttgcggtaaacgcttcaatccgataagggacggttttgtctcatatttgcggccctgaaagctgatacagccgcccttgtcaacaaggcgttcttcatggtggaggaacgcttccgccactacggatgtatccaggaactttaaaggccggcagtcccggttccactcctggagaggggtgatcccttccggtgggacgggcatgccaaggctctcataatactcccggatgccctcgtgcggctgcttatggcagtattcctccaggtagtttttccagtggcggttaagctcttccagtgttttgaccttatggatccgggcctccctgagaaaagcatcggccacctgatggaatttttctattttcccctttgattttccgctgcggacttttgcgtgccgaaccgtaatcccaagtctggcaagggagaatttcagctgttttgccacatactgcgaaccgttgtcaaagtatacggcatcacaagccccggccttcaagaggacgttccggaaggtatcctccacgatgctttcctcctggttgtcataaaaccgggaatggaccaggtatctggagtggtcatcgatggcggaggacagatatgtctgcaccatcgccccgtttttccctatggggagcttacacccatacttgacatcctgttgggcttgcagaaacgtttggacgagctttcgcgtgcgcttgcgtatgtctgcatctgtctcgtgccgaaaccggctttataaaggtgacgctgcagggtagggcgcttgagtacgcccggctccgcccagccctcctgctccaggatgaagatgatctgctccacgctccgcctgggtacttccttcctcagttggattgcctgctccacaatcttccggtaattatccggcagcctcccggagacaaccgcctgagccggcacgacgggtttgagaccctcgaagcctttttcttcataggcggcaaggtaccggaagatggtacgctcggataagcctgactttgaggctgcttcttcccgcagctggctgcgtttggcgggatccaggctctcatcaagcagtggcgcgatcaaggtgtagcgtgagagcgcctcgttatccctccagtttaaatcttttttgattgtctgcatggtatgcacctcctttttggacagcataccgcagaaagcgctgacagccaaaacaaagtgggtgcatataagatgtcctcggacggataccaggaaaccgcctgagttatagaccatgcgcaggacagcgggaagccacctgtcacaggatttcctaattgtttccaaaatggccgcgccggccagtccgggattccttaagaggctcatagcctgccgacagtaaccttctgtccgggaaaagtttgccataagccagtggtgccgccgccgtatggtttcatcacaaggataatcctcgttcatggtatcctccggcagccctcattgtcacaccgtctccgctcaatcatcagccacactacctgtccgccatccagcttcatgattcgcggtttccagtcacggtggctgacaggggaccggcatatggggcatatacaattttcgttacaatggatagtaattacgccatcccccttgtcagattccgtgtactctgatacaataatcatggttttatcatgagtctcagaggacacaacttagcgggagggtcttctgggactttctctttctgtagaatgttcattgacattatacagagcaagtccctgacattcaagcagagcagtatggatgacaaatcagcttagcaacaacagtgaaaaaatgtacagaaactgaggtgtcgcaattatgaagaagagcgttataaaaaactatttttataattcgggctatcagctgcttgcattattagttcctctaattactacaccatatgtttccagagttcttggtgcagataatattggaatatacgaatatatatactctattgggcagtattttgttctgtttggatgtttaggacttaacttgtatggtcagagagagatagcatattgcggagataattatgagaagagatcgacagtatattctgaattgttgattattcgtgcagttacaatggggtgtgctatagcactgtatctcattacagcgcagtttagtcagtataaaatttattattactattcgttgtttacactgttggcctctttaattgatatatcatggttatatcaaggacttgaagattttaaagtaacagtactaagaaatgcaacagtaaaaattctaggtgttattgttatattaacctgtgttaaatcgaaaaatgatctgtggatttatttcttgtctcatagcctgactttattagttggcaatgcgactatgtggttccataagagaaaatatgtttcgtttcactgggcaatttccctcaatattataaagcatgtaaagggaacggtttcactatttattcctcaaattgctgcatcggtttatacagtgcttgataaaacaatgttgggctatttcgcaagcacgacgcaggttggttattatagtcagtctgagaaaatagtcaaagtagcaatgactatcgttacctctatgggagttgttatgctacctagggtttcgagactttttgctgagaaaaatgaaaaggcaatagaagatagcatatataaatcggcgagatttgtgtactttatagccagtcccattgtttttgggttgattgcaattgtgaacatctttgtaccgtggttttatggctttggatacgatgcggttaaaattttgattccaattatttcgcctataattatgattattggattgagtaatgttgtaggaacacaatatttggtgccggcaaagaaacaaaaagaatacacaatttccatatgttgcgggtcagcagttaatttggttttaaacgcgttacttattggtaggtatcaggcgataggtgtttctatagcaacggtgtgttccgaatgcactgtcacaggtattcagttgtattttgttagaaaagatttttcgataaaaaagatgtttgcgccaatttggcgatatcttgtatctgcttccgctatgttcgtcatacttaggtttgttcagacagcattaccgaatggagtagttggtattatgatttcgtgcatcatgggagcagttatttatgcgttgatacttttggcactaaaggatgcctttcttatagaacagttgaatgcagtttttaagaggagtaaatgatgtgtcagagtaaaatgtttctgaggaagtgatgagaattcaattacttttcagttgtattaaatatcagaaatatattttaaaggctataagccaaggaggaaattattatgtataagaaacctttcgttatcgctgaagctggttgcaaccacatggggcagatggaaattgccaaagacctcattgaaaccgcagcccatttttgcaaggctgatgcaattaaatttcagaagcgttgcccgaaggagcttttgactccggagcagtacaatgctccgcatccgcatccggaaaattcctatggtaagacctacggtgagcatcgtgaatttctggagtttacagtagatcagcacgcacaactgaaggaatggtgcgagcaggcaggtattatttattctacatctgtttgggatatgactagcgcgaaggaaatcgcttctctgaaccctgtttttatcaaaatcccttctgcctgcaatacccattatgaaatgctgcagtggctctgtgacaattataagggagaaattcagttgtcttttggtatgactactcacgaagaagaagagaagattgtacagctgtttgaggcaaatggacgtgcaatggatctagttctctttaactgcacttctggctatccggtaccttttaaggatgtgtgcctgcttgaaatcaatcgtatgcgtgcaacttatgaagaccgtgtgaaggcaattggtttttctggccatcatctcggtattgctgttgatgttgcagcatatacgctgggggctgatgtgatcgagcgtcattatactcttgatagaacttggaaaggcacggatcatgccgcatctttggagccggatggaatccgtaagctggtaagaaacctcaacgcggtacatgaagcacttacttataaggaagcagaaattcttccgattgagaaggttcagagagataaactgaagtatcgcaagcactaatttaagcaatattattttatagggcaggtggtgccgatggtggatttaaagtcaatctggcatcggcacttgtcttttatggagaaaaatatatgagtggaattgatttatatacaattgagtcaactgctagtgttatccatgctttgaaaaaaatagatgataacaaaaaaggatttttggttgtgttaacaagtggcagagttgtcggaacgcttacagacggagatataagacgtgcatttatagcaggccatgcattagaagacagtattacagagatttacgcacaaaattgtacggtattgcacagcaatgagggaatttccaaagcaattgatctgtttaaaaatgtggcaattaaatttcttcccattgtagatgaaaacggcagtctagtgaatattattacaaaaacccaaatgcatgtagtactgctacaggatttacatgccgatcttacatacgattttggggctttagacgaaggaatcgttgattatgagatttatcagcgcccctggggtttttataagacgacggttatgaatgactatttccaatccaaagtgatcagcgtaaaccctaaatcacagctgagtctacaatctcataatcatagggaagaacattggattgttgcacatggaaatggaacggttcagcttgacaactccattttgaatgtgacatgtggtagctctatttttattcctaagggctgtaagcataggcttaccaacacagatgacaaggaatcacttatcattacagaggttcagattggagattattttggcgaagacgacattataagatatgaagatatatacgggaggatctgatgaaatttgaaaaagtgttccataaagggcgtgaacattttctaaaaaatcataaaatccgcagtaaaatttatagtcttttttgccgcatgttttttcattgtgatataccgttcaaaacggatattgataaatccgtttatttctgccatgatgcatttggtgttgtaattaatcctaatgcaagaattatgggggggggggggtaatacagaacggtgtgctcattggtgagatagatgattcccatcgggcacctattattaaagagggagcttttattggtgcaagagctataatacttggtcccgttgtagttggtaagaattccaaaattggtgctggttcagttgtgctgcaggatgttcctgatggttgtacagctgttggaaatccagcaaggattatatataaataaggagatactaaaatgaatgtagcatttatcccggtaagaggtggcagtaaatcaattcctcttaagaacattaaacctatttcaggcaggcctcttgtgtattggacagttaaggccgcttgtggatgcaagtatattgataaagtatttgttgcaacagatagtgataagattaaggaaactgttgaaggctttaaagaaggttcagaagctgagcttttcaaaaaagcagaggtaattggtcgttctgcggagtctgcatctgatacggcttcaaccgaatttgcaatgttggaatttgcagataagatggaatttgacaatattgtactggttcaagctacatcgcctcttcttgtaagctcagatttggatagaggatttgaagcttttggggaagagaatgtagatagcgtcttgtctgttgtacgtcaaaaacgattccattggggaaatgatgaaaacggatttgcgcatcctacaaactatgatgtatttcatagaccgcgtagacaggaatttgatggctatttggtggaaaatggtgcattttatatttcttctaaagaagatcttttgaaatcgaagaaccgcgtctctggaaatatcaaggctgtcgaaatgaatgaggacacattctttgaaattgatgagccgagtgactgggttatcattgaagcactcatgaaaaagaatgacattacagctccaaaggaaatcccggaaattaaaatgtttcttaccgattgtgacggctgtttgacagacggaggaatgtattactctgaacatggagatgaacagaagaaatttaatacaagagatggcatgggatttgccttactgcgcaataagggtattgttactggaattgtaaccagcgaaaatgtggacttgaatagaagaagagctcaaaagttaaaacttgatgtgttagaagcaggatgtaaggataaagtagcagcagtaaaaactctgtgcgaaaagtataatgtttctttggaaaatgtcgcttatatcggtgacgacattaatgatttggatgttattaaaatggtgggatatggatgctgtccagctgacgccatgcctcaagtaagagatgctgctaggtatgttactaaggcaaaaggcggcgaaggtgtcatcagagagattgtggaggcgattattaatgataccaactaatatgaatcgggggggggtacacctcttgcggtttatgcaataaaaaatagagatgaatttataagaaaagaaagccgctctggaggagtatttccagcaattgcaaattggataatttcaaaaaatggagccgtttatggttgtgtgactgattctgactttcgggccgtacatattagagtggattcaaaaagtaatgtacacagattttctggaagcaaatatgttcaatcggatttaggagatgtttgcagagaggttcaatcagacctgctaaatgacaaatatgtcttattttcgggaactagttgccaaatagcaggtttgaaagcctttctgcacaaagtcaactgtgatatgtctaaactatatacagtggatattgtttgccatggagttccgagtccacgtatatgggaagaatatatacgttatattgaagaaacctataaatcgaatgtagaacatgcggactttaggaataaaagggactttggttgggcagatcatgtagaatcttttaggctgaaaaacgggaaatgtattaatactagtataactcaattttaataagtttacattattatcctgaaaaccaagggaaacgtgcgcccaaagcacggacacgtaagccaagaaatcagattactaccaatgcttaaattgtaagcttatttaaatcgagttatactagctcatatacagctttgttttataggcattttactttacggccagcatgtcatcaatgtccatataaaagcacacaaagaatcagtgatatttcgcttgcagacttttggggtgtaaataaggtaataagattatttaatgacaacaagggtgtttcggcagtcttaattaattctgaaaatggtaagagtgtttttgaaatgattaaagacaatctgatctggaaagaagttggtattgagaactgcatgcaaacagcgttgagagtgccttttgcccctaataaggaaagaaataatttttggaatcagtattatttaaaaggcttttcggctgcgcttttcagcgtagagaatgttaagaaagattatttaattcataacttgttaccgaaaaagatatatttattgattaaaaaatttactctccgaaataagatgtaagctgtttccttgccatttgtgaggaatatcaaaatacacattaattaaccaacaacggatgaaaatacaaaactggagtatctttcaataaactatgtatttgaaagaacacgagaataattattttcaaactaaaacgtatcagttggacgtttttggcttttactatgtgtatgatgatatgaggagcataaatggcaatggagatatatgctataaaacacaagaatgaagagattagaagtaaatcacgtagcggtggaatattcacagcattgactgattatatacttgatgacatgggaggaatagtatgtgggtgcaagatggaaggcgttcgagttgcagtacatgattgcacaaatacaaaagagagtagaaatctttttagagggtctaaatatattgaaagtaatcttgcatggaatgattgtttcgccaatattgaaaactatttgaagcaaggaaaaaaagtattgttttctgggacttcttgtcaggtacagggactcctcggcgtaattccgcagaacttgaaaaataatttgtatacggttgatatcttatgccataatattccttcaggtaaagtgtgggatgactatcttacatggtttgagaaaaaagtgaatgcgaagattattgctgttgattttagaaataaagaaaaatttgggtgggctgatcatacggaatcattatggacaacgaagaaagtataccataataagtattatcgtgatttgtatgctcttggctatatttcaagaccatgctgttcgcaatgtccttataaaactgtaacgcatcagtcagattttacgattggcgatttttggggactcgatagagtggaaaaaggaaaagaatttggagataacaagggcatatctttagtacttgtcaacacgaataaaggagcagaactttttaatttaatcaaaaatgaagttgagtatattccagctaatgaagcagattgtttgcaaggggcactggtaaaaccgtattcatacgacgtggagaatagaacgaagttttggtcagattattattcaagagatttttcttttgttgtaaaaaagtatactacaaatgagattcttgcgagaataaaaatgctgcttcccggtgatttgaaaaaaagattaagaggaaaataatcatggaagaaatgcgatatcaatataaagatggttcgtatttgccagaatcatcttggagttttttcaaaattaagaaatatactcctcataaatcaacacgctatattaatgttgataagagcgataatggaactttgccagaattatatgataaaagagaaaattgctgtggatgcacggcatgtttttctatttgtcctaaagatgctatacttatggaaccggatgaagagggttttctatatccggtggtagacgcttcaaaatgtattaaatgccacaaatgtgaaagcgtttgttcatttaagcaagaccaaagaaataaggacttgttttgatcatatttgtagcaagaaaagaagagagagaagaaaaaatgaatacaacattacttatcatggcggccggaatcggcagccgatttggaacaggaataaaacagttggagccggtcgatgatgctggtcatatcatcatggattactcgatccacgatgcaatcgaggctggtttcaatcatgtggtctttataatccgtaaggatatcgagaaagagttcaaagaggtcatcggtgatcgcattgcctccatttgctcttctcataatgtaactgttgactatgctttccaagatatcaatgatatcccgggaactctgccggaaggacgtacaaagccgtggggaaccggtcaggctgtgcttgcagcgaaaaatgtgattgatactccgttcatcgtcatcaatgcagacgattactatggcaaggaaggcttcaaggctgttcatgagtatttggtaaacggcggcaagtcctgcatggcaggctttgtgctgaagaatactctgtccgataacggtggcgtgactcgtggtatctgcaagatggataagcagaacaacctgaccgaggttgtggaaaccaagaacatcgtcaagactgaagctggagcagaggcagacggtgtggctgttgatgtgaattctctggtatctatgaatatgtggggactgacgcctgattttctggatgtactggaggaaggcttcaaagagttcttcgagaaagaagtacccagcaatcctctgaaagcagagtatctgattcctatcttcattggtgaactgctagagcagggaatgatgtctgtcaaagtattgaaaacaaacgatacctggtacggcatgacctatcacgaggatgtagcagcagtaaaggatagctttaaaaagatgctggagaacggtgtgtacaaggctaatctgtttagtgatctgtaaacgacgatgaaagaaacgattgatttactcgggaagattctcacaaacgttctgacagctctctatgagccgtttggattctcacttcttctttcattcctagctatgtttttctatctttatgcttatgagccaatacatgcaggcaaaggctggaagaatgccatagtgacctggtatcagaagttcaaagagagcgtgttcttccaaaggttgtttttcttagcttttgtgacctcacttattctgttccgaaccctgttaaaccgtcagctgtggatgaatcctttatccgatgtcatgggtggctggggcatctgggagacagtgaacggtgaacagaagctgaccaccgagtgcatcgagaacgtaatcatgatggtgccgtttagttcggtagtgatgtggacattcggagagaagataggaaatggctggaagaagatactgtgggaaagctggaagatagcatttatcttttcgataagcatagagatgttgcagttattgatgcggctaggaacgttccagctatcggacatcttctataacacagtcggtggaatgctaggcggattgatgtactgtgggaccatgaaggcaagaaagtgtctgtaaaactggatgaaattgtgatatactgggagcggtagctccctacgctgctcgtaataatcacacacctctctgtggtgagcagcaggcaacgatcttatggtcggctgagatgtgagaaaagaaacgccgcaatgagggaaaaaagaatgccaataaaatttgagattgataggtatcttgaaagattcagatggggcgtgccagagcctcacgtgtcggataccacacgacagtgtgttcaagaatttctggattgttgggatgaagaagttcgagagaacagtttattgaatacaccagaaagtacgtgccgaggctttagaattttgttggagaagtttccagagttaaaggaaagctatttcggcttgaaaattcaggattatctagtacagcattgccaaaataataatgaatagacgttgcttttttattgtagtcggtgcataataattctatcactaaagaatggatgtgttattatgcgaaggaaaacaattgatactatcccggttttatctgatgccatgaaaaacatattatctgctttttcaaaaagccgctcccttccgtcaggactggtcaaaagagccagcattgtcctgcttgcgtcacagggggaactcaaccagaatattgcaccacaggtcgggcttcattataataatgttgccacctggcgcagtcggttcctcgcggcgctcccagccttgcggaggattgaaatggacgacccgaaaaagcttgaagatgagatacgggcagtcctgtccgataaaaaacgccccggtgccccgtctgtttttacgccggaccagatcatgcggatcatcgaccttgcctgcagcaacccaaatgattttgggtacgaagtaagccagtggagtctcccgctgttagtggcagaaattaaaaagcaggggatcgctgaacagatttctgagaaatctgtcagccgttttttaaaaatgaggtagatttacatccccacaaaatccgttactggcttcattcttcggaaaagacggaagccccggaatcttttgcgcggaaagtaaacgaaatctgcggcctgtaccagagtgcccaggaacaaagccgggaaggtgcacacattgtttccacggatgaaatgaccggggtacaagcgctggaacataaatatcctgacaagctcccattacccggccagtgcgccaaaatggagtttgagtatatccgccatggcacgaccagcctcatcgggttctttgatgttgcaacgggccgtatggaaatgccgtatttaaactccacacgcacagaagaggattttgtggaagccgtgaaagcattggtagggacagacccgcaagccccatggacatttatatgcgatggcctaaacacccataaatcggaagcccttgtccgctttgtggcagaagcctgtgcccttggcgtggaactgggcaaaaaagggaaaacagggatccttaaaagtatggaaagccgagcggatttcctgcatgacccttcccaccggatccgctttgtctatactccgaaacacagttcctggatgaaccagattgagatatggtttggcatcattaaccggaagctgctgaagcggaaaagctacctatcaatagaagaactggaagcaagcatcctgcgctttattgaacaatacaatcttacagcacacccatttaagtggacatatgccgggataccattagtaatttaatcactgatatttaagcaatgctgtactagcgacgaatgattctgcggttttaggtgaaatacttgatgggcgtatgaagttacggatgctgaaagagagcaagaagtgatattgccctcaccctaacacagtgctatacttaaacaactataaaaggaaagaggttatcacctatgcccagaacgaaaggcagcaaaaaccgtcccaaaatcaataccaccaacgactacgcatctcagattgcggagaagcaggagactattgcgtctctgaataccgagatcgcatccatccagaaagcgattgaagagcagaagaacaccctgaaagagaagaagactgccctgaagaaggccgaaaaagaagtggcatccctggaatcgaagaaggcaaaggcagatgctaaggccgctgaagaagcgaagaagaccgaagcagaggctgtgctgaagaagctgctggccagcggcatgagtgcggatgaaatcctcgaaaaactgaaatgagatcggccgtgtggacaaactgaaccccagaagttcacacgatttttttgaaggtcgttatatagtttataacggaaataaaagaaatggagtgtgacataaaatgaatttatcaaaaatacatcatattgcaatcatcgtatctgactatgaagcagctaaggatttctatgtgaacaagctgggcttctttgttatcagagaaaactaccgtccagagcgtaaagattggaagctagatctgcgtgttaacgaacacacagagctggagatttttgcagaagaaaacccgccgaagcgtgtgaaccgcccggaggcctgtgggctgcgtcaccttgcattttgtgtggagagcgtggagcagacagtgaatgagttgacagaggtaggaattgaatgtgagccaattcgtgtggatgattacaccggcaagaagatgacattcttccatgacccggacggactgccgttggagctgcatgagtaaaatgaagaaaacaagaaaaccaggcggtggtcggaagaagctgaagccggagtacgatgccgggaagaatctgaaagagcagatggaaagtgctgtggcactttatgattctgagatgtccttgcaggccatcggcgaagaactgggattaaatccaatcaaagtaagaaagctgctcatcacggccgatgtgtatgaatctgaagtggcggagaaggtgcaagctacctttcaagaataccgtgaaacacaagactacaaaacctccatactctcaactgcaaacactctgaaactttccaaagcctccgtcacctcgtacctgccatatcggaaaggtgtgtacttcccaagcacagcagaaaaagggaagatcagtgtcggagcagagcggcagcggagatacagagcaatgaagcggtggagggttgatccgacagaagaaaacttctggggcatggttgtgtcctatgccggggtaggatttaaaacctactctggattgccattctcttacgaaattaaaaaaggcaggaacggtgagtacacaaaagagctgtggatcgaccgccgggagaagagtaaaagtctagcgtggagttcagtgctgctggcgctgaagaatattaaaggagaagtggtagaccgcccgaaagctctgggcgatatccggggagtgacttacatctacggaatgttctatcggttcgggctgatcgatgtgccggacaaagtaaaggagaagatggggcatccgaaaacccgcaaaaaataggttgctatgtacagaagtgtgcggtaatatgtgccgtaactgaggatgtgaatctcggttgggaaggatggtagcattatagaaaaattgaaggaaatgctggaggagtatttgaagaaaacagagccggagtattacccgccagtggagaatctgctggatctgatctacgagcattacacggagaacaacccagtagagaaaaacacagttgccgggaaagcagcaaaggccaaggaaaaggaactagaagagtggctgcgtggcttggaaggtatggataggctggtagatgactacatcggcgataagattccactttgggagaagatcatggaccggcagggaacagtgtgctgtgcatgggagaagaccgcttttgaggaaggcctgaaagtcggaattcggctcataatggaagtatatagtttgtgacggaaataaagtgaactcctggagttcaaaaaaagccctcgcttgttgcggcgagggcgtgtgttcttatttttcaggcttttcagcttttttcttcttcggtgcaattttatgaccagagtagattgccatgcccatgcagaccagagagccacaagcgaaatacttgtgagccttcatcagtttcttgcagccggtgtagaagcatcctgccatacaggcaagtgctccgagtgaccaatacttatgtgttttcattttgtatgtcctccttatcttctttccgtattctaagcaattctgctatttcattgttactcgctaagcgtaccgctgacttctctttataggtttgtgctccgcaatcaggacaacgatcaggtagttcctcagtagagaagcagtagcggcaggcatcgcaaaagtagtagttcaattcagtgaattcctttcaagatttcaaagttcatccaccagccactgcattctgttcaaaaaatctactggaaacagcatataattacctcgcaaccgaccactagtacagcattgcttaaatatcagtgattaaattactaatggtatcccggcatatgtccacttaaatgggtgtgctgtaagattgtattgttcaataaagcgcaggatgcttgcttccagttcttctattgataggtagcttttccgcttcagcagcttccggttaatgatgccaaaccatatctcaatctggttcatccaggaactgtgtttcggagtatagacaaagcggatccggtgggaagggtcatgcaggaaatccgctcggctttccatacttttaaggatccctgttttcccttttttgcccagttccacgccaagggcacaggcttctgccacaaagcggacaagggcttccgatttatgggtgtttaggccatcgcatataaatgtccatggggcttgcgggtctgtccctaccaatgctttcacggcttccacaaaatcctcttctgtgcgtgtggagtttaaatacggcatttccatacggcccgttgcaacatcaaagaacccgatgaggctggtcgtgccatggcggatatactcaaactccattttggcgcactggccgggtaatgggagcttgtcaggatatttatgttccagcgcttgtaccccggtcatttcatccgtggaaacaatgtgtgcaccttcccggctttgttcctgggcactctggtacaggccgcagatttcgtttactttccgcgcaaaagattccggggcttccgtcttttccgaagaatgaagccagtaacggattttgtggggatgtaaatctacctcatttttaaaaaacggctgacagatttctcagaaatctgttcagcgatcccctgctttttaatttctgccactaacagcgggagactccactggcttacttcgtacccaaaatcatttgggctgctgcaggcaaggtcgatgatccgcatgatctggtccggcgtaaaaacagacggggcaccggggcgttttttatcggacaggactgcccgtatctcatcttcaagctttttcgggtcgtccatttcaatcctccgcaaggctgggagcgccgcgaggaaccgactgcgccaggtggcaacattattataatgaagcccgacctgtggtgcaatattctggttgagttccccctgtgacgcaagcaggacaatgctggctcttttgaccagtcctgacggaagggagcggctttttgaaaaagcagataatatgtttttcatggcatcagataaaaccgggatagtatcaattgttttccttcgcataataacacatccattctttagtgatagaattattatgcaccgactacaataaaaaagcaacgtctattcattattattttggcaatgctgtactaggtcggttttcttgtttatcgggcttttcgtgtcatcatattaaagtgctgttcctgatgcatgaccttaaagatccgttcaaagacagaacgcaactgttcaacactggtggcagatgagtcatagtatagtccatcattaaagccagtagccccaacattcagcatggcaatcatggcggcagcagcgacatagtcagatcgatcttcgctgccatcatctaaaattcttacgaattccctttcatttttatccagtaagtctgaacgcagatttccattttgataaccaaccatctggatgaagtagtattcaagaatctgccggatgacaatcaggagagtatccgggtcactcgttgtggcgtattcatgccaaagggtatcgtaagtatttcttactggagaacggttgataagaccgccgccggctatggtgtcttcatcttggcattctataatgctggtctgattttttgtgtctttctttatctcaaagaaggatacacattcataatcaggcaagcggttataagaaatttcccggaagaagtaagggttgtgtgtcatacagaagaactgtcgaatatggtcatccacaacttcttcatgaaatgcataattattatagcagacagcaatcatttcacgagttagggaagcaaccacaaatagagaaccactgtccatagaggaaacaggatcatcgattacaacaatcttatcctcgacttttccagcatcggactgactgcccattaccatgtgatagaagtacaggaaagcaataaaatgccgttcaccttcactaagatccttatcaacaacgacctttttgccgttctgatttcgtacaagctgatagacatatttggcaccaggtttttcctgaagctcaaaccctttaaaaccggcactggcgatggcacggttaatatcttgcatcgttttagtggtgttgacagtttcactgttcaattttgcgatctctttgctaagagcctgggattttgcattcaatttgctgctttcagccttgatataattcatggcttcaatcacagaatctgtgttgcgtcggaaggtatttgtaagtacctgagtccgctgaacgattgcagaccatgccatatcagtacattttttcttttgagtcggaatatcagcgagaacagcatttctggctttaatatcttcgttgatcttgcgtgaaatttggtcgagctcaacaagaaggtcagacaaatcttccaatactatcacatctgccgggctgtctgatttctgctccagcagggtcacattggtacgtgccttctccataaacagctcgaaagcagccttgtaatcagcctgcaatggcgaaggaaaattgttcccttcgtttgcatgagctgttttgtatacattgtttagtgcgtctttatactgttgaacaaacgaagacagttttttcagatcagctttgtattcggcatcatagcaggcagcaaggtcatcctcaaaagtggctggaatagtttgctgacagtaaggacacttcccttcagaagagtgatacttcgtatgtccctgagtaatccagtccaggttgccaagtgcacgtatgaatcgtgcgaattccgtatcgctgcggctgagaatcggtgtggacagaagatcagatgcaggaagagaagtggatgacagcaaatgataggcactatagtctggcttcttttcactatgaatggtttgataaagcgcctcgatatctgcaatttcaatcatcggctccgcttcggaatgatcttcacctgcggacatgctcatatcttcttcatcaaaagatggaatgtctggagctgttttagccgctttaggagtcatgctttgaatcttatcagcaaatttctttttgtcgcgcagataggctaatgcgagaggaaatttatcccggaattccttggtggcttcccaaatggcttcgacataatctccatgcagtttatccaattcaccttgctttgctaccgcctcttttccccttgcgacaatagtgtcatctacggactttttctcgatggccttttcgtcagcttcttttttcttctgtgcattgacttctgagatagtaaagacgcctggaatgttaccataactctgaacatttttgcggataaaatcctcattgtaaacaagaacacgttcttccgggaatggctgaccatcccatgtcagtgcagcgttcccatctttgaaagaacgggcaagcgtagattttccggttccgttttttccataaaagaaattgatcaatgtcggttcaaaggtcacgttactgtaggtcggggcattgacggttgtttttgtgatgtgtactcgtacctttttcatatccgttctactcctttatttttccctctcgtacccattcatccacttcgctgagcttgaatttatatcgctttcccactttataagcaggtagctttccatctcttacccatgtccgggctgtatcctgcgtgatgctcaggtactcggcaatatcttcaatgttaaaccatttatcttttaattcttccataggattctccttatctgattttgattcccacatttgcagcaatctggagcaggttaccctgtcgaatgcaccagtgctcttcatcgagctgatttctgacactggtagaaagaaggctaaatgtatggatgttttcgttaataaattgttggtaaaattgaccgcatgtaataaatttaaatttgatcatttttccttgacagacgatttctgtcagtttccctacgaaagcagggtagtatggcaaggctgtcttgaagttctgattacggctggcaaacaggcaaggcatggatagaagctccgaaataagcgcaggagtcaatggcttaaaatggtcacggtatcgggcactggtgtttttttgcagtgcagttttccggtcaatgcaaaaagctccacagtcgtatcgctcattttcaataacaaacacattaaaaatgtcagtgttgagcaacgcccattctgctgcatgggattccattttaggcccggccatttttgcaatcagggctagagcttgttgcgctgtaaggtcgagatgcgcttcctgtatattgatgccgccctgaacaatgcctgcggccacaccgttgccgcttgcagttactgtcatttgagatgtctgaactggcaggttgtgatcggtagtaattaaattatcggccatctttcgctacctccccggaaaggctccggcatcttgtagaacctcaatcaaatcaacatttttaatggtccaatgtgtacgtgtgtattcaaacagatggagtgccagttcctgctggtaagtgcggagaacggaataaggaaacggaaaatacttctgaaagtagactttgattccgttttcctgaatccgaatatctttaatgaatgcgaacacggcctgctgcgattcggtgccatccgcttcacagcttatgacagctggaatttccttgatagcggcaatcgtctctggggtcaaatcactaaacttcgttttgacatcattttgtatgtattctgtaagtgcgcggtcttttgaaaccagcacatagtctttctcaaaggggtcatatcccatcaataaagcatagtagtctttactgagggggctctttttcccatcgaccagcaccacatttaaggttgtgtttacagaatctgtatatcctatggcaacaccttcatgatcggcatgaacattgatggatggcaaaccatgtgattgctttgcaatttcattgtcactcatcgtttttcttcctccgatctccaatattgatgccaccgtacacgatgccagctgcaataccgccgtcttttgcttcaacatggaactgtgcaaggatacgctcaccagtcagcggatttgtaacaggagcctcatagacttcaacagtcggttcgctatagtcagtatgcttcgcagaattgccgctgttttcttcatgcatttcctctgatttaacagagaacagatcaaatgtaatctgtcgcggataggtttttccgattggactgataaatttccaacgggcacctacttcatctgcacgttcgtgaaactgttcaaaagttgcacgtcccttttcattatctggacgattcacaacaatatagtgccatacagcaagaagaagcgaagaaaggcagtattggtcgagggccagaagctctttcttagaaatcggagattcagaaagataaaaaagagtgccatcagtgacagagtgatcttccgaaagcagagagagaattgcctggataagccaacgcattctctcatcggactcagtatgcagaaaattgtcaacgagtgtatccatttggtgtaccacgctttgatattgtgatttgacccgattgtcaaatccatcaatttctgtggtgtcatcaaaagggagatttaatccgtgtgaaaccttacatgcacgatagtctgatgtatcgccaccaaaagtctttccgactgaaggctgatggaaggatggtacgataagttgaataagtgcttcaagtatatttttatttgaaacacggtcttttaacccgctttgcagttgtctgcgagaagcgggtttttcttttgcctctgtcagcaataagaaaaacacaccaccgcagagataaggtgaatattgtttttccatgattgtcctcaattttcaaaatggctaactctgctaactctgctaacacttgcagcgtagcaagaggaacaccaagattattcttgtaaagagaaaagaagtgatcccaagcactaagcaaattggtgtgtaacacatacaaaccaatataaacacttctgaaattatcatatcatatcctaccataaaaaaccagagccatagagaactggagatatggaaaataaaaaacttttttcccagatggttataaaaccaccccaaaaatctggctggttagaaaggaggagcagcagatgcagagaacaagagctccttagtggagaagtacatagtagagggcagtcagcgaaagcccgtgggtggcaagccagtcatcccaaagaaagctggatgaaaaacaaaataaactgagcctgaaatttaaagcgcaaatggcgaaggatgattttcatacggaagacgcaaagatggacaagccatccgagcatctccgtggagaccacccttaattcgccatgccatcaatcagacaggctccgtggacggattgggtaaagtctctacctagtccgttttttcttggaatctccttcgccgcgcttcagcgaaaaaggagattccgttatgacaatcaataataagacaacttttaaggaactgaagaaactggtcggcagcacaaaggaactggcaaagctcccgactgccaaggagttgcgtaactccgatgaggagatcgtgttcgatggcgatgtggccggcgcacacttcattatttataagaacggcctgtttatctacagccgcagtggacatgccacggtttatgcagtggatcgctgcacggagatcgaatacccgtgtgtttacgccgatgagggcggtctgaatgttacggccggatgcaagcacagagttaagacggaccgcgacggacagaagcacctcatcgtgatcgtgccggaaacggagtacatgaatggcccgtgggcaatgccgctggatgttgttggcacacaccggctggatcacaacagtgacagccgcgaacagagccacagcgatttcagcctgagcaacgatggtacagactgggaaaacaaagcaattacaccggatttcacggatgtgcaggaggcagaagaacgggaagaggagctgtgcagaaagctggaagaagcaaaaaagaagctgacagataagcagagagaagtgatccagcatgctttctatgaagatccggatcagacacaggcagagatggcaaagaagatgaactgttcccagccgatgatccataagcatctggatgcggcactcaaaaatcttcgtaaggatatggggttataatttcaccctcaaacctgactaagtgtaagggggcaacaagcccccggaaaggagttacacagatgaaaaaagtatatatctgttcaccgtatcggccgactggacagaacccggaggcagagcgaaagcggaatgtagaaaaggcacagacagcctgcaggcttgcaatcgatgccgggtatctgccgcttgcaccacacctctattttacccagatgctcaatgatgacgagctgttcgagcgttttctcggtatggcttacggcagcctgtggctggacgaggcagatgagatgtgggtgattggtacggaactttcggatggtatgaagcaggagctggaatatgcccggaagaaaaacatcccggtcacgatgaaaaaagtctgatgccgatggttataaaagcacctgaaaatctggctatgtgaaaggggtggtaaagccccggaaaacaaataaaggagataaaaaatatgtgtaagaacgagtacgaagtgaagatgcaggcaatggagctcatgagtgcagctgtcaatgatgtggtgtgtgccatggatgcaatcgacaagtttgctgaggcgtttggcctttgcgaagaccaggaagcagagcgcgagaaggatctgaagattctgatcgatgcggtgtgcgaacaggaaccgggcattccaaagtgtacggtggaccgtgtcatccgtactgcttttgacctgctggaagatgacgaagaggaggatgaggatgatgagtaaggaactgcttttgaagctggctgaggattattccgttctggcggaggatctaaagaagctggcgggtgaggaaaccccggcggagagcgagaaggaagaaaaggtggatgtgcctttcgaggtcgaggagaagaaaaagccgccgaagcaggaaaagaaaccggagaagaagtacacgatggcagatgtccgcaagaagctctccagcctttcttccggcggcaagaccgcagaggtgcgtgagcttctggtcaagcacggagcaaaccgcctttccgagatcaagccggaggactacgccgtgttgatggaggaggcagagaatctgtgagtgcgcattctgaaaaaggaccatccagctcggaacgctggataaactgcacaccgagtgcaaagctctgtgccgatatgccggatgtatcgaccagctttgcacaggagggcaccgatgcccatgaggtatgcgagtatgagctgaagaaggctctggggcagaagatggcctgcccggtcgagaaccttacttattataatccggaaatgcaggagtgtgcagacggttaccgggattatgtcatggaactggtggaggaagcaaggcagcggacaaaggatgtggttgtgctggtggagcagaagatccagtacgaacgctttgtcaaaggcggcttcggcacagcagattgcatcatcatcgcagatggtgtcctgaatgtagtcgattttaagtacgggcttggagtggaagtttctgcgatcgggaatacccagatgcgcatttatgcattgggcgcattggaaatcttcgacccgctgtacgacatcgacacggtgcagatgactatctaccagccccggaaggcaaacatctctgtggattccatttcccgtgacgacctgtatgactgggcggagcatgtgctgaagccggctgcgttggaagcggacgagggcaacggagagttccatgccggccactggtgccgtttctgcaaggcgcgtcatatctgccgggaacgggcaaagaagaatctggagctggctgcctatgagtttgccgcaccgcctctgctttcggatgaggagatcgtggaaatcctggaaaaggtagacggtctcctgcgctgggcaaacgatgtgaaagagtatgccctacaggaagcagtcgccggtaagaagtgggacggctataagctggtggaaggccgctccatccgcaagtacaccagcgagaagtctgtcgcagaagcagcggttgccgctgggtatgatccgtatgagaaacgggtgctgggcgtgactgagatgcagaagatgatgggcaaaaagaaatttgaagaaattctgggggcaatggttataaaaccccagggaaaacctgtcttagtgtcaagggatgataagcgtcctgagatgaatacgataaacgatgatttcaaggaggaaaattaatcatggcaaacaaaatgacaaatccgatgaaggtgatcactggtccgaagacccgctggagctacgcaaatgtgtgggagccgaagagcatcaacggcggcacagcgaaatactccgtgtgcctgctgatcccgaaagaggatacggtgacggtcgagaagatcaagaaggcaatcgaagccgcctataaggaaggcgaggcaaagctgaagggcaatggcaagagtgtacctccgctggctgcgctgaagacgccgctgcgtgatggcgatgtggagaagccggatgatgagtcctatgcagggcattacttcctgaacgccaacaacacgactgctccgggcatcgtggatgccgaccgccagccgatcctgcagcgttccgaggtgtattccggtgtgtatggccgtgcatccatctcgttctatgcgttcaacagctctggcaacaagggcatcgcgtgttcgctgaacaacctgcagaagatcgccgatggtgagcatctgggcggcaaggcaagtgcagaggatgactttgcaacggaagaggacgacgatttcctcagctgatgatgggaggggcggtccgctgcccctcttttcttttaacctttttctgccgggacacggcagaagtacataaattctggagggaaaattatgccacatgtattggaaatcaagggcggtgagctgctcaccccatttaatgtgtttgatgtgatggatgcggtcgaggattatatggggaccgacatccggcagtatctggaggagtatctggaaggtgtggagagcgatgcagaggagatcacggatgatgagatcaccgaccactacaagcaggtgctcctgaacatccgggatgagaccgaggaggtgctcaggctgatggaaaagccccgtatggaccggaaagcgatccgggaaacactgaacctgattgtaaagatgatcggaagggagaaataagatgaaggcaggaagaagtttgcaggaagtgctgatggaacttcagcggcagaaccaggcaaagaaagactatatcgctccggcgcagagcatgaagctggaaaaggatggacggacttttcagatggggcaggagaaaatattctccacaacggaattgttccatcgtcagttggcatccacgctggcgatcccggcaaagtattatgatctgatgcagaaagaaaagccggaactgctggcagagaatgcgaatgcctggctggataccagacagagcaattacatgatccggtcgatggattacggcactggtcctgtagcgagagcacttctctcggaaagatacagaaggatcgacaacatggagatcgcctctgcggtgctgccgctgtttgcaggcaatgacggatacagcgtggagagctgtgaggtgacagagaacagactgtatctgaagattttgaacaagaggctggagatggaagtccggaaaggcgatatcgtacaggcaggagtcataatctccaattccgaagtcggccttggtgcagtgtccgtacagccactggtatatcgcttggtttgtaccaatggccttattattaacgatttcggggagcgcaggaaccatgtcggccggcaggcaaagatggcagaagatttcacgctgtactcggatgaaactttggaggcagaggataaggcctttatgctgaaattacgcgacaccacaatggcagccatcgaggagagtcgttttgcacaggtagtcgataagctgaaggaagcggccggtatcccaatcaagggcaatgtgcaggaagtcgtggaactgactggcagggagtttggtatcacgcaggacgagcagaacggtatcttcaagtatctggtggagggcggagacctttccctttatggactgaccaatgcggtcacccgtgcctctcaggatgtggagtcctatgaccgtgcgactgcgttggaaggaattggctggcagatcatgcaaaggagagaactgtatgtataaaaagaagcaggagaaggaacagaagaaaaagaagcagatcaagcagacacccaaaaaacagtatacagaccagcgaaagagcatcggcaggatgatgcacagacggactgggtaaggaggtagccatgaaggaattacacattgatatagaaacgtattcctctgccgaccttgcaaagtgcggtgtctataaatacacagaatccccggattttgagatcctgctgtttggctattcctgtgacggcggtgaggtcagggtcgtggatctggcctgcggagagaagctgccaaaggagatactggctgcgctggaggatgagagcgtaacgaagctggcacacaatgcctcattcgagcgtgtctgcctgtcccggtatctgggctatccgaccggggaatatctgaacccagaggaatggaagtgtacgatggtctggtcggcatatatgggtctgccgttgtcactggccggagtcggtgctgtgctggggctggataagcagaagatgggagaaggcaaagacctgatccgttatttctgcgtaccctgtgcgccaaccaagaccaacggcggccggacaagaaatcttccgtccgatgcaccggataagtgggatgtcttcaaaaagtataatgtgcgggatgttgaggtcgagatgcagatccagcagaagctggagcgtttccctgtgccggattccgtatgggaggaatacgctatcgatcaggaaatcaacgaccggggcgtaaggattgacggtgtgctggtacagaatgccattgcaatggacaccgagatcaaggaagaactgaagacaaagatgcaggagctgactgcactggaaaatccgaactcggtatcccagctgtcagggtggcttgctgataacggggtggagacggacagtcttggaaagaagcaggtcaaagctcttatggaagaagtgccggaggagattcgggaagtgttgcgcctgcgtcagcagcttgcaaagagcagtgtgaaaaagtatcaggccatgaagaatgctgcctgctcggacggccgggcaagagggatgttcatgttttacggagccaaccgcaccggcaggttttcaggccgcctcattcagatgcaaaaccttccgcagaaccatctgccggatctggcagaggcgagggcactggtacggcagggaaatctggaagcagtaaagatgctgtatgaggatgtgccggacacattgtcccagctcatccgtaccgcattcatccccagagagggcgcgaggttctatgtggcagacttttccgccatcgaagccagagtgctttcctggatcgcaggggaagaatggcgcatggaggtctttgcttccggtggcgacatttactgtgcaacggcttcccgtatgttcggagtgccggtcgtaaagcatggtgagaatggtgagctgcgacaaaaaggaaaacaggccgagttaagctgtattgcagagggcagtttggtgctgacggatagaggtctggtgcctatagaaaaagtaaaacaggaagataaagtctgggacggagaggagtgggtgtcccatgatggtgtcatatacagaggagaaagggaagtcatcacctacgaaggactcacagcaactccagaccatttcgtctgggttgaagggaaatcggagccggtacagcttggattcgccgccacctgcggcgcgcatctcgtacaaaccggagatggtgggagagcattacggctgggtaaaaattatcagtccggagaagcgatggaacgaaaagcagaatcactgctatgttctgacacagtgcatgggttgcggtgcgatacagtggcagctcaggacaaatctgaccagtggaaaatcgaaagggtgccagaactgtactcagaaacgtcccattccgagctggctggaaaagagactggcagcagccaagcagagatgcgagaatccaaacgatgcagggtatgccaattacggtgcgagagggataaagttcgagtttcccagtgtgatagaagccggactctatctgatcaggcagtacggacatctaaaacgggagatggaactggaccggatagacaacaacggcaactatgcccctgggaatattcgtctggtaacaagacaggagaattctgcaaatcgaaggacaacggtactcggcagattcgagcagaagtattggccgtactgccagaatgttgttgtccggaaactgagcagtgggatgaaccgggacgaaatcattcaggatgcacagactgcggtattcgagaaaaggaagaactggcgaattataagcgcacggctcgactttatgatatacgaaatgccggacgacatcaccgttttaccgtatcgggacatctcgtccacaactgcggctatggcggctccgttggtgcattgaaagcgatgggggcgctggagcttggcatgaaagaggaagaactgaaaccgctggtggattcctggcggtcagcaaatccgaatatcgtccgactctggggtgagatcgagagggcggccatccatgtcatcaagaccaaagagccacagcaggtgaagtgcctgcggttcacttaccagtctggctttctctttatttatcttccctctggcagaaagctggcatatgtgaaaccgagactgggagaaaaccagttcggcggaacttccattacctatgaaggtgttggcggtacaaagaagtgggagaggctggagagctttggcggcaagctgaccgagaacgtgatccaggcaatcagccgggacatcctctgctatgccatgcgcacactccgttgttgttccattgtgatgcatgtgcatgacgagctgatcatcgaagcagacccacgggtcagcctggaagcaatttgtgagcagatgggacgaaccccgccttggacaccggggctggttttgcgagcagatggctttacctcggatttttatatgaaggattaagggacgagagaaaaaggaacaagaaaaaaatttaagagaaacaggttataaaagacctccgaaaatctggcgtggtagaggggaacgctcccttactctatagattttcggaggttattttattatgtttgaagtttttgattatcagggtcagcaggtcagaacggattacaaggacgaagctgtgtggtttgttgcagcggatgtgtgccgtgtgctggaactcggaaatcccaccagaacagtagaacgcctggacgatgacgaaaagggtcttactactattaagacccttggcggagatcagcagatggtagtggtgaatgaagccgggctttattctctgatcctcacgagccgtaaaccgcaggcaaaggaattcaagcgttgggtcacgcatgacgtattgccgtccatccgcaagcatggtctgtatgctgtggatgaagtgctgaataacccggatcttttgatcagcgcgttgatggagctgaagaaggagcgcgaggagaaaaaacgtctggaactggagaatgcagtcaaggcacagcagatcgccgagatgcagccgaaagtttcttactacgatatcgtccttgcctgcccggatctcgttaccattacccagatcgcaaaggatttcgggttgtcagcgaaaaagctcaataagattttgaaggaaaagaagatccagttcaagcagggcaggacatggtttttgtatcagaagtatgccgagcagggctacacccagagcaggacttacctctatgacgaggataaccatacagccatgcatacgctctggacgcagaaaggccggctgtttatttatgaacttctgaaggcagacgggattttgccggttatggagcgtgagtaaggaaatggaaagaaaagcaggaggaaagcgatgagagacttgaatattgcctacggcaacagctgcatggcgaagaaatggtcgaataagacgatcacctttggggagctgtgcggccggctggaaaatacgataagaaccacggagacagtcgaggaataccagaagatgaagcgcgccgagcgtgaagctgccaaggataagggcggctttgtcggcggtcagctgaagggcggcagaagaaagagagaaaacgtggtcagccgttctatgctgacgatggatgtggataagggtgaaaaaggcttcatcgaaagctatgagatgctggcctcgtatacctctgtcctctataccacccacggacacaccccggaagcacctcgtttccgcatcatcatcccgctgacccgtgatgtgacaccggatgaataccaggccattgcccggtacttcgcagccgaatggggcatcgaccagtttgatgaatgctcgtaccgtccgcatcagctgatgtactggccgactacgccatcgaatggagagtatatctgcgaaaaggtggagggcgaatggcttgacccggatgtttttctctcttttcaccctaactggcaggactgttctttacttccgaccagcagtagagagagcgaggtaaaggaaagcagcggcaagaagatggaagacccggaggcgaaaggcggcgtggttggactgttctgccgtgcttatccgattcgtgaagccatcgacaccttcctttccaatgtctatgagccgtctgccaacattcccggccgctattcctatatcccggcggattcctctgccggtgtgcagatttttgaggagaagttcgcacattccttccatgcatccgaccctgcctgcggtcgttccttgaattcctttgaccttgtgcgtgtacacaagtttggggacgaagatgagaaaaagagcttccaggcaatgtgcgattttgcgatgagtctggataaggtcagggtgctggcggcagaggagaagaaagcggaagccgacatggactttgatgacggtgaggactggagagagaagttaaggtatatgcccagaagcaaggtgctggagaacagtgtctttaacgaggtgctgatccttaataatgacccggacttccagaattttgcgttcaatgagatggcaaaccgcatccagatcacaggaaaagtgccgtggaaccgcccggacgataacaagttctggcgcgatgcagataccgcacagctgaaagccattcttgatacccgctatacttcattctctacccgtaatcacgatgtgagttttttgaaggtggcggacgaccgcagctttcacccggttagagattatttggacggcctgccgtcttgggacggtaaggaacgggtggataccctgttgattgattattttgatgcggacgataccccatacgtccgtgcggtgacccggaagatgctggtggcagcagtcacccgtatctaccatcccggcacgaagtttgactctgttccggtactggatggtgagcagggaattggaaaaagtacgttcttgaaggatctgtgcggagaggaatactacgccgacaacctgagcctgacggatatgaacgataaggctgccgcggagaaactgcagggattctggatcgtggagatcccggagctggccggcatgaagaaagcggacattgaaaaggtgaaagcattcattacgaccaccgatgataagtatcgcccttcttatggccgtactgtcgaatctcacccacggcagtgtgtggtgattgcaagtgtcaacggcgagagaggatacctgcgcgatattacgggtaaccgccgcttctgggttgttaagctgaagcagacggagcagaagcgtaagtggcattttacgaaagaagaaaaggaccagatctgggcggaaaccaagaaatactacgaggacggcgagaagctgtacttggaaggtgatttattggagagcgcacaggaggcccagaagagtgcaatggaaatggatgagcgccagggcatggtcgaacagtatctgaatatgctgctgccggaacgctgggatatgatggatctctatgagagaagaaattatatcagcgagaaagacagcccgacggtagaaaaaggtgtgagaatgcggagtgtggtctgcaatgccgaaatctggtgtgaatgctttggccgttctctgtctgatatgaagcctgctgattcctatgctatcgctgcccttatgacacaggtttacggctggacgaggacaaaggagagcattcgctttggcatttacggcaaacagagaatctacaagaaaacaacggaacaggaaaaataagaaaataaataggaacaatagaacaaggcagataaacaggaaaagaaaaacagtggaacaacggaacagggcaattaaggaaaaaacggaagaaaagcagagggtgggagggcggtagcttaggtcaaaagtaatcaactatatggaacaggaacaactttttctatatagagtgttttggtaaaaagagaaaatagaagcctgtgtaatacgcatataagcgcatatagggtatatagaaaaagttgttgtagttgtgtttctgttccagatgaaataaaaaatgacgaaagtacgagaaatgcgaaaaatagagaaaggaacgagaaaaatgcgggaggacacttatcagaatcgttgtaccaagcagttaaaagagtggggtgctccattggaaggctggtactgtgagagtgtagtggatgtaaagggagatgaggatgactgggatgatggggctggtttggcaacctgcgagctttgcggctgcgagcgcgtccgattcctgcacgtcatgggcaatccggactattttgaggaagtgaatgtcggctgtatctgtgccggcattatggagggtaatattccggcagcagtggagcgtgatcgggagatgcgaaaccgtgctggaagaaagagaagttttctgaagagggagtggagacaggatgaatggggagtgaagtacaaaagttgcggaggaaaaaaagtttatttccataatggctgcgtaatctgtggtggaaggaagatgagtgaatacaaaggaaaaaagatagtggacgaagtcacagcagatcatgccggattcattctggctgagaaggcgagaaaggagaaaaaagcaaatgagggaaagggagattgaacagaaattaaaaaaagaaacagaaaagcaaagaggaatgtgttttaagttcttgtcatctgtttctggtgtgccagaccgcatccttttactccccggtggtctggtgattttcgtggagctgaagaaagagggcgagaagccaaggaagctgcaggaggtacagatgcggaaaataagggaattggggttccgtgtccgggttgtggacagcgaacagggaattcaggaattgatgagggagatagaagattggaaaagttaaagagggagaatatgcacgagtaccagaggtactgtgtggatttcatagagacccacgaagaggcagctgtattgttggatatgggacttggcaaaacagcaattgcactgacggcgattttcgatttggtctatgacttctttctggtgagaaaggtgctggtggtggcaccgcttagagtggcgcgagatcagtggatcgcggaggtcggaaagtgggagcatttgtcggatttgagggtaagcgtggttgtcgggaccgagcaggagaggaagatcgcgcttatgagaagtgcggacgtgtatgtgataaaccgtgagaatgtggcatggctggtagaaaaaagcggagccgttctggattttgacatgctcgtggtggatgagctgagttcttttaagaattcagacagtaagaggtttaaggggttgatgaaattaagaccgaagataaaaagaacagtaggtctgacaggcacacctgcatccaacggcttaatggatctctttgctgagtataagctgctggataagggaaagcggctgggaagattcattacgaggtatagaagcgactacttcaagccggacaagatgaacggagcagtggtctattcctacaagccactcccgtttgctgaggaggaaatctataaaaagatttctgacatgaccatttccatgaagtctacggattacttactgatgccggaaaagatcatgactgagtgcatggtcacgatggatgaaaaggaaaagaaaaaatatgatgagctgagaaaagaattggtgctgaacatgggggaagaaaacgagatcaccgcagcaaatgcagctgctctctgcggaaaactttcccagctggcgaatggtgcaatctataccgatgacaaaaaggtgatgcagtttcatgagaagaagctggatgcactggaagacctgatcgaggcagccaatggaaaaccggttctggtagcgtactggtaccagcatgatctggaacggatcaggaaaagactggatgagaagaagatcgagtatgacaagatagacagcggcgagagcattaaacggtggaactccggtcagctccccgttggtctgatccacccggcttctgccggccatggtctgaatcttcagagcggcggaaactgcatcatctggtttggaattacatggtcgctggaactttaccagcagaccaacggaagattatggcggcagggacaaaattctcagacagtggttataaatcatatcatcacatctggcactatagatgagaggattctccgagtgctcaaaggtaaggatgcgacacaggaggagctgatcgatgcagtaaaagcaaatttaggaggataagaagatggcaagtgaatttgaatcatatgagaatctggccaatgcgattattatttcggcagcgaaggactaccgggtcgcactccgcagacagatgcggcatcccggcggacaagagacaaaacacacagttgaccgtttggagagctttttccggtcagcatggtttggggtgttgacggatgttgacggtgagtatctgatggcccgtatcagaaaagaagttgaagcagcataaaacgggaaacgatgacaaacaaagacaaaacatgccaatccgagtggaataaaaaatcggaggtatgcaagatgagcattatgtggaagtatctggataagagagcggcagcaattaaggctatcggtgattacgataatatgcagttcattatccgtaatacaaaagatgagattacggttgagagtgaccgaatggtgggtgtgggaagtccgaacatggatggtatgccgcacgcccacaatccgcaggcgggagaggagaggattctggatggcattgagaaaattgatattctgaaagaacggtatcggcaggcggtcgagtacatggactggttccagccagcgtgggatggtctgacggaagatgacaagtatgttctggaatgtttctatcagacggaaagtagcgatgtgaatctgatctgcgaccactttggtattgagcgttcctcagcttataacaaaaagaaccgtgcgctggacaagctggttacacggctctatggcaaggattgattcacggggctccgaaaggagcctcgatttttttgtttggcggttctgtttttgtattttatggatttgggagatgagtaaaatcgtggacgactttatggcaggagtgtgttatgatgggagcatgaaaaaaggccagacgagaatggccggagcgaatgagtaaaatcgtggacgacatggcggacaaagtgtgctatgctagtaccatgaaaataggcccggaggaaatccgggagagcagaagccttggaggatcaattcccccagggctatttttatgcccggaagggggaggataagatgggcagaaagaaccgacctgtaaaaatacgtaagaagtcgcttcctgatgtcaccagaattcagccgccaaagcggatggatatctggtacgcacatttgagggagaatacaggcacttcggtgcaggagggcagtcgtccggtactggtcatcagcaatgatatggcaaataagaattccgatgtggtcactgtgatcccgctgaccagtcagatgaagagaatcgaactgccgacgcactgcattattcgtgatctgctggatgaggattctgttgttctggcagaacagatcacagcaattccgaagtggagactgcacaggaaactgtgcagctgcacggatgaagtgcaggtaaatgaaatagaaagagctgtaaaggtacagcttggattggaggatatctaaaatgatgagcaattttagaatcgatttgggacagcgagcaaatgacaaggacctctttgaaaatgttgagaaacacttcgagggtgcggagatccagcaggtgatgccgatcccggagaacatggcagttatgctggtggaagtgaatgcagacgatgagcctgtctgctgcgacagccgcgacacgaactggcctactgggctggctgtggtgaaactcaaggatggcgtgggctgttacccgatcgaccttgtggaaggcgatttgaaaatcgaagcccagctggtgaaccgtcataagtgcggcaaatgcggcagggagatgaagatcctcctcaaacctggtcaggaaggctttgaggcaaagtaccgctgtgaatgctgtgaccggacggtcaagctgaatcctgatggaagtgaggaggacgaaacccatgagtaagattatcacctgtgaacaggtcagcaatggccatcccgataaaatctgtgaccagatcgcagatgccatcgtgaccgatattcttcagcatgacaagaacgcccgtgtggcaatcgagtgtctgctgaaaaagagccagctttttattgccggtgaggtcaccaccgactaccggccaaactacaatcagatcgtccacgatgtgttcaaccgcatcggcaccgaaaagctggggtggaacctgaccgagcttctccgcataggcattctggtggacaagcagtccccggatattgcgctcggtgtggacaaaggcggtgccggtgaccagggaatcatgtatggctacgccaccaacgaaacggcagagcagatgccgatcccgtacatggtcgctaccaagttcctacagcttctcaaggcacatccgtctaagatgttccgtgcagatgccaaggcgcaggtaagctacgattacgacactggtcgtatcaccaccttcctctgttcagtgcagcacagcctggatgtggaggtcagcgatttccgccacatcatcgaatccatgatggtgctggccgcctgcgagtacggtctggacggtgactttacgaagctggtcaatcctaccggccgttttgtgctgggcggcagttacgctgactgtggtgtgaccggacgcaagctggcatgtgatacctacggcggcattggacgaatgggtggcggtgcattgagtggcaaagaccctaccaaggtggaccgctccgcagcatacatggctcggaagatcgccaaagacatcgtgcaggcgggctacgcagacaagtgcgaagtccagctggcttacgccatcggcgtggtacagccagtcggtgtgtcggtggagtgtttcggtacggcgcaccagtcccttgacttcatcgaagcctacgtccatgacagctatgacctgaccccgcagggtatcatcaagcggctgggactgctggatgtagattacaacaaggtcagtgcttacggtcacttcggcaaggctggtcttccgtgggaggactgacccatgccgtacagaccaaagacaccgtgccgtcatcccggctgcccggagctggtggaagtcggccggctctactgtgagaagcacctggctctccatccagaagtcacccgcccggcagcgaagcgtggatacaacagacggtggcagaaagcaagaaagtcgtacctggaagcgcatccgctctgtgtgcagtgtgccaagcagggcaagtacgtccgggcaacggtggtggatcacatcgttccgcaccgtggtgaccagaaacttttctgggatcagaacaactggcagtcgctgtgcaagagctgtcacgataagaagacgctgaccgaagacatcaacccgacctacacctactgacagccccaccggggccggggtcacttctctacggtgaagtcacacggagaccggtggccccttttctgtgaaaaagcgcaaaattgataggccgggggtcagaggattaacggcgcaaaatgaaacaggaaaatgtacaggcatcgaagctttcgttccggtgctattctttttccccgaaatgaaccaaagtgtgtgaaacctctcgtaaacagggagctttcgcacattttagcttgttccgggaggagcaggggcgagcgggaatcggccgccgcaacaacgatccaacttggcggggcagtgccgatttccacttcgccgcttttcgcatgaattatgagatttttctaagaaaccgccgaagaaacggcgaaaaatgagagtgaggtgagggcagatggaagattacacggctgagatgatcagggacatggctttttccttctgccctcagtgcggtacggcaatcgtaccaaaccataaaggcagaccacggaagttctgctcaccggaatgccggtcacggtggaacaacacccacccgaaaccagagaactggaagaccgtgcggtcaaagatctgtccggtgtgcggcagggagttttcctaccggcaccagtatggtctggaacgaaaatattgcagccgtgcctgtgcaaacaaaggacgctggaaggagggcgatacagatggaaggaccgctgaacatagagcgtgatgtggtaaagaacggtgtccggctggactgtgtatttgagggctatgagtatcgcccggaaagagaagaagtccgaagccagcggcttgccgggtttgagtgttcagagatcacagaaaacaccgggctgtctttggagcaggtcacggattactgccgggagctggggctgccggaaacgggaagctgccagctgcagccgccggatggttcaggcgaacgccgatgcccggtgtgtggacggattctcgtgcagagaggaaacagcggcttgagacggttctgttctcaggattgccgggaggaattttacaggaaacataagccgttccggttagaggtctgtaaaaactgtgggcgggagttccgtgccgtagatgaaggcaaacggcagcggaagttttgcagtctgaattgttactgggattatcgatatgggatgaaaggggagaagcaggatgagtaagattatcggtgtgtatccgttgttcaacaccgggggtatctgtgtacatgcgattgacgatgcggaagaaaaggtgctggcatctgtgaacggggaaaacccggaatggtgtgagatggctgaacggccgcaggaagatggagatgagatggagtcgggctttttgttcggctcctttttcgtgccattctccggggtcatacgcatgggaatctgaattaggaggagtctacatgaaagcgactgctaaactgaagatgctgccggtgtccgtactcaagccggccgcatacaatccccggaagaagctgaagccgggggataaagagtacgagaagatcaagaactccattacggagttcggtttcgcagatcctttggtagtcaatgccgacatgacgatcatcggcggccaccagagattgaccgtagcgatggagctgggctacaccgaagtgccttgcgcggtggtggacatcgacaagaccagggagaaagccctgaacattgcgctcaataagatcacgggtgcgtgggatgattccctgctggctgacctgctcaaagacatcgaagattccaactttgaccttggcaagacaggttttgatccgcctgagatcgagacgctgttcaacaaggtacacagcaaagaggtcaaggaagatgacttcgatgtggaatccgagctgaagcagccgtgcttttccaagaccggggatatctggcatcttggtaagcacacggttatctgcggagattccactgacccggaagcatacaagaatctgctgggcgataccaaggtcaatctggtttgtacggatgcaccttacttcgtgaagttggagaatgcttctggcagtatcaagaatgatgatctggatgacaagtccgcttatgagtttttgatgaaggtctacgccaacttcaaaaatgcgatggcactggacgcttccatctatgaattctacgccacgatgaaagcccgtgtgttttacgatgctttcgaggatgcgggcttcaaggtgggagccggactgatttggaagaagccacgtgcgccgctgatgcgtactgactggaagttcaactccgaaccgatcatctttggatggcgcaaggatggccgtcaccgctggtacggcgaccagaagcagaccaatgtgtttgaatttgatggcatcaagaattcaaaagaggacggtttcggtcatccctctagtaagccggttccattgattgcctatctgatcaagcagtccaccatgaccaatggcattgtgctggatggcttcctcggcagtgcatctaccctgattgcctgtgaacagattgatcgaatctgctatggtgtggagctggaaccgaagtttgtagatgtggcggttaagcggtacgtccaatttaaggaaggtcactacgatgatgtgtatgtcatccgagatggtcagaagttgaagttcgatgaggtggcaacctttgagccggaaagtgaggttgccaatgagtaatgtgaaatacacattttccgatgatggaaaaacgggatatggctggcttcatgatggaactcggtttctgtttgatgcagaagacttcgagaaaattagagacacgaactggtatcgtaatctaaatgaagatgatagccatcgactttatatcactacccataacggaacctacctgcaccggtatatttttccaaatgtacctgcgggttacgaggtcgatcatatcagtctggacacgctggataatcggaagtgcaatcttcgtgtatgtactcaccagcagaaccagtgcaatcagcccttgcagagaaacaatacttcaggtgtatcgggcgtgagcttttatcctccaagaaataaataccgtgcaagaatcaaagcaagtcagcatgatatccatcttggatattacctgacttttgaggaagcggtacaagctcgaaatgttggtatgcggtgtatgtttggagattatggtcggtataacgatgtggccgatgctccagagtggataagaaaacaggttacggaaaaatgtatgcgctttgcagactttgcggtttgtggcacattttgtttttctggggaggtcgccaatgagtaatgtgaaatgcgtcctcatccacgacaacttccagaacttcaagtcctacaacatccccaaggcgcagctggtaatcgcagacattccgtacaacatcggtacggatttctacgccagccggccggactggtatgtggatggcgacaacaaaaacggggagagcagcaaggcaaggaaagcggcattcaataccgacttcaccttcaacattgcagagtatttccatttctgcaaccgactgctgaagaaagaacccggcacgggcgagaaggatgcgccgtgcatgatcgtgttctgtgcgttccagcagatcccgaaggtgctcaccgaagcagagaaatacggcttcaagaattatatccctctggtgttctgcaaggactacagtccgcaggtcttaaaagccaacatgaagatcgtgggtgcaacggagtacgctctggtactgtaccggggaaagctcccgaagttccgtaatctcggtgaggatggaaagccccacatgatcttcaactggtttggctggaagcgggatggcaaggaatatccgaagatccatccctcccagaaaccgatctctgtgctgaaacgactgatcgagacctttacagatgagggcgatgtggtcattgacccctgcgccggcagcggctccacgctgagagcagcaagagaacttgggcgcaacagttacggatttgaagtatccagagatttttaccggaaagcaaatgagcagatgctcggagaggaggcttccgcatgagcacagaacagaataagaccttgaccctcggcagcctctttgatggctccgggggttttccattgggtgggcttttgaccgggcagatcactccggtgtggagcagcgagatcgagccgtttgccatccgggtcacgacgaagcgtctgccgcaggtgaagcattacggagatgtatccgccatcagcggtgcagacctgcctcctgtagacatcatcacctttggcagtccctgtcaggatatgtccatcgccggtaagagagatggtctggatggttcacggtccagcctgttttatgaagcaatccgaatcgtgaaggaaatgaggtgtaagaccaatggagaaaaaccaagatttatcgtctgggagaatgtgccaggggccttctcctcaaacaaaggacaggacttcaaagcagtcctcgaagctgtcatcggtgttaaagaaccggccgcctcggtgcctgcgcctgagaagaaaggatggcccgacgctgactactacgtgggagacggatggagcgtcgcgtatcgagttcttgatgcacaatggtggggcgttccccaaagaagaaaacgtatctaccttgtcgcagattttgcagaccagagtgccccaaaggtactatttgagtccgaaggcgtgtctcggtattctgcggagggcttccgtgcgtggcaaagagctgccgccggtgctgaaagcggcactggagaggcaggcttcagcggagcaggaggacggatctgtctgaacgaccagggcggtaagcagatggatgtttcccaggatgtgaccggaaccctccgggcagaggagcatgggcatcagccgtgtgttctggaagctgccggtttctgtaccgagcattcggcagatgccagaagcatcggatacgaggaggaacgctcaccgaccctccgggctggtgttgtgcctgccgccatcgcactggaaaatcatcctgctgacagccgggtgaagatttccgaggacggtaaggtgcagacactgacaagccggtgtggtacgggcggcggtaatgtcccgatggtcatggacgctgttgaaaattcagtggaaagtccggtgaaagaagttgaaaactccccggcagtcacactgaagatccgctccggttgcgagggtggcggcaagggagccatctggcaggaagaaaagtcagccaccctcggctgcaacaacgaccagacactgttcgttccgaaatgctatggtgtctgctccaaagccagccactccatgatgtccgataatccgcacagcggtttttatgaggccgaaacttcccggacactggaccgcagcggtggtgacccgacctgcaatcagggaggactgtgtatctgcgaacctgtagtttgtgtggatcagggtggcggtaagtcgaactgtacggtggacgagcaggtggcaccgacactgtcgtgtacacacggcggtgcgccagctgtcgcctttacccagaaccagagggatgaagtccgggatctgggagagaagtcagcggcactggcagcagagccggggatgaagcagcagacctttgtggcacagccggaagatgtgactgcgttccatgtgaaccagcgcaatgagctgatcgacctgcatggcaagtccggagctttgatggcgacccggagtgatcagatgcagaccttcgttctgcagggcaacatgatcggccgcaaggatgagaacggtccgcagggggatggcgtcaatgaggatgtctgctttacactggatgccactgaccgccatgcagtctgcgcaccggaggatgtgtatgccatgaccaccggctcttatatgcaggtggcaaaagaagtcgcaccgaccttgatggcacgggattacaaagacccgaccaccatcgcaccggtgccgcatctgaacgagggtgtcatgggaacggtagcagccggggcgcatcccagcggcttcaacgggcaggatgctttcaatgaccgtctggtcatcgacaatccggaagcacagccgacacctgtgacctataccgtccgccgtctgacaccgaccgagtgtgccagactgcagggcttcccggactggtggtgcagggatcttggaacggaaaacccgaccgaagaagagctggcgttctgggcggatgtgtttgaaacgcaccgcaagatcgtgacccatgccaagaagccgaaaacggagaagcagatccggaaatggctggctgacccttacacggattcggcagagtaccgtatctggggtaatggcatatgcttagccaacgcattctttgttctggccggcatcgcatggtgcgcaggtctggaagaataaactggcccgctatattactagtataactcgatttaaataagcttacaatttaagcattggtagtaatctgatttcttggcttacgtgtccgtgctttgggcgcacgtttcccttggttttcaggataataatgtaaacttattaaaatcgagttatactaggtagaaagcgacctggtgatatggtgggcttacatattggtcctatttacacaacaggtttcgcagtcccttgtgtaaatggtcgaacatgaagaatatcgggaaatggccttgctattcatccggtttagagtgatatatgtgctaccgaaaagaacatcgggacgcaaaaaatgaacgagaaggagcgatgaatcatgttgaaatttaaactgaacgtagccgagcgcaagaccctcgcaaaacgcatggaggaactgaccggcattcacccttactataccaaagcacctctgtactcctacgacattgggagctacacaatcgaccggaatggcaaccttctggtcgagcctgagaatgcagatgccgaactgttgacgaccctgctgaatgagggactgatccgcggcggcgagagcattgagagcatggatgaccagttggaggacacagagccgaccgaccatttggaagaggagcctgtgactgaggataccgaagcagagccggaagctccggacgagcaggaatccgaagatgcagataccgcagaggaaaacgagcttgcggaagccgaatccgaggaagcatcggagccggataatgcggcagaggatgagccggatgcagaggggccggaaagcgaggagcaatcagaagcagaagaccagccgggagaagtgccgctggacttggaacttgcattcccggtcagccagcacaatggtgtgactctccgcaacctggtcaaccttctttacagccgcggcaagctcatcggcaaggcgactggcggacacttccatgtggaagaggggctggtcgagaagctgaaggacgatagctgcacctttgccatcatgaacttcatcaacgcggtcagcgactatgagactgaacatggtgctgcactggaaggcttgaagatcaccaccgagaaggttaccttcaccggcttcccgactgcaccggaccacgaacatctgacggcttttgcacagctggcggtgctgatgaaccagcaggctatcagccagaagcgcatccaggcaaaggatgtcaacgatgagaatgagaaatacgcactccgcacatggctcctacggctgggcatgaacggtccggatttcaaggaaacacgcaagatcctcatggagaacctttccggccatgcggctttccgcacggatgaggaagcacagaagttccttgcaagggaaaaggcaaagcgggatgccctgaaagccgcgaaacaagccgcacagaacggcaatcctgccacaggggaaacggtcgcaccggatgcagcccagccgacacagcccgactgtggggcagacacggcgcagatgctggaggcgggagcgtaagctcccaagcccccaatgggggccggaaaatatgcgacaccctcttccattgtaccgatattaactctgaaaatgtacattatcaagcggataaactgcagaaatgtacacgatcattccacctcatatttgtcgaatatatgttcttttatatccttgctattatccgcacctgacggtaatatgcacataccgaaagggaaaacaaggaaaaagccaaaggagaacataccatgaacgataagacaagagagcagattgaagccatgaagaagcagaccatcggggtcgagatcgagatgaacaacatcaccagagaaaaagctgccaagaaggtagccgaatacttcggaaccagagcatggtacgcggacagagaatacggatattccagctgggcttgtaaagacccgcagggcagagtttggaaattccagaaggatgtgagcatctacggaccggatgcagagaaatgcgaactggtcactccgatccttatctacgaagacatcgaaaccctgcaggacatcatccggctgctccgcaaggcaggcgggaaaagcggaccgagccgcggctgcggtgttcacattcacataggtgtgggcgaccacaccgcaaagaccctgcggaatctggtcaacatcatggcggcacatgagcggcagattggcagagccatccgcatcgatgccggacgcaccggacactattgtcaggtggtcaaccaccgcttccttgaacggctgaaccgagagaagccgaccaccatgaaccggctggcagacatctggtacgaaggcaacggttccagctgggaaaaccggaatgcccactacaattcaagccgataccatatgctgaacctgcatgccaccttcacaaaggggaccattgaattccggcttttccaattcgcagaccctgcggacggcaagcgcaacggactgcatgccggtgagatgaaagcctacatccagctttgccttgcgatgagccagcttgccaagatggtcagaacggcaagcccaagagcccagcagaccgacaacgacaaatacgcaatgcggtgctggatgctgaggctgggattcatcggtgaggaatttgcaacggcaagggaaatccttctgcggaacatggagggcaacgcatcctggcggaacaaataagccggaatgcacgggcaccttttgggcgggcaaccgcccttgaggtggtagaaggaggtgcaggattatgaaaaaaagcacggtaaaaaatgaaatcacccagatgggaagggcattcaaggtgaccatcaccgaaacctaccagagaaccatcacggtgtatgaatccgaaatgaaagagccgaccgtccaggaagccgagcgcatggcggaggactggtggcaggacagccagattgaacttgaaaaggaagattttcagggtgtggaatttatgggcagggaggacggtgcttcggatgaatgagcggtttgaactcatcagtcggacaccatcgaagttctaccttgcctacggaagcaacctcgacatggaacggatgggacggagatgcccatacgcagtaccggtcggtgtgactgagatctacggctaccggctcctgttcaaaaagagcaagaccggaagctacgctaccatcgagcaggatgccaacgaaagcgtaccggctgtggtctggaaactctcggaatacgatgagcttctgctggatcggtatgagggtttcccacggtactactacaagaagcagttccagcttccagtctggaacatgagcggcaaccgcatgaagaagccgaagacctgcatggcctatgtgatgcacgaggagcggcagcttggttgcccggatatcgagtatttcgatttgctttgtggcggctacagcgactgggagttcccgctggacacactgaagcgagggctttccgccagcatcggaagaacggaagcaatccggtatctgaggaaactgcggatggtgtaaaagtacacggtcaaaagcaaaaaacattgtgcagtatatgatgctcatcggccttgataaatcagggcaaaagagtgatatataccataccgccagacaagagcggagaaaaccgaagggagagattcaaatgaagaacaagaaatattacatcgcctacggcagcaacctgtcggtggagcagatggcagaccgatgcccggatgcaaaaattgcagggcaggcggtgctggccggctgggagcttttgttccgcggctgcgccaccatcgcaccgaacccgaagaagaacacaccggttctggtgtgggagatttccgagagggacgaaggaaacctcgacctctatgagggctacccgaactactaccgcaaggaagacctgaacattgaactgctccgggaaggggcagagccggagatggtgaccgcaatggtctacatcatggagaacgacttcggacaccgcgcaccgagccggtattactacaaagttctgcatgacggctacaaggcattccacttcccgatgcacatcctcgaaggtgcgctgaaggaatgcatggataaggatgccgcccagcggatgatcgaggaggtgcaggcatgaatttcgcagataagaaaacggtcgagaagctgagaaaagagtttccggttggatgcaggatcgtcctcgatgagatggatgacaggcaggcaccgcccatcggaacacagggaatctgcaacggggtcgatgatgctggaaacgtcttagtgagctgggataccggaagccatctgaacgttgcctacggcgcggacagttgccaccgtgtggcaacggatgccgaggtcaaggtgtcgctcgaccgccttggtaaaacgcgacagaccggcccacgttgccccaggtgcggagcaaagcctgactgctacgaccatcagcaacaggcactcagccgaagggcggacatccagatttgcaaccgctgcggaactgaggaagcgttggaaagtatcgcatggggcagacagcagaagatgcatcttgcagactgggcaatcgtgaaagggggctgggtcgaatgaaggttcttctgatcaagccgatggagcatccgcaggtggtggacattgaaaactccctgaaagagttctaccgcatcctcgactgcgactgcatcacagccacgtacccttgggaagcggatgccgtggcactggtaacggacgacaatgggatgttcactgagaagccgttcagccggtacattccggagctggagcagcccatcaaggggaacttcttcatctgcgggttgggcgaggaagatttcgcagagctgccccaagacctgatccggaaattcagggaacgcttctgggtgccggaggcattcgtcagcatgttcgggcagatggcagttatccagatggatgacggaacgaagccggaataagataccacaattagaaaaaataccctctcggccagaaaagaccgggagggcttggtttaacaggaggagcctatgggacacagaaagatgcctgcttatggcgagagggaacacggcggcagatacattctggatgaatacgaatggtcaagaaaccactgcagggcggtgaccatccgcagatggaaaagggacctgaaaaagaaagccagagcgcataaccgcaggttgatgcatctggcaatacagggcgaagccgattagacggaaaatgggggcctcaaaagaatgagaacccccttccagtttactgtatattagctctggaaagcaacaatagcaaggagaaccgccgccataatgtacacaaacatctggcagcggttttgtgtatcataccaaacccaaacaggggatacgaggcagagccccagcctctgctggggagcctctgggggattccttagaagaaatccctcctgctcatgccgacctcgttcagtcgttcctccatgctgtggtagtgccaatcctcttcctcttcttcgtcctcttcctcaagctcctctgggaaagggtcgtgccgccatccggctttctggtattcttcttcccggatgtcgttgcggtcgtaaatgtccagctcgtattcttcttcaagctctgcgatgcggttttcgattgcggtttcaacttctgtaatggtctttttcatggtttttgtcctccgtttttggtttggctttctttgctttcgttgtgtgtataatgccgcagaaacacatatatagcaagtcaatcaggggtcatatatgtaccaaacatgaggggcgaagatcgttgataatatgacgttttatggccttgctatcacagggcagtgacggtaatatacagctaccaaaacgaaaggggcaaagaacatggaacgctacacttacgagatcacctttacacggctggatggacagccggatgaaatccagcagcacaccagcgaggagctggcaagagaatgcttccggcttttcgatgagccggacagcgcagagatgtacagcaaaattgaacttagccgccatgactgggagacaggcatggatgagattctggaaacgatgacattctgagaggaggaaaatacgatgacctacacaaaaatcaacctttaccttgcaaacggaattccggaggcactcagtaacctctggtacggaagcgacagcgcggtggtcgagatcagggatgctgttgaggatgcgaagaacggcaaagaccttctgaaccgcatccagaagatgaagctcctgcggaaattcaccctcgacagggagaccgacaagcgaatccgcttcaagggaacggactgctggggcaatgtaagctacctcgaaatcatccgctaaaggcaagaccgacaggcgcaaggggctggaaatgaccagccttttgctcgtgtctgtcttccgaaagccggcatgaaaagcacataaatatgacaattacagggcttgatgatcgtgtagtttagccgcttgatagtgctccgaggtgacggtaatatacagtcaccgaaaggggaaaacaacaaaaatggaggatacgacaatgacgaagaacgaagaacgcatcaataaacttttcagggaactggtaccggagacgggcaaggcagacagcctcgcaggggagctggtaagggcaatgagccgcatcggataccgcttttacaacgacggcgaccagctgggcatcggctacggcaaggaaacctgcaaccctgcagggcggttccttggagtcaagggcaacgacaaaatcgcaaagctgactgcagatgcctgggcagtctacagcgaggaagcctacgaaaaggttctggacatcctttgcggagcggttgccgactatgtcgagcagaacccagaccttagaaaccagccgaccgaagacatgtgggacttcaaggatgaggaagaagaccaggatgatgactgggatgaggaagaagatgactgggacgaagaggactacgacgaagaggactatgacgaggaagaagactactaagccagagaaacacatggggcttgccggaaaacggcagcccttttcttctaccgtaatactcacagttctgatttccaatctttgtgtagtatagccgcttgatagtgtgtggaagtgacggtaatatgcacataccgaaacggaaaaccaagaaaaacggaggaaaataccatgaagaagaacatcaccaaggaagaggaaaaagccctgctggagatcgccaagcgcctgatggcagcggtagacagccggggcgacctcgaagcccgcgacaatgacagcgaggacttcatcgaggttccggtctggggcatccagaaagcaatggaagaagcctacctgctgggacggatgagcagataaaccggcagcccccgacacagccccacgaaggggcttgtgccacgggtggcaaaacaatccgagtgaaccgacaacgccccagacaggggcagatgtggcggcgtggatgcgccaggaaggagaagcacatggaagaacggatgatggatgtcatcgtggaaatctacaaccacatggacgacagcgataaggatgccttcacgctggaggatgccgaggatatggtggaagaccagatcaggatggataaggaagccggacgggaaccgctggcatatgacccgcagttcttctacgataccattgtggaacgcatggaacaggatgcagagtgatgtacattctgcttggtattccgggcggaagatcgtgtactttagccgcttgctatcctttgcacctgacggtaatatgcacataccgaaaggggaaagccccaagggaaaaacgaaaacacggaggattttaccatgaaaaagcatttgattgacttcccggaaaacaacatcagcatcgagaacttctacgacaggctcagaccttgctacgacagcatcatgcagttcggtgacagggttctggttgcccagatgaactggaacggtatgctggagggagcggtatacggctttgtggaagacccagaggaaggctggtcaccgattgagtgccgactggagcttctgaagatttccgatgagacctacaccgatgcaggacacgcaattgaatggtgcatcaagaacgcacattgaaaaagggcagagctccttcgggggcttttgctcgtagtggcggattcttccagtgtggaaatacacataaatccgacaaaaagaggtgtgtatgatcgtgcagcatagccgcttgatagtatccggcagtgacggtaatatacagtcacaacgaagggaaaagccctacggaaaacaaaacacacggaggatacagaccatgacgaacaaagcaaaaacctaccttaagaacattcaggaagccgacaccgagaagaagctgatcggcatcgagatcgccttcaagcaggatatgaccctcagctgcaacgacctcggaagcctttgcagggcggcagaggacaggcggtacagcctgcggaacaacgaggaaacgctgaagctgaagcagatccttttcttccggacgaaagcggagatggatgcctaccacgacatgagccgcaagccggaagactggacagcagcggagatcgagcagcaaagaagccgctgctgcagcgtctggcaggtcatcgaggaagcggagctggtcgatgaatacgaggcttggaaggaagccaaccccaacgcataacagcacccaaaaggtacacgccccgaaaaggggatgtgcctcgtatccgatgtgttttatatagatttcaaggacttcttcggaggtcctttttctttacccatttttgcagaaaggaggagatgccaatggctaccagaggcagaaaaccaaagccgaccgccatgaaggaactggaaggcaatccgggcaagcatccgctgaacaccagcgaaccgaagcccaacaagaaagcgccggcctgtccgaagtggctggagccggaagcaaagaaagagtggcgcagactggccaaacagatggaagccatcggcatcctgaccgaagtggatatggctgcctttgccggttactgtcaggcgtatgcccgatggaaagaggcggaggagtttatcacccagcacggcaccatcgtcaagaccccgtccgggtactggcagacaattccgcaggtgtccatcgcccagacttatctaaagatcatgaacaagttcgcagagcagttcggtctgaccccgtcctctcgaagccggatcattgcttcggacagcggctctgcggatgcagccgatgaaatggagaacctgctgggaggtggtaaatgatgatgacaaacaggattgagttgggtgagcatttctgcagatatcgatgtgcaaacggtcgggaatttctctttgataaatgtgattgaaacaatctcaaacccccagcagagctggggagactcgtggacgcaaggggcgataaatgtagtatcaaattaaaaacctccgttgtacaatgaatgtgggtctagcaaaccacataaaaaacaacggaggtatccatggataatcaaagtttagcacatagtagatataattgcacgtaccatattgtatttattccaaaatatagaaggaaagtgatgtttggaaagttacgaaaagatgtaggagagatattaggaaaagtatgtaaaatggaaggagtaacaatattaaaagcagcgacccttccagaacatgtacatatgtatgtatcaattccgcctaagttaaatgtatcaaaaacaataggtcgaatcaaaggaaagagtgcattaatgatattcgacagacatccagaatatagagatagaaataatcgtcacttttgggcaagaggatactattgcgaaacggtaggtaacgttaatgaagaaacaataaaacaatatatacaagaacaatacgaaagagatcgcttagaaggggactcagaaaagtaaaaaagagccgcttttaagcggccaccagtaactaaaggaatggtttgttagaccgccttcaggcggaaatgcaatgcgccctggaagggcaaacccaaaccaccagcagagctggtggtactgactttgacgttcttccaagataaaatctgcacggttgatgagcggggatatgtaactaccaatagaaaaaaagatatggtatctcatttgctgctcaatgtgggaaacgaagttgtagtggatcatatcaacggcaatccgtttgacaaccgccgttgtaatctgcgagtggctaccaatgtgcagaatcactggaattataggctgtcagacagaaacacaactggctacaaagggatttacaaggataaacgcactgaaaaatatcatgcccgcatctgtgagcatggtagaagacattatcttggggcgtatgccacagctgaggaagctgcggtggcttatgacaaagcagcgagaaagttcttcggtgattttgcaacactaaattttcctgagaaagacgaacagggatgcaatctggaaagagaggcggtgtaacagtggcagaaacaagacccaaaaactatccgaaactgaaagactacaggcctagtcggttcatgcttccgacctgccactatgatgctgcaaaagcagaccgggcagtgacctttattgaaaacctgcgtcataccaaaggcaagtgggcgggcaagcggttctggctgcttccttggcaggagcagatcatccgggatgtgtttggcattgtggatgagcgtggcaaccgtcagtttcgcacggcttatgtcgaaatcggtaagaagaacggcaagtccgaacttgccgctgcggtggctctgtatctgctttttgccgataacgaaccctctgccgaagtctatggtgctgcggctgaccgccagcaggcgtccatcgtttttgatgtagcccaccagatggtgcagatgaccccggcacttttgaaacggtgcaagatcatggcggcaacgaagcgtatcgtgaattacggcaatgcaggattctatcaagtcctgtcggccgaagtcggcacgaagcacggtttgaacgtgtcgggtctggtgctggatgaggttcatgcccagcccaaccgaaagctctatgatgtccttaccaaaggttccggtgatgcccgtgaacagccgttgttcttcctgatcaccacggccggtacggacaaggagagcatctgttacgagctccacatgaaggcacttgacctgttggccggacgtaagatcgaccacaccttttaccccgtggtctatggtctgacagatgaagatgactggcacgatgaagccaactggtataaggcaaatccctcattggggcagaccattcagatccagcgtgtccgggatgcgtatcaggaagcactggataaccccgcagaggagaacgtatttaagcagctccgtctgaacatgtgggtgtcctcgctgacccggttcattcccgaacacatctacaacctcggcaatcagccaatcgacctggaagccctcaagggccgtgactgctatggcggactggacttgtccagcaccggagacatcacggcttttgtgctgatgttccctccaagaacctcggaggagaaatacatcatgctcccgtttttctggattccggaggatacgatcccccagcgtgtgcgcagggcatccgttccgtatgatgtctggtaccagcagggctacctgatggcgacagaaggcaatgtcatccactacggatttatcgaaaaggtcatcgaggagctgggcaagacctatcacattctggagattgcctttgaccgatggggagcggtgcagatgacccagaaccttgaggggatgggattcacggtcgtacctttcggacagggcttcaaagatatgagccctcccaccaaggagttctacaagctcctgatggagggcaacatcgtccacggcggcaacccggtcatggcatggatggccggcaacgtagttgtggacaccgacccggcaggcaacatcaagccgaccaaggcaaagtcgccggagaagattgacggtatcgtcgctgcgatcatggcactggaccgctgcatccgaaacgaaggacagcagcagggaagcgtctacgatgagcgtgacatgatcgttttttgataggaagatttggaggaaaaagctatgaagtatctgatgagtgcagaatggtggaaggcagccggcatccgtgcggtgaagaccatgtgtcagaccggcgcggctctggtcgtgacacaacttcccggcggcagtgtggactgggtcgctgttggcagtgccgctatcgtggctggcgttgcttcgctcggtaccagccttgccggtctgccggagctggagaaaggggataatgcctaatgggattctgggaatggatgggatttgagaatccgagagattctcccaaaacagaacagccgaaagagggtctgccgcagatcacggataatgtccgcgattccgggcagacctttgtgtttggccgttccaatgccggggagcaggtggatgaaaaagccgccatgcaaattccgaccgtgtacgcctgtgtccgtctgctggcagagtccattgcggcacttccgctgcatctgtaccgggtgacagacaaaaacggcaataaggagaaggcgcgagatcatccgctgtacaagattttgtatcggcagcccaacccggaaatgacatcctttgtcttctgggaaacgatgatgacccacctgcttctctggggaaacgcttatgcgcagatcgtccgggatggcaagaatacggtgctgggtctgtatccgctgatgccggaaaatgtcgaagtggaccgtgacgagagcggagaactttactatatctatcacgcttacacagatgaagttccgggtgagcagaacaaagacctctactttcgccgggatgagatcttccatgtaccgggtctgggctttaatggtctgatcggcttctcgccaatcgccatgatgaagaacagcctcggtacttccattgcggtggataagtacggctcgtccttcttcaaaaacggcgcacagcccagcggtgtgctggaacatcccggcgttgtgaaagacccgaaccgtattcgggatagctgggaagcggcttatggcggtgcttccaatgcgcatcgtgtggcagttctggaagaggggatgtcctacaaaccaatctctctgccgccagaggacagccagtttttggagacgaagcagttttccgtgacggagatctgccgcattttccgtgtgcctccgcatctggtggctgacctgtcgagagctactttttccaacatcgaataccagtcgctgaacttcgtgatgcattccctgaccccgtggcttgtccgcatcgagcagggcatcatcaaggacctgctgctggaggaggagcaggatacctacttcccgaaattcaatgtggacggtctgctccgaggggattaccagagccggatgaacggttatgcgaccggcatcagcaacggcttcctctctccgaatgatgtgcatcggctcgaaaacatggacctgatcccggcagaggagggcggtgacgactactatctgaacggcggctatgtgaagctgagagatgcaggtgtggcgcagcagaacaaagcggccgcagtccagcagaatcagcccaaacagacacagccggaggaggaagacccggaagaagaacctgacagcgataaccggctgagtgagagtaagccacgaaaaacaggaaggagaacccgatgaagaaattctggaactggatcaaaaacagtgatgacaccagaatcctccggctggaagggcccatcgacgaggaatctttctggggcgatgaaattacgccgcagatgttccgggatgagctggaatccggtgagggggatgtgaccgtctggatcaactctccgggcggcaatgtgttcgccgctgctgagatctataccatgcttaaggactacaaaggtagcattacggtcaagatcgatgcgattgcagcttcggcggcatccgttgtggcaatggccggtgataccgtccagatgagtcctgttgccatgctgatgatccacgaccccagcaccgttgcgatgggcaacaccaaggatatggagaaagccatcgaggtgctgaacgaagtcaaggagagcatcatcaatgcctatgctgcaaagagcggtctcagccatgcccgtattgccaacctcatgagcaatgagacatggatgaatgcgaagaaggcggtggagctgggctttgcagacgagatcctctttgcaaagaaagaggacgagccggacagtgacccggcagacccggaggatccggaagaagaccccgacagtgaaccgggcgagggcggagaaaagaagccgttccagaaggatacggcagggcaccttttctccagccgtcagatggatctaatcgtcctgaaccgtctgggtgtgaaaccggaagatgtgggccagaaacacactgagccgaaggagccacctgctgacccgaaaccgtccgcagagcctacccctccggcagagccgtccgctaatccgggacctgtccttgacatggacggtaagaccgaggatggcagcatcccctacaatatcctgatgaaacagcttgagtgcatgaagtgatgtgcattcaggctgtttttatatccaatcaaccatcacaaatttatggaggaaaaacactatgagtaagattctggaactgcgcaccaagcgcaacactctctgggagcagaccaaggactttctggagaagaaccgcggcgagaacggtctggtaaaggctgaggccgtggagcagtacaacaagatggcacaggaggtcaaggacctgggtgcagagatcgagcgtctggagcagcaggcacagatcgaggcacagctgtccgcaccgacttccagccctgtccacgctgacccgaagaacggtgccaagaaggatgtcaagccgaccgccactgccgagtatgccgagaacttctggaacatgatccgcaaccgtggccattacggcgaggttcgcaatgccctgtctgtgggcgaggacaccgagggcggctttaccgttcccgatgagttcgagaagaagctggtggaggcactggaggagaacaacatcttccgtggcatggcgaccgtcatccgcactagctccggcacccgtaagatccctatcgcagaggataccggtgaagccagctggaacgatgagggcgaggagatcccggagagcgataccaccttcggccagaccatgctgtctgcgtacaagctgggcactatgatcaagatctccaatgagcttctgaacgattccgctttcgacctcgccacctatattgcccgccgtttcggtgtgcgtatgggcaacgcagaggagcgcgcctttatcaccggtgacggtgtgggcaagcctctgggtctgctggctgagaccggcggcgccaaggtcggtgtgaccgctgcccagaaggatgctgtgtcctttgatgagatcttcaagctctactatgcactgaaggctccgtaccgcaagaaggcacagttcctctgcaacgaagccctggtgctgcagctgatgaccatcaaggacaacaacggcaactatatctggaagccgggtctggagatcggcaagcctgataccctgctgaaccgtccgctgaagacttccgccttcatgccggagatcaagggtggcagcaaggtcatggcctttggcgattacagctactactgggtggctgaccgccagaaccgcaccttccgccgtctgaacgagctgtatgcccgtactgatcaggtcggtttcctgaccacccagcgtgtggatggcaagctgatcctgccggaagctgtacagcttctgcagatggcaccgcagggctaaaaagcccggaaaggaggagccggttatggcactgatcccgctttacgaagcgaagacctatctccgcgtggacagcagtgatgaggatgccctgatcggcatccttttatcttctgcggagcagatgtgcaaggacgtgggccgtctatcggaagaccagtgggaggcagtcaatgccgctgaccgggatgccgagaacggagtacagcccacaagggaactggaagccctgcgcagcacctgccgtgtggcgattctgtatgcattgggatatctctatgagcaccgggacgaagctgaccatcaccagctgatgttgacgcttcgttccattttgtttgctgtgagggagggtgtgttctgatgatcgagaaactgaatgagcggatcacgatcgagaaaagtacggtcgtgaccgataaggtcggaaaccatcggaacacatgggaggaatatttcacctgctttgcctacgcttcgacctatcaggcgcaggaagaagagggtgagatcacagccgaacagaagagcgtggtgtttacggtgcgctggtgcagtgagacgagaggccttacttccacgggctatcgcattcgtttccgggagcagctctacgacattgagagcatcgacccgatgaatttccagaagaaaacgctgaagattcattgccgtttggaaaggaggcagccggatgagcagaaccgtcagtatcgatgagatggcagatgtcatcaatgagggcttgaaagagtatgcgacccttgcctccaccgaggtcaagaaagctgtccgtaaatctgcgaaaacggtcaaagaccagatttcagctaatgcaccgtccagaacaggtgcgtacaaagggagctgggtggctaccaaacagtcggagtccagccagagccttcagatggtggtgcattccaagaaccgctaccagctggcgcatctgctggaaaaaggtcacgccaagcgcggcggtggccgggtggcaggaagaccgcatattgctccggcggagcaggctggtatcgagcagctccaatccctgatcgaaaaggcattgaaataagaggagaaccccatgacccacgaagaagtaaaagctctggtggaggagatggggcttccctatgcgtatgaccatttcgcagaaggggagagccctgatccaccgtttatctgcttcctgtatcccaaggctgagaacttcggtgcggacaaccttgtgtaccaccatttcaaccggctggacatcgaggtgtacaccgattataaagacccggatatggaagcaactattgaagaagtcctgaccgcacacgaactctactatgagaaaagcgaggtctggatcgaaaccgaaaaaatgtatgaagtcctgtatgagctgaccgtgtgatgctcatgcagggtatttttatgggaggaacactatgtcgaagaaaagcaataaggtcaaatttggcctgaaaaactgccactatgcaaaggcaacctttgacgaagatggcagtgtcacctatgcgaagccggtccgcatccccggtgcagtcagtctttctatggatgccaatggcgagatcgagccgttctatgcggacaatatcgcctactatgtcgtgaataacaactccggctacgagggtgatctggagattgcgctgatcccggagagtttcctcacggacatcatgcacgaggaactggatggcaatggcgtgcttgctgagaacgccaatgtggaattggagcattttgctttcctgttcgagttcgatggcgaccagcgccacatccgtcatgtgctgtacaactgtgtggcaagccgtccgtccatcgagggtgagaccaatgaggacagcaaggaagtcaagacggacaccctgaacctgcaggcaacccctctggcaaatggttatgtcaaggcaaagaccggtaccaacaccaccgatgatgtctataacaagtggtacgatgcggtctatgagccgcaggcggaagctgtggacaccgaagacaccagtcaaactgaggagccgcagggctaagtgaccgacacacactgcagggcttcggctctgcttacattattataaagaggtatatgattatgaagaggatttttcccgtgtttgcagtgatcatcgttctggtgctgtctgtctgctcgttccacatcatccccaccggatacacgggcgtgaagaccagctttggccagatccaggagaccaccatccagagtggcaagctcaatttctgcattccttttgtgcagagcatccacaaggtcaacaacaagcagcaggataagcatatcgaggcacaggtctggggcgaagcctccgacaagacgcctgtgtatgccgctgatgtgatcgtgacctatcaggtgcttcctgagaagagtgcatggctgtatgcgaatgtgtctgacatcaagaatctggtcggtgacgagctggtggcatctgccatcaagtctgcaatggctgaacttggtcccaaagaggtaaccaaccgcaccaagatcgaacctctggcacagcagaagctggcagagtcccttgtgcagaaatatggtgaggatgttgtgttcgtaaacaaggtcgtcgtcaacgacatgaatttcgaggatgcctacaacgaagccatccagcagaagtccattgcacagcagaacgcagataagcagaagatcgagaatgaagcggccattgccaaggcagaagcggataagcaggtggcgatcaccaatgcagaggcggaagcacagaaaacttccatcgctgcagacgcacaggcggatgcaaaccgcaaactggcagaaagcctgtccgatacgctgatcgagtaccagaagatacagaagtgggatggaaagctgccgactgtgagcggcggtaatgcactggtcagcattgacccggcagagtaagaaacacgatatacggcagggcttcggctctgccaattttacatgaaattttggaggattacgattatggcagttacaaagaaaatcgagatcgatggcaaggaagtcacctttaaggcaagtgccgctgtaccccgcctgtaccgcatcaagttcggccgtgacatttacaaagacttgcgccagctggaaaagagcgtagggaagaacgatgaggacaattccaacctcgaccttttcagtctggagatgttcgaggacctggcatggttgatggcccgtcatgctgaccctgcgaatgtgccagacagcccggaggagttcctggaccagttcaacaccttctccatctaccagatcctgccccagctgatcgaactgtggggcctgaatgtgcagacggaggtggaatccagaaaaaacctcgaaaaagtgagcgggaaatgaccaccccgctctttctgctgcgctgtgtacagctcggtatcagcattgccgacctcgacctgctgaccatcgggttggtcaatgatatgttcacggagcggcagaatgacgactattcgtacaaagagctggcaagtcagtcggacttcgatcgattctaaaggttcgacttattttacttgactttgcagactatctgatttattatactcgtaaagaagtaacttacgagttactaactcacgagtataattattggaggtgagcagatgagtcaattctattgccgtgaggatgagctgcggaaactgaataaacggtatgcaggtgataagtttgagtgcattgtcatctacggcagacggcgtgttggtaaaacggcactgatcaacgagttctgcaaagataagcctaccattttcttttctgcattgaacacgacaggaaaggaaaatctggaagctctctcaaagtcgattatgagttttgagcggccggatatggagtctgcaccggagttcaggtcctatgatgcagctttggatgagctgacagcactttcaaaggaaaagaggattgtctttgtcattgatgagtatccttatcttgcaaaagcaaaaccagctatttcagcgatgctgcagcacatcatcgaccacaaatggacagagtccaagatgtacctgattctttgcggctcctctatgagcttcatggagagtcaggtgcttggaaaggaaagtccgttgtatggcagacgtactggccagtttaagattgagccgctagactataaagaaaccgctgtgttccacccaaatctgtctgcagaagacaattccctgatttatggaatcacgggaggagttccccactatatcaataagttggatgtgcgagatagtgtggatgaagctctgttggataatttctttgaccgctccagctatctgtatgaggaaccggggaacttactgaagcaggaactccgggagccggccatttataatgcaatcattaaagcgattgcagaaggtgcttcccgaatgaacgatatcaagatgaaggttggcgaggaaaactcggtcgtatcgaagtacctgaaaacgctgatcgaccttggcattgcgaagaaagaaacaccgattacagaaaaaccgggtaagaaaaccatctatctgctggctgataacttcttccgtttctggtatcggtttgtgccaatcaatatgagtgccattgactctggcagaattgcaaagacctatccacacgctgtaaagcagtatcttcctgattacatgggtctaatttatgagaagatgtgtcaggattacctgctctattattcggatagccttcctattgagctgagtgaaatcggccagtggtgggggacagacccgaagaagaaaaagcagatacagattgatatcgtcggaactcctgttgagggcaaagactatatcatcggttcatgcaaataccggaatgagaaaatcggtgtggatgaactcgatttgattcgggattatgcctcagtttttggaaagggcaacaactatcactactatatcttctcgaaaggcggattcacagatggacttcttcaggcacaagagcgaggtgaagttcggctgataacgctggaagacctttacaagtaaaaattctaatcaaccctgctggtgaaagctggcagggtatttttatacccatttttagcctgtctgctccgtgcagatgggcttttttcatgccggcaaggaggtggttacacaaatggcatccagaatccagggcatcaccgttgagatcggcggcgataccacaaagctctccaaagcactggaaagtgtaaacaagtcaatcaaggggacgcagtccggactgaaggatgtcaacaaactcctgaaactggacccttccaatacagaactggtcgtccagaagcagaagatgctgaaggatgccattgaagctaccaaggaaaagctggcaactctgaaaactgccgcacagcaggccaatgagcagcttgccaacggtgaaatcacccagcagcagtacgatgcccttcagcgtgagatcgtggagaccgaacagaatctgcgatccttacaggaccaagcggcgaccacgaatgcgacgcttgccaagatcgatgaagccggagaaaagctccagaacataggatcttctgtggaaaatgtcggcaagaagttcctgccggtgactaccgccgtaacgggtcttggcactgccgcagtgaagacggcagcagatttcgattccgagatgagcaaggtctctgccatttccggtgcgaccggggatgactttgaccagctccgtgcgaaagcccgtgagatgggtgcgaagaccaagttctctgcatctgaggcagcttcggcgatggaatacatggccatggctggatggaagacctccgacatgctgaacggcatcgagggtatcatgaacctcgcggcggcttcgggtgaagacctcgccacgacttcggatattgtcactgatgccctcacagctttcggcttatctgctgcggattccgggcattttgcagatatccttgcagctgcttcttccaatgcgaacaccaatgtctccatgatgggcgagacgttcaagtactgtgcgcctattgctggtgcgctggggttttcggcagaagataccgcagaagccatcggacttatggcaaacagtggtatcaaggcttcgcaggctggtacttcccttcgtaccatcatgaacaacctttccggcgaagtgacctttgttggtaaaaacatcggtgaggtcacgattgcgaccagcaacgcagatggcagtatgaggagcctgaacgatatccttgcggactgccgtgtggcattctccggactgtcggaatctgagaaggcagccaatgcggaggcactggtcggcaagaatgcgatgtccggcttccttgccctgatgaattccagccagccggatatcgataaattaagcagtgccattgaaaactgcgatggcgcatccgagagcatggcagagaccatgcaggacaatttaaatggtcagctcaccatactgaaatctcagctggaggagctggctatttcttttggcgatatcctgatgccgaccatccgcaagatcgtatctgccgtgcaacagttcgtggacaagctcaacagcatggatgaaagcaccagggaaacgatcatcaagatcgggctcctagcggcatccatcggtccactgctcattgtgcttggcaagaccatatcgactgtcggcacagtgatgcgagggttcagttctcttgcaaagggtgtccggcttcttatcacccatgtgggcagtgccagcggtgtgttcagcaagctgggtgtggttctgggtggcctgtccggaccggtcgtagcagtagtggcggtcatcggcacgctggtggcagcattcatgaacctttggaacacaaatgaagagttccgtactgccattaccggcatctggaacgacattgtttccaaggtgaaaggattctgcgaccagctgacacagcggatcaatgggcttggctttgactttaaggatgtcactgaggtactgaaagcagtctgggatggcttctgtcaggtgcttgcaccgctgtttgagggagcattccagaatattgccaccatcctaggtgtcgttctggatacactgctcggtctattcgacgtcttttccaatgtgttctccggcaactggagcggtgcatgggaagcagtgaaaggcatcttctccagcatctgggaaggtgtgaagtccgtattctccacgactcttaccgcactaaagagcgcactggatatgttccttggtctgtttggtacggactggcagacggtctggggcagtatcaagagcttcttcgagaccgtgtggagtggaatcagcagcttcttttcaaatacagtttctgctatccagagtgtggcaacgactgtatttacagcagtgtctggattttttactaccgtccttacgagtattcagacgaccttcagcaccatctggactgccatttccacagcagtttcttctgtgctgaatacgatccataccacggtgacaactgtgtggacggcgatctcgaccgcaatctctacggtcatgaacaccatcagcaccacgatcactacagtgtggaacggaatctacaacaccatcaagcctttgctggatgcgttcaaatatctgtttgagaccatctggcaggcaatacagatcctgatcggcgcagcactgaccgcgatccagacgaagatcacttccatctggaacgctatcgttgcatttgtgactccgatcctgactggattgcagacgactttctctacggtttggtcggcaatcaagacggctatctctactgtactgactgcgatccagactgcagtgacgacggtgtggaatgccattgtatccttcctgtctccgctgctgactggcatccagacccgaatgagtatggcatggaatgcggtcaagacggtcatctcgacggtcctttctgcgatccagtccacggtttcttccatctggagcgccatcggcagcaagatatccggtgtgataaatggcatcaaatcggtggtttcttccggctggaatgccatgaaatccacggtatcgtccctcagtaacagcatcaagagtgcggcgacgacagcttttaactcgatgaaatctgggatttcctctacgatttccggtatcaaaaacaccatcacgaacggctttaacagtgcagtctcctttatcaaggggctggctggacaggcattttcgtggggctctgacatgatcggcaacattgtgtccggtatccagtcgagaattcaggatgtggcaagtgccgtatcgggagtggcggaccgtatccgttccttcctgcacttctccgtgccggacgaaggaccgttggcggatatggaaagctggatgccggacttcatgcagggattggcaaacggcatcacgaccaacaccggtcttgtgactgcggcggcagagaacctgtccaccacgctgtctacctccattaccaactccatgaggggagtagagcaggcatacagtaagagctgggcagccatcagccagacggtgaaaaccggaacggtaggtgtaagtgccgcgatgagatccgcatggagttccattacgaccagtaccacaagcacatggaacagtatcaagaccaccatccagaacagcttctcggcggtgaaatccaatgtgacctctgcgacagcagcagtgaaaacatccatgaccagtgcatggaatgcggtgaagtcgttgacaacgaccagctggaacggaattaaaacggtcattaccacagcgtggaacggaatcaagtcccttaccacttcggcgaccgcatctgtaaaatcttccatgaccagcgcatggaacgcagtgaaaactctgacaagcaccagctggaatggtatcaaaacagtcatcacgactgcatggaacagcatcaagagtcttacaacttcctctgtatccgcagttcgcagtacggtcacgagcggctggaacacactgaaatccactacgacctctgctttcaacagcatcaagtccacggtgtcttcggcaatgtccagcctgcgcagcacggtttcttccggtgtcgcaagtatcaggagcagctttaactcgctcggttcgattgcttcttcagcataccgctggggcgcagatatctgttcccagatggcggcaggtgtccgggcagcagccggttccgtgatcgcagcggcagaaaatgtcgcaagcagggtcagaagtctgctgcatttctctgtgccggacgaaggacctctgtccgatgcagacacctatatgccggacttcatgaagctgctggcaaccggcattaagaaaaatgtcaagtcagtggtgaaagccgtgcagggacttgccgggtctatgagcagcaacctcacgaccccggtagattctctgggcgactggatggattccgtggtcggcagttttgctaccacgatcaagagaagccagagcggtatcggcagtgctgcaaaggatgtgggcagcggtatccagtcccagctgatgtccggactttccgggctgaagacacagttccagcagctctggacagacctgcagggcatcaccaaaactgcagtcggcggcatgagcgatgaggtgaagcagggctttgcggatatgaaggattccattggtgaactgagttctcagaccagttcccttggaaatgcgatccgcagccttggcgataccttcaactcggattttctaaagagtctgggcaatggcatcagtaaagtcggtgacacggtcaatacggtcaccggtcttgtggacaagctcggctccatgaagaataccatcggaaacctcggaagtacgttgcagaacctcggcaatgttcttggctccgaaaacggaggcggtctgctgtccaacctcggcagtttcctgtcgaagatcggcagcgcagatggcggtcagattgtgtcgaactttggcaacctgatctccgggctgacctccaaaatgggtggtctgggagagggaatctccggcatcatctcgaagctgggaagccttggttccagcggtgggggaatcctgtcgaatctggacgggctgctttccagtgtagtgtcgaagatcggtggcttaggcggcagtctttccggcatcgtatcgtctattggttcttcgctgggcggtattgccgggacagtcggcacaacgctttccggtctgctcggttctgtgggtacgaccgtatccggtctggctgctggcgcaggtacagcccttgcaggggtagcaagctccgcaggtggtttcctcgcatccgcaggtacagcacttgctggcctggcgggtcctgcaggtatcgcagtggcagccgttggcggcatcggtcttggactgaccgctctctggaaaaactgcgatggattccgggaaggagtcacgaatatctggaacaaggtcacttcggtattctcgaatggagtaaacgccattaagaatggtatttccaatgcggcttctgccatcggcaacgtggcatcgtccatctggggcggtatcaagaacgtggcttcctcggcagtcagctggggcaaggacatcgttggcggcattgcaggaggcatcaaaaagggtgtgagctgggtcggcagtgcggtcaagagtgtggcaagtggtatccgttcgttcctgcacttctcggtgccggatgaggggccgttggcagatgcggacacctatatgcccgacttcatgaagctgctttccggcggcatcaagaaaggcgagggtggactgatcagccagatcaggtcgatggcagcaaaggtgcagcagggtatggagggtatcagttccttcatcctgccagaactgaccttgccgcacttcgatggctctagctggaacttcccgcaggcagctctggccggaggcggtaccacccggacgaccaaccttggcggtgtgtatatcacggtcaatggctataacgctcggaacgacgatgaactcgcacagaccgttgccgataagatcaacggcatgatccacgaggatgattcagtcttcaagtaaaggaggagatgcgtatgggctacaacaccccaaagcagacagtatcacagtttcagttaaaaggcagatacgccagacagtatctgtcctttgcagggaagtccagcaaagatttccttttatatttgtctggtcccggtgtgtatgattccccggctgcggatgtggagagtacctccgtacccggcaggaacggggacatcatcaccgagaatgcaaggacaggaagacgcagatatcagaacgtggatatcaagtataaggcatttttcttcaacggtctgccagccaagacagcagcggtcaaggcatggctgttatctccgatcgggtatcagaaattgcaggacacctacgacccggatttcttccggatggcagtctgcaaggacgccttggaattcgatgtgacagcccagaaagccgctgagatggagctgaccttcaactgtaagccccagcggtggagcgtggacgggcagagggcgattcggctggacagcagatcaactttgaagaacccatttgcatttccggcgcagcctatcttcaaggtctacggagattctggcggtgagctgtatgtgggtgaggagaagatcaccatccacagcatcaaggactatgtgctgctcaattgtgagacgcacaatgcttacaacgcttctggtttttgcaatgagaccattctttcggatgatttcccggaactgccagagggcaagacacagatcacttggacaggcggtatcacagcggtggaggtgactccacgttggtggacgctttaagagggaggtgcagccagtgatcccatgtttatatgattctagagaaatgaaattcggccataacggcatcggaaagctggcagatgcacagtcctgtacggtgaccgaaaagagaaacggaagctatgaactgaaactcatctgcccggcagatggcatccatgcagagatgctggaagaggggaacatcatccttgccaagccatcggacacgatgcagagccagccattccgcatttataagatcacgaccccgatagatggaaagctggaagtgcaggctcggcacatttcctaccagctgaacttcatcacagtttccccgttctcagtgactgggtgtgtgggagcaatgcaggggctgaaaagccacgctgcttctgactgccctttcgatgtctggacggatgtggaatccagtgcaacctttacgctgggagttccatcctccttccgaaactgccttggaggtatggccgggtcagttctggacgtttttggcggtgaattcgagtggaaccggtatacggtcaagttctataagacaagaggtgctgaccataacgtccacatcatctacggtaagaacctgacggatttcaagatggaaaaatccatcgagaacacgatcacaggtgtgcatccgtactgggtagacaacgaaacgcaggcggtcatggaactgccggagaaggtggtgttgcaaagcaaacggtcagttccttaccagaagattaccgcgctggactgtaccagtaattttcaggaaaagccgagcgaagcggcactccgggaatacgcacagaactatatcgacaccacggacttaacggagccggaaatcgacatcaagatcgactttttgcagctttggaatacgccgggatatgaagacatcgtggaagcagagcgagtctccctttgcgatacggtccatgtgtttatctcaaagctgggaatcgaagtcagttccaaagtcacggaaaccgagtatgatgcgctgctggaacgctataacagcattacgctgtcgaactccacagtcagcagccggaattcttctctgaccggttcgctcaatagcatccggaatacagcaacgattgcctatgatacggcagtccgtgcggagacagcagtgggagagcaggtcggtgggattacagcatccattatttatgacggtgcgctttttgctgcgctgtttggactgcattataaaaatgaaactgacagtaagggaaatacgacccggtatgcattcaatgcggcgactttgaaacagtcaacggtcgcatggaagaacagcgctgccgggttgtttgtatccacggatggcggtaagacgtggggatatggctgggaggcggatgacaccgcagtcaggacagcgatcctactggaacagaccctcaaagaactggatgaccgctataagaaagccacggagctttccgaggagttgctgaaagaactggatgagaggtacaaaacagcggctgctatctctgccgaacttcagaaaacactcgaccagcggtacgaaactgccaaaaagctttccaaagagttgtatgaggaactggataagcggtatggcacctttacggaaatcccagaagatctgcagaaggagttggatgagagatacagcgtggcgaagaagctgtcggaagatgtcgaaaaagaactggataaaaagtaccagccgagtatcccggtatcggaaaacgcaccggagaccccggcagcagatacgctctgggtcgataagaaaaaccggcggttcaagctctgggatggagaacagtggcaaaccatcggctatgagccggagcagccaacggaaccgactacgccgacagagccggaaaacccggacaccgaagaaaaagataatgggggcaaagaagaaacagatgacaagaagaccgatccggaaggagggagcgcgtaatgatcacaagcatttatcaggaagtggaactgtcgctgacggaaaatctcattccagtgacagttccggtcaagcagtatgacaacagggcacggaaggtcagatgtgtcttgtataacaactcggtgcagtattccgtgccgcaggactgcattgttgcctgctccggcaccagaccggacggcacgatctttcattacaccagcgagacggcgtccgaccttgtgtttgttgaaaatggggcggtcgtctttacgatcacgaccttcatgaccgcacaggccgggtggtttccgctggatgttgttatgctcagcacagcgggggatgtccttggttcgttttccctcacattgaaggtggagcgggcagccatcaacaacggcaagatcgccacttatacctacgccggtgttgtggaagccatccgcaagggactgctggaagtgtatatcacggacgatggctattttgccgttgtgtcggaggatggattgggatttagtgacaagtcggaatccagcaccatccagaaattcatcgagaatcttttgaactgtacggttacggatgacggctatcttgctttcaccaccgaagacggtctgaagctcatcttttcaatggatggtgacgggcggctgatcgtagaatttgcaaacggctgatacagccgggaaaggggaaattatgtcggaatatatcggaaaccgaatcgtccctcgccatgatggtgtctgggacaaagtaaaagagtacgagcctcttacgattgtgtatgaggaatccacaggcgacagctatatgagccggaaacctgtgccggccggaacgcttttgtcccaggaggaatactgggcgatgtgttcccggttctctgagcagatggctctgtaccgtcagaatacggcagaagaagtggagcagttccgtaaggatactgcggcagatgtagagcagcttcgtacagatactgcatcagatgtggcagccctgcgcaagatgaccgcgcaggatgtggcggatatcacccagaaggtcgatgccgcaaacagtgcggttgcggccagtaagtccgagatggataagactgcagaaacgctgaaagcccagatcaatgccaatgtcaaggcatctacagacaaaaatgccaactatgcacaggagctggtagatgcccgtgtggatgatgagggaaagacttatcccacagccggtgacaatatccgtgccatcggcagggtgcgttccatgcagaatatcatgaagaactgggtgatcaaaaatggttacgcaaaccagaacggcaaccttgtagcttcggaaagctggcgcgtggcgcacatggtcccggtcagcggtgatgcgattctggtggacggtcagttcggctatatgagcggccgggatgactacagcaacgtggtctgctatgacatggaccgcaaattcctcggcggctgtttccgggcagagagcggcaaggtctatgacaactatgtgatcacattgcttccgaatacccgatttatctctgtcaccaccaatgaaaagctgttctcgaagctctctgtttacctttatgacaacatgctcccgctgagattgctgtcaaattacgcaacaggctggcagtggatgaacggcagcgtggatatcaggttcacgggcagcaaggtgacggtcacattcccggcgggaaagagtgtatatgtctgccgccgtacaaacggtgcacagtatgagcagacgaaactggtggcggaaaacagtatttcggctgactttgcagtggtgggaaaatggtgggcgatctattatgatggcgcggaggcatccgcagacgagacgggagaaaagacagaagtccctgtcattaaggtggaaaatacaagcggcgatagctggggcgatctattcacaaagggccgctttgtgtttgcggtcttttttgactggaatgtggtgtatgcagctccttcaagcagcggtacagtcatcaatgggatcgattatggcaatccagccaagattgcgaatactgcgatgacatggcataagtaccgttcagcaaagatgttccttgctacaggccagtttgcgatcgatagggtcaaccgcaccattcaggtcacgaagcgtatcctggcggtggttgataacggtgcttacctctggatcagtgtcagcgaggagccggtgccgatgttggatagtacggaagcggaaaagcatcacatgctgatccttgcctatgactcgtccatagatcagatcaatctttacaacactgcacagttccgggcattgggagtaaatggctactatatcgccgcatggtatgaaaaccatttctggtatccgcacatgggttcctctttcagcattgtgctggatgggacgacttataaggctggtgagctgttcgatgaagagcggcgtgattcttatatcgagaagaagtatgagagccgcttccagcagctccgcacggatcttgccggtaaggattcccgccatatgtatctggcaagcggcggtattaccattgaccaggatgctggtacgatccaggtcagtaccaagtgtctgggtgttccggatacgttcaactttgaatggatcactgcaggcgatccggtagagatggcattcaatacgccgagtccgtctttcggcatgccgatgcgcattctcgcttatgactctggtacgaaaaccatcaatctgtacgacaccagcctgttccgaaagctgggcacggatgggttctatattgcaagctggtatctgaacaagctgtataatccgcacatccacccggatgtgaagttcattgtgggcggtaaggaatacaaagcgggtgatctcttcgcagataacgcggcatctttcatcccgaagcgtatcacggattatgtgcagaaagccattactccggctgtagaggatgacatcgtgaccccgtcccactgggactgcatggagggccgccagctttccatcttctttgactgcctttcccgacacgatggcaaggaaaatctgtatgtgctcgccagaggcacgaatgcaccgagcctgacccggaacgagtattgcatgaactacacgccgacgaaggacagtacggattttgcactgaccgtccgccgtctggatgaagatgactgccatacggtatcgtccaaacctgtccaggtcagggtccaccataagctgaaggacaagctcacgaagaatatctgcatctgtggagactctctcgtggacaatggttctgtggcaacggaagtgtatcgtctgctggcagaggataatgactgcgtgatccaccagctgggaacgagaggaccatctggcggcaagcacgaaggacgcggtagctggacctttgcccggtatctggcagacacggattacgccggcaaaacgaatgcgttctgggacaagatcaaaggccgtctggatttccagaaatactgcgagaccaacggctacgagggtatcgactacttcctgatcgcacttggcaccaatgatgtgtcgcagggcactactctgtaccgcacggaagcagaggtgcagaagttcgtggatcaggcaaaacagttcattgatgcgctgttggataaggagacgggcttcccgaactgcaagatcggtatcggtctttgtggtcccggctcggattattcttttcagtgcggttccagcatgggtatcttccatatgagtatcaacacgctgaatcttgcactgatcaaggcatttgatgctggcaagtaccacaagaacgtgacctgttttgcccacggacttcgcactgaccgccgtctggcatttccgtattcggacaagccggtgacgaaccggttcacggaaaccagccggacgctgaccaacagcatccatccgtccggaagaggttatcaggcatgggcagacggctattactgccagatccgtgcgtggctgacggaagacagcaaataaatttccaccgtccctgacagacatacctcccaaatgcctgtgaaacggtgttcattatagaaggagtatacacaaggcggcatcgaccgtctatttttatgcccggattgggcaggaaaggacaagattatgcagaatgtgatcgacaagattgaatggatgttcgcaggtctgggtggtttcctgggctggttctttggcgggtttgacggcttcctgtatgcactggtggtgttcgtggtctgtgactacttcaccggggtgctggcagcagccatcaagcatgaactttcttctgaagttggttttaagggcatcgccaagaaggtgtgcatctttgtgctggttgggatcgccaacatcattgacacacagatcctccagaatggagccgccatccgtacagcggtggtgtttttctatttggcgaatgaaggcctgagctgcctcgaaaacgcagccgttatcagtcttccggtgccggagaagctcaaggagatgctggcacagctgaaggcagaaaaagagaataaggacgattgatcaatggggagaggtgtaacagcctctccctcaaattttaggaggaatgaaccatgagtaagaaagagtatcccgcaaaactgacgaccggttattaccgtgtgcgagaagtctgggaagatgaggcatcccagtttggcgcataccgtctgcttgcgaatgcaaaagccaagtgtgatgagaaccccggcagccgtgtgttcgacaatgacggtaacgtgatctatccggaagaggctgtaccggatactggcgcagatgagagtgaagagaaagcagtcgtggatgatatcccggaagaaaagccggaaaccacagcccctgtggaagataccccggcggagaaagaagctgaagtggatgagaacgagttcccgactgcggaggagcttccggcgaccattgcctatggcaagctcaagaccctcatgaacatccgcaagaagccgagtctggaggcggaggtcgtagcggtctataagaagaacgcccttgtggaagtggtgcagttctgtgatggctggctgaagatcaagtgtgccgaagcagaggccggtgtggcttatgtcctgaacagtgcggacacctatgcgttcacagcaggcaggatctataccgttgttcccggtgataatctctggaagatcgcggataaggaactggggagcggcagccgctgcgcagatatccgtgtgatgaatggcctgacttccaacgccatccgggtcggcatgaaactgctgatcccgtaacaacagaataaccacagcacgaggttcagagtgatctgggtctcgatttttttagaaggaggaaatcattatgggatataccaatagtccactcgttgtttacaccaagctctccccgaaccattccgggcagaggacacacagcatcgaccgtatcacaccgcattgtgtggtcggccagctttctgcggagagcatctgcggatgcttcaccagcacaagccgtcaggcaagctgcaactacggcattggtacggacggtcgtgtgtcgctttgtgtcgaggaaaagaaccgcagctggtgttcgtccagcaatgccaatgaccagagggctgtcaccatcgaatgtgccagcgacatgaatgagccgtatgccatgaacagtgcggtatataactcgcttatcaaactctgtaccgacatctgtcagcgtaatggtaagaagaagctcctctggcttggggataagaacaaaacgctcaattacaccccggcagcggatgagatggtactgaccgttcaccgctggtttgccgttaagtcgtgtccaggagactggctgtatgcccgtctgggtgatctggccgcaaaagtaactgccgcactgggcggttcatcctcatccggtatgcaggcgacttcgctgaagaatctcaccgaagcagaagcagttgcaaagattggtccgctgtttactgcgaaccagaaaaccagtggcatccttgcctgtgtgtcgatggcgcagttcattctggagtccggatacggtaagagcgaattggcgcagaatgccaacaactgctttggcatgaagacctcgctgtccgggaacagctggagcggcagcagttgggacggcaagtccgtctacaccaagaaaacgcaggagcagaatgcggatggctcgatggttacgattaccgctgacttccgcaagtacgcttgtgtggaggactccattgccgaccatgcggcgtatctgcttggtgcgatgaacggcaacaagaaacgctacgaaggtctggctggctgcaccgattacaagaagactgctcagatcatcaaggatggcgggtatgcgaccagtcacacctatgtgcagaacctctgcaatatcatcgagcgttggaatctgacacagtacaatgccgccgcttccagcactacgatttccggctggtaccgtgtgcgtaagagctggcagagtgcggcttcccagaaaggtgcattccgcgaccttgcctatgcaaagcagtgtgcggatcagaatccgggctactttgtgttcgaccctgatggcaaggcagtctatccggagcagaagtcttctgtgccgtatgcagtccgtgtgtccatcaacgaccttaatatccgcaaaggtccgggtacgaactatgcgaagaccggttattacaccggcaagggcgtgttcaccatcgtggcagaatccgctggtgctggttccacgaaaggttggggcaagctgaaatccggcgcaggctgggtcgcacttgattattgcacccgtatctaaagcagtccccgtcctccttgggcggggcgtacatatggtgcagataagacaataatccaccagattattctccgtctttctgcgccgaaattacttgataatatcacgaaacagagggaatatgtgactgcccaaagagaagaaaaagggcaggaaaggagcgaaaactatgagtgctggtacggatttccttgcaaatttgcagaaagcgactgtgaagaatacagtgcagcagaaacagcaaaagagagtgaatgcatccgctgtggatgtatcggctttactggaagccgctctcaggcagaagaaacctacagaagctgtggcagatgttcgtcaaagtgcggatgtcgtcacagcttcttttttaccaccaactgacacgcatcaaggcaagtctactcaacaaaagccgaaaagcgtatcagataaaaaacaatcgacctcaaaatcaaaagacatcgtggatgctggtattacagcacttatccagaaagctctggatgctaaaaaggtcatggaagagccagacattgcagagcgactgcaggccagcagggagagcgagttttcaagactcttcataccggaagaaccacaggagaacaaatttatttcgacggcggcattccgcgctacgaaaaagaaagtgggaaccctgaatgtggcggcttacatccgcgtctctacggacatgagtgatcaggaaaactcctacgaaacgcaggaaaaatattttaaccagctgattgaaagcaatccagaatggaatgcggttggtgtgtattccgattatggcatctctggtacttccaaggaaaagagaaccggattccgcagactgatgcgtcattgtaaagacgggaaaatcgaccgcattgtttgtaagtccatttctcgatttgctcgaaacacggccgacttcatgagtgcactggataccctgcatgactgcggagtgacgattctgtttgagaaagaaaatctggatacggcagacccgaccagcgacttcattcttacgacactggccgctattgcgcaggaagaaagccgcagcatttccggtaatatccggctgggtcagaagatgcgattcccgaaaggggaagttccaaacaagatcatgtatggataccgctacaacgggaagaaggtcacctccgagagtggatatgaatataaggacatcgagattgtggaggaagaagctaaggtcgtccggcgcattttcaatgaagtcgtggaaggcaaagcctatacggaaatcgcaagaggactgaatctggataagattcctgctccggaaacagatgcggtgagggccagaaagcgcaattccaagaaaggacagctcaacagtgacttacaggatggatggacgggagggcatattacaagaatcgtccgtgccgagcggtacatgggagcagtcctcatccaaaagaagtttactccggattacctgacccatgaagttcgggataacaaaggggaagtcccacagtattttgtccggaaccatcatccggcaatcattgatgaggaattgtttcagaaagcgcaggaggtcgtaaagataaacagcgaactgtataacaggacaagatttcccaagaagccgagagcgttttcccaaaggctcatctgtggggaatgcggtcggttcttccatgtgacgaatgcgaacaacaatccgatttggagatgtcctacgagcagccagaccacaggaaagtgcatctgccatgcggaaaaagtgtacgaggaacaggttgtccgcgcattccgcaaggcgattctggagagattccggctgaccataaagcccatccacgacaatgtggctgtggcagatatcatgagcggccgcttcaaagagcagtatgacaatttcacgccggaagcggattcctttgtgagccagatgattgcgagattggaaagcatccagaagctggacttcatggaacgtgaccgtgctttttataagaaacagattgccgctgtccacgccagcatggaaagtgccaataaaaagattcggcttctgaagagtcaggtggatgtgatgcagacccgtttggaaattctcggagatgagatgattgatcccgcgtctattgaggaaaagaaaaagctcattgggaagctggagcaggatgttcagaaagacacggacacggagcagaagctaactgaacagctcgactacatggaaaactactgggaagaactggagagtgactatgaacgcagggagaaagcaattgagtggatgaagaatctcccggcgggtcgggatggtacggtggatttcttaaatgaagtgaccgaagaacactgcaaggcgttcatcctttctatcaccatccattcgccgttgaagtttacggtccactggttcgacgacaccaagaccgaggtacagatggattccaatattgaagattaccgcaataccgccagctactacgacggtcataccatgcgagatggcagccagcggaaacggtatgtgaaaaaataagagccagtcataagactggcagaaaggggtaagattatgacaagacaaaaagtggatgtgattccggccagtgtgcggtcggtgcagaacggtgggcagttgaaaagccagaccaacatccgtgtggcggcctactgccgtgtttccacgggagatgaaagccagcagacttcttacacgacccagaaggcattttataaagacctcattactcggaagcctggttggatttttgcaggcatttatgcggatgaggcaaagtctggtaccaaccgagagcatcgtgaggaattcaaccgcatgatgaaggatgcgatggatggcaagctggactacattgttacgaagtccatttcccgattcgcccgaaacaccattgattccctgacctgtacccgtgagcttcgacagctgaagccgcctgtgggtatctatttcgagaaggagaacatcgacacgctggatgccaaaggtgagcttatcctgacaattctttctgccctggcacaggatgagagccgttccatttcggacaacatccgttggagtattcagaagaatttccaggcaggcatcccgcatatcaatttgaaacggatgttggggtatgaactgggacctaaccagcagtgggttattgtgccggagcaggcagagatcgtccggtacattttcgaccgctttgtgaaagggcaaacggcgaataaaatcgcacgggaactgaatcagatggagaagtttacggtcaatggaaagaagtggagtgcaagcacgattatgattgtactgcggaatgagaaatatgtgggcgaccttgagatgcagaagaccatcaccaaagacttcctgacccaccgttccagtatcaacaagggtgaagcaccccgttactatgtaaagaaccatcatgtcggtatcattgaccgcgtgacgtgggataaggtacagacgatgctgttcgagaagcctaggacggacatgaccaaaggtccaggcaggaagaaaataaagacgatcaagggttctccttttgggaatctgcgctgcggtgcgattctggagaatggaccggatgcaggaaagccctgcagtgagggattcttccgagtgacctacacgggtgtggcaaacggttataccgatgagcggagccttaaagcaaccggggatgataccggagagtatctggaaaagtatacttattcctacccagtctggcggtgcaagcggaaagtcggagaacgggacggtgagccgccgaaaaatggcactcccgatcagaaaatgtacagccgaagcaagaaaggctgtatgtcggatgaggaaaaggaagccgcggacaagcgttgcccatcagaactttatcacgagtgtgcattggagcagagctttatggaactgctctacagcatgaagcgggattacgaacagcacggtgacgcttccatgatcgtgaccatgttcgataatgcctatgagcaggccgtccggctggcaaacaacagcagcatctcggtgcagaggatggcaacggtggagaatcaaattaaagagatggaagaacgcttgcaggatgctatcagccatcaggtggcggcacttcgggaagccgcgctggaacagagtgcggaactgaatgaagctctttccaacggcgaggtgaccattgatgatatcgatttggacatccgaagcggactgacaccgggcagtattggagtgagcttctatgggacagaaacggaggaaggctcggaagcacagatttatacagaacttgtgaatgacctgcaggaacacttgcagacactccggcaggaacagcagactatcgagcaggagcagggcgttctagccattatgaaaaagaactttgaatacttcatcgcctgcctgaaagaactgccggatgccaatgccagcggaatgccgctgaaagttaatgggttggatgtgcagggaagcctgatgcgagatgccgatggcaacaccatcgaagggcggaagtacgccatcaccagaggaaagctcaaggtgacgccggagcgaatcgcagaagcaccggatatgctccactttgaaaagggcatttactgcgcctttatcgagagcggagttttgcagggggatgtggcaacttacaagacgaacttcggtgtgacactgacctcaaaaggcaaccgcaggacgctcaccagctttatgggctataagcggagcgacctgaacggcaatgtggtttttattgacgccccttacaaagtgtatggattcagcgttcagtataggcggtatctgacgactgcagcaaagcgtgagagagaagaagcagtatgatgtaataggaaagagtaccctgtcggatgtggcttttgtgactgcatctggcagggctttttttgtttgtgggggtagtattgttttttgtctggtctttttatctgtctggtcttttttacctgtggggattgctatgtgcagagttctgttatatgttgtgggtggcgagaaatacacatagcagaagaaaaaacataacagaaaacatagcaagggagaaccgagaatgaaaaatatagcagagatgcaggcagaagaatatggaacgacagcggcggaaatcgtggtggcaggagctatgaagctgtacctacagaacatggaaccgagagaagcagtgagaaaggtggctgctgtgtacgagccgaaggtgatccggcttgacagcggcgaagctgtgccagtgcaaagcattattgatggtgcaaagtacgcggctttcatcgacgaggcggtgacgtttgctgcgcaggagatgagggagcgcggggatgatgtagcaggtagagttgtagagggactgaaaactgtggacggaaaacacatggccgagactgccagtgtggagcttatgagttttatcgaagatgcgtacctgtgtctgaaaaggcggtaaaaattgccggaaagatcacagaagaacgcttgataaacgggcggctttatggtaacatgaaaatagaataggagcagtgtatgctcctacgagaaaggcggtgagaccgatgggcttgatagatggcgttacaaaggactatatacgagataataccgtatttgcagatgcatttaactacttcctgtatggtggcgaagctattattgacccagaaagtcttgttgagatggattcaacggaacttgcagtaccgtactatttcgatgagaaaaagggaatgcagaccgaatcagcacagaaatacagggatgcactaaaatctacaacggtcatgtataacgataaagcaacatatatgattttgggtgtagagaaccagaccgatatcaactatgcgatgccggtgaagaacattgtgtatgatgtacttcagtacggaaggcaggtaacggatcttgcaaggaaacacaaaaaagagcatccgggaaaacaatcaaaagaggagtttttatctggtatatataaagaagacagattaacaccggtgatcacgttggtaattcatttcggtgatagcgagtgggatgggccgatgtctttaagagagatgatggctacaaccgatgagaaaattctttcctatgtgccagattataaaatcaacctgcttgaaccagcgcgaatgaccccagaggagatgggaaagttccaatctacgctgagagaggtcttcagatttatcaaattctctaaggatggcgaaaagttagatgaatacctgcaatctgaggagcgtttgaagcatctcgatgttagcgcagcaaaggtgattaaggtaagcacaaattctaaatttgacattccagaaggagcggaggtggttgatgtgtgccaggcagaacgagaattgcttaagggagcagaggacaagggcattgacattggtgaacttagagcgacagtgaagtattataagaagggcaagatttccattgaggaagcggctcaggatttgcacatgactgtggaagagttcacagaaaaaatgaaccaaattccggcagaggcagtataaaaacacactaaacagcctgcttacgcactatgtaaaatcttacatggttcgtaggcgggcttctttttttgccttatttccgcatcatcttgcgatgcctctctcgcacatgtataatggaataaaaaggcaggtgaaacccattgggaaataaaaagaaacgtgtcaacacagacccgacactgagcgcgatccgggacatcttccacgagaacctgcagctggcgaataaggtgcagcgcaagaccaggacggacatcatcacgaagctcgacctgacagagaagttctgcaatcgtcggatcaaagccgtagcgcatctgatgccagagatgaaagcgcggtattctgatacctacccggaaatcgacatcatgaacgagtttgcggatatcgcatcgcttccgatcctcacctatgatattatcgatgccgaatcctacttatgtcttggcgcggcaatatggatgctcgaccagatatgggaagaacatgagatgcaggaactctgtgacctgctgccggccgactgtgactatgtggaaatgcccgatatctacgacacacggttctcctatgattttatcgaaagaatgctgtatgtgatacagaaccggtatggtgaaacaaaccggcatgtcgtgccaccggacatattctcaaaaaaggatgattccattttccatgcggtccttgacctggtcccggacattgcaaaagagatggcggccgcacagctaaagacaaagttctgggaatgggcggacctttacttcaaagccctgaatccgttgatgtatgagatgcgcaaacgggataaagctctcgaccgcctgacgaagcagatcgatggatttaagggaaaggttgcatcgaagaaaccgacacttccgttgactactccattgccgcttcttggaaatccgccagtaaacagcaccaagagggaagcagagatgctgctgaatcagatcaataaggcggaggacgagcataacgagattagcaaaaagatcggcgactttcgtttttcgagcctgcaggccggcagcatgagaaagtaccatctggagcagtttatgggtgcggattttgcagaggcgatgtgcaattttccgattgaagacccatacgaactgtgctttgcgatcctttacttatttgatcaggatgatgattacgcatgggtctactccttcatgaccggagttatctgccgggcagctacgatgctgccgtgggggtttgagcggtacgatgaggagaatgatggcttctggttcgatgacggagattggataccgtctatgccactgaatccggaatggtatgagacaaagtacacaggccggagatatgaggacgatgaggatgatccccacgaagtgagcattgcacagatcatctatgaacatacaggtgcgatccttccccggaatatgcaccgtttcgatgatgcgtttcggccattgaagaagagaggcatgaaaccctctgaagccaatatggtatgcgcacttatgaatgtgctgggcgaagcatccagacaacggcagtatgttcctgatattgaggaagactttgactgggatgactttgttcaggaagaagagccggaagaaaactctatcgcagaagaaaatgagcggctgaaaaaggaactcgcccagctgaaagaacaggccaagaaagccaactacagtctgagccgggagaaccgggagctgaaagagaagctggaaaaggcagagtccgcagcaggggagatgacacaggaactcgccgacctccgggagattgtgtttaaccagcagaatgtggtagaagataagaaagaagaaacaaagaccacattcccgtaccacacaacgagaaggctggttgctttcggcggccatgattcgtggctgcgtgagatcaagttcaaagtgccagatgtccgcttcatgggcgaggatatttccagcccggaaatcatacggagagcagatgtggtttggattcagaccaactgtatcggccataagtcttattacggcatcatcgaccttgcacggaagtatggccgcaaggtgcggtacttcaagtatgccagcgcaacaaagtgtgcggagcaggtcgttgaagaagaaaacacagataaatgaaaacaggggtctctggcgttgtgctggccggcccctgttttttgctgtcttttgtacgagttcctaccttattataatatgtacatttcctcgcacttccgggtgcggggattttgtttgcccagcatgggcgttttctaatgggtgaaagtcccaagtgcgcgtaggcaacaacgaagcacatagccgaacagcaagggtgtccgccgtgagacggaatctgaaagaagctgtaagcaaacctctgacctgacggacaggaaccgcatataaggctcggaaatacggataaggtggcaaaaggcactgaagtccaaaaggttgccggaagtacgagtaaatgcggcaggtacatggaggaaaagaacacgcaccttaactggggaggtctcacaggcggtctcattagccgtagtaacaacgaattgtgagaagtcagcagaagccatagtagtgaggaagttcctgtaatggggacggagcgaagggctgaacaatcaatcagttgaagtacgttccacttcgtagccggagcatacgcctgtcgatgacttcaaaggcggcaaaggcaaaaggggcagaaaggaaacaacgcatggacacaagcagtctcatggagcagatattaagcagggataatctaaatgcggcgtatctgcaagtcgtaaggaataaaggagcggcaggcgtggacgggatgaccgttgaagaacttggcgcatatctttcggaaaacggcgaaaacattaaggaacagttgcggacgaggaagtataagccgaagccagtccgcagggtggagatacccaaacccgatggtggtacaagaaatcttggagtgccaacagcagtagaccgctttgtacagcaggcggtggcacaggtgcttaccccgatatttgaggagcagtttcacgaccacagctatggattcagacccaagcggtgtgcacagcaggcagtccttaaagcattggaaatgatgaatgacggacacaactggatagtggatatcgacctagcgaaattctttgacacagtagaccatgacaagctgatgacgattttcggacggacaataaaggacggagatgtcatatcggtggtaagaaagattctggtcagcggcgtaatgattgatgatgagtatgaagatacggtagtcggcacaccgcagggtggaaatatctcgccgctgttagcaaatatcatgttaaatgagctggacaaagaactggaagcaaggaggctggatttcgtccggtatgcagatgaccttattataatggtcgggagcagacaggcggcagagcgggtaatgaagagcgtggctcggtttatagaggaaaagcttggactgaaagtgaacgcggaaaagagcagggttgataaaccaaagggcattaagtatctggggtttggattttactatgactcatttgccaaagggtacaaagccagaccacacccgaaagcggcagcaaagttcaaggcgcagatgaagaaatatacaagcaggagctggggagtgggcaatggttataaaattgggaaactcaaccggcttatccgagggtggataaattatttcaaaatcggaagcatgaaaaggctgtgcgcaaaaatggacggacagattcggtatcgactgcgcatgtgcatatggaaacactggaaaacgccaaagaacagggaaaagaatcttatcaaacttggtctgccgccaaatgcggcacatggcatttcatatgccaaaggatatgccagagtgtgcagaagctggaatctccacatttgtatcagtaaagagagactagctaagtttggtcttgtatccatggaagactactacgccgaaaaggctgttacatgttaagttgattgaaccgccgtataccgaacggtacgtacggtggtgtgagaggtcggaaggcgaaataatcgccttcctcctactcgatttgctttctgaccctttccccacgttcgccccacaaagcccctgtgtcgcgtttatccttcagcagcggaaaacaacgcaaggggaatcgtaaaacgcgacggtggggcagacaggggaagctgtggggggagccagaagaaaattgaagattgaagtagagtggtagcccactcggttactttccaaggtgctgatgatcagcctgtgggaaagataccgggtgggctactttttatgttcgccggagtctactcaacagcatccagccccaaaagtgattttaatcactgacaagtctactcaacaaaaaagtgattttaatcacaaaaacgagtctactcaacaaaacagccgcctagccggatggctgaataaaatcacttatttcaaggaaaatctactgtgaaatgtagaaaaataagtgattatgctcacttatgccagttctcagcccatcggtgattataatcacgcaagtctgttcaacatatcccacacgtccgaccaccacaatcatcatttatccatgcacattttcggcagaaatgtggattacagtggcggttcggctatgaaaaataggtgattaagctcacttttttctgaaaaagcgcatccgagcagcaagtgattttgttcacttataaaaagtgaactttttacgccatctgtcgtttttgaatgagcctgtcatgtggtcaaaataagtgagtttaatcactttataccgttaaaaaatagaataagtgagcttaatcacttatggagcataagtgagctttttacgccagaagcggtaaaatgcggcgtaaaagtccatgaaaaagcaaggatttcggagtcctgttttatgtaccaaatagcctatatgtagcgacataacgcaataagtgagctttataggtcgctttcaaccaactgcttcaatgagcgtttagtccaaaaattacgacagcaagaagaatttctttgatacaagcgcggttgaggctgtgattaagctggccattgagtacaacccagaagccatcatggttatcaagagcacgattccggttggatatacttcttctgtccgtgagaaattccactgtgacaatatcatcttcagtcctgaatttttacgtgaatcgaaggcattgtacgacaatttgtggccatcacggataatcgtcggcacggatgtagagaatgctcgtttggtaaaagcggcgcatacctttgcagaacttctccaggaaggtgccattaaagaaaatatcgacacgctgttcatgggatttactgaagcagaagctgttaagctgttcgccaatacatatctggcattaagagtaagttatttcaatgagcttgatacttatgcggaaatgaagggactgaacactcagcagatcattgacggagtttgccttgaccctcgtattggcacccattacaataatccgtcctttggatatggaggatactgtctgccgaaagatacgaagcagttgctggcgaattatgcagatgtaccagagaacctgatcgaagcaatcgtggaaagcaatagaactcgcaaagacttcattgctgaccgtgtgctggaaatcgctggtgcttatgaggcaagtgaggaatggaatagcgagaaggaaaaagaggttgtggttggcgtatatcgcttgacgatgaagatcaatagtgacaacttccggcagagctccatccagggcgtcatgaagcgcattaaagcgaaaggcgctacggttattatctatgaaccaacgttgaaagatggagagaaattcttcggatcagttgtgattaacgatttggagaaattcaaggaaatgagtcaggccattattgctaataggtacgatagctgtctggatgatgtgaaggcgaaggtctatacgagggatattttccagagggactaagaaaaaacggggaggaaaaagatgaaacatgataggaggccaaggctgtgttttgtatcatcttcgggtggtcattgggagcagcttcaaaagctggagccgcttgctgaaaaatatgaaggcttttttgtgacagaaaaaacacagtttgatgaaacgctcgggaaatatttcatgattcaaacggatttgaaagataaactgatgcctttaaaaatgttgtggaatggactttattcggtgtttatctggattaaggaacgcccggattttatcattacaactggaacgatggtggcatatccattttatttgatggcagttcttttccacaagaaatttatatttattgaaacttttggaagagcgaatatgcccacggtagcagggaagaaaatggagaaacatacagatttatttatagtgcagtgggaaacacagaagaaattttataaaaaagcaatttatggaggatgtctgtactaatgatatttgtgacagtcgggtcgagaaattatccttttgaccgtttatttaaaaaattagatgagctatatgaaaagggtgtgttaacggatccgatgtttgcacagattggcacatctacatataaaccaaagaattatgaatataaagattttatttcgccggatgagttcaacgagaatataagtaaggctgatattgttgtgtcacacggtgcatctggatcaatcatgaaagcactaaatgctggtaaaaaggtaataacggtaacgaggcttgaaaagtatggtgagcatatcaatgatcaccagattcagaacaatgaagcatttagcagcaacgggtatgtgttgatggcagatttagagttaactaatttggaagaatgctttaagaaaatttatgatggtacagatgaactggtttcgtgggtaaataaagatccaatggcaattgtaaatctgattgacaaatttatacaggagaattggtgaggaaaaaggaatgtcgagtagtagattatttaagaagataaagtatgcaatgcgttttattccagataagatatatattcagatttactatttcgcacattttaagaagttctgtgatctgaagaatccgaaaacctataatgagaagttgaactggctgaaactgcatgaccacaatccgctgtacactactttggtggataagtatgaagttaaggaatatgtagcgaaactcattggcgagcagtacatcattccgactctgggcgtgtgggactcctttgatgagattgattttgacatgctgccagagcaattcgtgttgaagtgcactcatgactccgaaggccttgtaatcattcgggaaaagtctaagctggacaaggttgctgcaagggtgaaaatcgaagcagccttgaagcagaacttttaccatatcgggcgggaatggccttatagggatgtaccccccagaatcattgccgaacagtatatggaggaccatgtggatggggaactgagggattataagttcttctgttttgatggagaacccaaggcgatgtttgtagcatccgaccgcgcatccgaccatgtaaagtttgactattttgatttggattatcagcatctggacatcaagcagaagtatccccatgcggaaactccacttcggaagccgaagacttttgatcagatgattgaactctcgaagatgctttccgagggctttccccatgtacgggtggatttctacgaagtggacggacacctttattttggcgagctgactttctaccatttcagtgggtttatgccttttgaacctgcaaagtgggataggacgtttggtgattggctgaatctttcgggatgcaattgagaattgagtccgattatcaatgggtgcaatgttataaaataatcaattaagcggagaaaacaatgaaaatattgatgcttattaccggaatgcagtcgggtggagcagagcgtgtgatggcaactttgtgtaacaatctgtcgcagagtcatacgattcgtctggctattgtgaaaacggctcagtcggattatcaactagtggagagagtacaagttgtagctggaaacatccgaaaccagagcctacttcagtcggtgctgttcagtaaaaaggaaatcgacacatggaagccagatattgtgctgtcttttatgacaaagacgaatgtcattgcattattggcaaaaaaaatatccagatggaaacctccaattgtgattgcagaaagagctaatccttatcatacaaagggtgtacttggaaaagtcagaaacattctgtgttgccatgctgacggcgctgtatttcagacggagcaggctcagtcgtattataaaaatatcatcaaatgtcccagtgttgttctgcggaatccattgaatccagattttaaggtagaaccgttccggggtacaagaacaaaccgaattgtatgtgtcggaagactgtctgaggaaaagaatcagcgactgctggtggaagcttttgccgagattgctcaggacttccccgattatacggtggaattctacggcgatggtcccctaaaagaaacgattgcacagcatattgaagaactgagtatgcagggcaaaatccaacttatgggtcgcaaggagcgtgttcaggatctcattaaggatgcagcgtgctttgtacttccttctaattctgaaggaatgcccaacgcactactggaggctatggcacttggcattcctagcattgcaacggattgcccaatcggtggctcagcatttatcattaacaataatgagaatggcattctgattccgatgaatgacaaaaaggctctaatggcagcactcaaaaggtgccttacagagaaagactttgcagcaaaaatcagcaagaacgcagggcagattatcacagattatgatgcagaaaaagtgtgcagagaatgggagaattacttgcagaaagtttacagggggagggataagaaatgataaagaaattgctaagagatcctatatattatgggattatcggactcggaaaaatccttcctgataccattgcggcagatgcgttttatttgaaaatgcttttccacaaccgcatgggaaaggaactgaatttgaaaaatcctactacatataatgagaaactgcagtggatgaagttgtataaccgaaatccagaatatacaacacttgttgataaagaagcagtcaagcagaaagtagctgcaagagtggggtgggagtacataattcctactcttggagtttgggatcgatttgatgatattgattttaatgaacttccagatcagtttgtactgaagtgcacccatgattctggtgggcttgttatatgtacagataagaaaaagttggatattgatgaagcaagaaaaaaaataaatcatgcgcttaagcgtaaatattatttgaatacaagggaatggccatatagagatgtaaagccgcgaatcattgcagaagaatacatggttgatgaatctggctatgaattgaaagactacaagttttttgtttttgacggagagatgaaggcaatgtttatagcaacagatcgcaatgctgttacggatacttgctttgatttttttgatcgagagtttaatcatttgccatttactaatggtcatccaaacgccaatcacattatgaggaaaccggataattatgatgaaatgattcgaatagcggaaaaacttgggaagggaatacctcaggcgagaatcgacttatacaatataaatggcaggatttattttggtgagattaccttttttcattggagtggattgaaaccgtttgaacctgaagagtgggattatacattcggaagctggattaaaatacaataaaatcctgagatgggagaaaattaagatgtcagaattggttagtatcattattcctacgtataagggacatcgctatgtaggaagagctataaagagtgtacagaaccaaacttacagtaatatagaaattattgttgttgatgataatggaatgggctctgaggagcagataaagacccaaaaggttcttgaaccgtttcttacggatgaacgtattcattatgtcgtacataatgtaaacaaaaatgggtcagcagctagaaacaccggggttagaaattcaaaagggaaatacattgcattattagatgacgatgatgagtatttgcctgaaaaaatacagatggaagtgaatgccttttctgaaatggatgatagttgggggatggtatattgtagtagtgataaaaacgcttgtattcagaaaaaaagtggcgatctattatatgacttattactgcatactgtcgtgattggctcaaattcttttttggttagaagacagatatgggaaacacttgatggttttgatgagtcattcaaaagacatcaggattttgaatttacggcgcgggttgcagcaatatgcaaaattaaaggtttaaatgaatgcggatttatttacaatgcggatattggtaggaataaggcgaaaaatattgaacagttaaaggaacatagggcgcactacatcaataaaatgcttccgttaatcaggagattccaagaagacgaacaaaaaataatcatatgcagtaattctatgcaggcaacatcacggtatttaaaagaagggcatcccgtgaagtttattgtggagctgaagcgatatatgagccaatgggaaccccgatgtggttatttaaccatctttcgagttgctcttatgaaattaggacggcgtatttaaggatgattaggagattttaaatgaatgagacaacaaaacattcgatagggattatcagatataattatctgtcattaacattgatttttttctattgcagagattttttttatctggtttttcaaagagttgtacacaatgaaatgataagtcgagagtatgaaaaaaagtctgtaaattgagatcttctatgataagttaatgagaaaggtaggtggatgtcgtgaccacctacctttactatacggatgcttttggattctgtcaagatgtattggaaaatcccatcaaattatggtacacttcttacaggaaaacatcaggaggtgtgccatgaagctaaaaacagacgatccctttgtacctgaagatatcagggcaaagatcaatggactgcagtccctgctggatcatgcagccgacttatacagtgatatctatagctggtatgacagtgaactgaaatcctatgacccgaaagccaccgcagacgatgaactgtttgaccctggcacagggactgttgtggaggggatcgattacctgtctatcatggaatccctgtcagagctgcagacagccaacgaatgtaaaatgcagagggattaaccttgtgtcccatcggcctggcctctggcgatgtcttcccgtatcagggccttgatggccccttggacggaagtgtccctgccatatttgtgctgtctgacccaggccaggatatctgcatctgtcttcatattcagttttaacttcacctgtacagtattatagctgtcgtacctgtcctgagcatcgtattttgaaaatccatacatggaaagctcctttccggataggtgtacacctatgcctgtgcgctcttattccggcagtctgccttcgtacataatggacagttccccatagacctgcccccagttgcggatgggcatggtccacttcttcgtcgcctcgaacgtggccaggtacagagcctttaagagcgccgtgctgcccgggaacacgctccgctggcggttgagcttccggtaggtagagttgaggctctcgatcgcgttggtagtatagatcaccttcctgacctccatggaaaacttgaagatgggggataccacatcccagttgtcatgccagcgtttcattgagttggggtactttggcgtccacttttccgtcaccttctccagcgcctccagcgccttttcctcgtttgcggcatggtagatggttttcaggtccgtggcaaatgctttccggtccttgtcggagacgtatttcagcgtgttccgtaccatatgtacgatgcagcgctgctgctccgtcttcgggaatgccgccgttatggcttccttaatgcccgtgagcccgtccgagcagagaatgaggatatccttcacaccgcggttcttcaactcgttcagaacgcagagccagtacttggagctttcattctccccgatctgtatgctcaggacttcctttttaccttccagcgtaaggccgaggatgacataggcggcaagcttgcggattaccccgtcctcccgcacggaataatggattgcgtcgatgtagaccacgggatagacttcctccagcgggcggttctgccagtcttcaatctgcggcagtatcttgtccgtcacgtccgagatgaacccttccgaagcctcaaaaccataaatgtccatcaaggtatccgagatttggcgggttgtcatgccttttgcatacatggatatgatcttctggtcaatgccggaaatgtccttctggcgctttcttaccacctggggttcaaacgtggacttcctgtcctggggcacctggatgtccatgctcccgaagctgctgttgatccgcttgggcttgtagccattgcggtaatcatccgaatccgaccgttctgacctcccatagccgagatgctcatccatctccgcttccatcatctccttcagggtgctccccagcaggtctttgagggcttcctggatatcctccgcagtctggatgtcatactcttccaggagctgatggacgatgttccttttcccctccgtcatgactactttgtgtacgggctgtttttctcttcttgccataataataggcctccttatgataatagattttatcatagaagacctaatgcttaatagctatttacagaaaaactttcatactctcaccaaatacggaaacctccactgcctatgaatacaatagcattttttggtgtcttccgcaagcggaattatgatgccaatgcccctcctgacaggcagctgccacgatcaacgctgcttatttcagggtaagtaggtaataatcagtatctgcaaatttccatccacatttgataagataagttcaaatgatggaggtgataccaataaatacgaatgacaatgtaacctcaaaggctgacctttgggcagaccggttccatgcttttcaggaaagcggtttatcccgcaaagaatggtgtcagcagaatggaatcccacagtctacactgggttactggatccgaaagctccagtcagaagcagctgagacagaaagtgcttctgatccggtgtttgcaaagctcccttcggaacatgaactccatttcagtacagcagatacaggaaaacctcctgtgatgctctgtctcccggaaaatatccggattgaagttgctgcggactgtccagccagactgttgactgccctgcttcaggccttaaagaactatgcttgatttttacggaagtactacagtctatctggcatgtggctgcacggacctccggaagagctacactggtttagcggccatcatcaaactgaaattccatctcgatccgtactcccgctgtatgttcgcgttctgcaatcgcaggcgcacattgctcaagatccttcagtgggacgggtcagggttttggatcctgatgaaacggctggaccgcgattccttccattggcctgacacaccggatgaactgcagaaagttacgctgaaagagatccattggctgtgcgatggtttatccctgaaccccagcggcgcatttgaagaacgtcacccgaagatcgtcatatgagcccggatcctgtcaattcgcaaaaagccgaaaatcactttgttttgggcggattttcctccgtcccggaatgcagtttcctataggaacggaatgctttttctggtatactttctggtagagatttcagaaagttgaggctgtgttatggatccgctttttacagaggaacaactgaacaagatgagcagggaggatatcatctccctgatgaaaaccatgcgggagcattatcagaaacaggaaacaaagatccagatcctcgaagaaaaaacaaaggaactggaattcctgaacgcgatgctttctgaccgtctgactcttgcgcagcggaaacagtttggcccatccagcgaaaaatatgcggatggctatacgcagctgaacctttttaacgaggcagagcaggaagcagagcctgatgcgccggagccggaaatggaggagatccatccgtcttcctataaaagaaagaaacgttccggcaaaaaggaggaagatctttccgcctttgagacaacggaagtaattgagtataagctgaccggcgcggaccgaaactgtccggactgcaataccaaatataaagtcgtgacaaaagagacggtgaagcgcctgaagtttgtgcctgcacggtttgaagtggtggaggaggtcacctatgtttacagctgcccgaaatgcggggcgatgaaacgtccggaaaaggcgccttcccttctcaaaggcagtgtggcaacaccatccctggtggcaggcatcatgaacgcaaagtatgtgggcggcatgccccttgcgcgtcaggaacgggaattcgcccgttacgacctgaacctttccacaaagaccatggcgaattggatcatccagtgtgcggaccggtatctgcagccgctttatgaactgatgaaggaagaattcctccggagccggtacgctcatggggatgaaacccgtgttcaggtaatcgatgagccggaacagaaaggttccacccagaactggatgtgggtctatctcactgatgaatacagcggcgcaccccggatggtcctcttccaatacgaaagaacccgggcgggatatcatccggtggaattccttggggatcagtaccagggatatttcacctgcgatggataccaggcataccacagccttccggaaaggatcaccgtgacaggatgcatggcccatgcgaggcgcagatttgatgaatccctgaccgttttgaaaaaggactttaccaaagagcagctgaaggaaacaaccgcatatcaggcaatggcacggatcgggatgttctataagatcgaagagatgatccgtgacaagtcaccggaagaaaggtatgaagagcgtcaaaagcaggcaaagccgcttttagaggcttttttcgagtggcttcataccctggaggatgctgtggacagatcttctaagatcggagaggcggtcctgtatacgctgaaccaggaaacctatctgaaaaggtatctggaagatggccatctgagtattgacaatctagctgcagagcgggcactgaaaaattttgccatagggagacgcaactggctgtttgccaaaagcatccgcggggcacaggccagtgcgactgtgtacagcatcacagaaactgcgcttctgaatggactgaagccatacaactatctcacatatgtgatggaaaagatgaaagaactcggtgcgtttccggcaaaggaagaaatgctggagcttctcccatggtcctccaatctgcctgatgattgccgcagcaaacttaaaaagtaaaagacagatcttcccccggtaagtgctgggggatttcttattttgtcaagatacggattattacttacttacatttcaggaggttttattatgtacgatgatatttttgaatctatccgctatgaagcggaaaaacggaacctgcgggaaagtaccataaacttgtactgtgccaatgtcaattactttctccgctgtattgggaaaaccgcctctgagcttacacttgacgatgcggaaagtttcctctctgccaaacgtttggaaggcaggtctcccgaaactcacaaccactatcggtcagcaattaagttcttctacaaaaaagtgctctggatcctttgggatgatgacatagttcctgccatgaaaagggaacggaaccttcccgccgtcctgagccgtaatgagataaacgcgatcattgaggccacccaaaacctgaagcataaagctatcattgcgacgatgtactcttccggattacgcgtctcagaggctgtccatctccattacgatgacatttcccgtaccaacatgaccatccatgtccgtgaaaccaaaggcaggattgacaggtataccatcctctcccggaagaatcttgaccttcttaccgagtattggtacaaatgcggccggcccagggggatacttttcccaagctcctggactggtggatacctggatataaccagtgtgaaccagttctttaaaaaaagcgccaggcttgccggtattacccgccgtgtctcttcccatgcgtgccgacacagttttgccagccacctgtttgaaagcgggaccgatatcaaatatatccagtcccttctcgggcatgtggatccccgctctaccgatgtctacctccatgtaagcaacaagaccctcctcggcatccgcagcccgttcgatggtccgcaaggcggtgaggaatgaacactgactgcacaatccaggatgtttttaaccgtttttatccttcctatgcatcttcccatgatgtttcccctgcccagagaaaggcggcttaccacatcatgaactgcaagaccggtgcttttggcgtaaatgtgagcgtctgtgaggattgcggctgtatttccatccactataattcctgccgtgacagatgctgccctatgtgtcaggaattcccgaaagaaaaatgggttgacgcgcgcagggaggatctgctggacgcgccatacttccatatggtattcactgtgccggaaaatctgaaccctgttatctacagcaatcagaaacttttatatacagcgctttaccatgccgcgtccgataccctgcgtgaacttgcggctgacccgaaataccttggcgctgacatcggctatatctgcattctgcatacctgggggagcgccatgaacttccatccccatatccatgccattgttctgggaggcgggctggatgcaggaaatcactggaaaggcagcggggaggacttcttccttccggtcagggtggtctcccggctgttccgcggaaaatatcttgctgaactgaaacagctatggaaagatggaaaactcgaattccacggtacggcagagccttacaggaaccattatgccttacaggaattattggatacctgttacaaaaaagaatggataccctactgtaagaagccgttccatggcgcggaatccgtcatcaggtaccttggaaggtacacacaccggattgccatcagcaattatcgtatcaaatgcatgacggattctatggtcacatttactgcaaaagattataaaaaccagggccagtgggaggagattacggtttccggtgaggagtttatccgcagatttctgatgcatgtcccgccgaagcgttttgtccggatacgccactatggcctgctgtcatcccggaacaagaataagaagatcaccttgtgccggaatctcctcggctgtagaaagtatatcgcaaggctgaaagatctggatgcccctgccatgatccggctgctttacaataaggatatctgcaggtgttcttcctgcggcggaaggatcattcctttaccggcagggcagccttgtacaatgccagaaccgcatcttctatgttaaaaaaggcaactgaatattttttaagcttcctttggaggcttatttctgatgccataaacatgacaccggacgccgaatctggctgccatgcatccatatgcagtatacttcgctaaaaggctggggaaattgaaagtccatatataacggctacccggacgcgcctttgttcaaccaggaaaaatcgaaactgatgcaaacgaaagggcagttatcgaaatatcaaagctgctttttcgtttgcaccaccttcgattctttccttaacgatttgttgattataggtccgtctgatacaacaaaatattttaagtacataaagcatgcgattgaacgttttaatacgggtgttggaaaagaaaaaagaattacaataatagtacaaagtcttgatgagctaatctttgctgaatcaggtggggaacctgacactctggctcggaatcagattactgggaagtttgatatggtgacagctgttttttggaaatgttatgattatttggcaattgcgccatatttaagtaccgtcgaagtggttaagctggcattaaaatcgagcaagcaggtatttacatattttcttgataaagaagtatctgtgtcagaatataatccggaagacttaaaaaaaataatagattttcagaaacaatatcgtgaaataggggggatttctaaaagagtaaaggatgaacatgaacttgaagaagaatttttgactgatttacagcgattttttactaaatttgatgggagtcgagagagcatttcgcagtcaaatattatgaataatgaatcactgttttcacagaagggtttgtattttctcccatatgggtgtattgggcgggatgctaagatgcaagagcttgaaaggctttttactgaatgtgcgcagccagttgttataaaaggtgtggccggtgttggcaagactgcgttttgcagttattattatcacttgcataatgtagacgatcataaattttcgatgccttttataaatttagaaaactgcgtgtcaaaagctgattttatacattctgtctgcgaggcattacaaatcaaagaggcatttatgaatctaaataatatcctggagcaaatacatagtgcggagaggcactacgatgcgttctttttcgataactgggaggattttcagtgcaaaactctgggcagtgaagaatttcagtgtgtttataaattcgttaatacacttgcatataatggatataatgttttggtttcaagccaggcaaaaacaccgtctggatggcgtgagatcagaatggacgttttggaaccagatgatgggagaaagttgtttacagagttgttgaaagggagaggaaagtacataaatcagatgtctgcgagagaaaggggtgcgtttgaaactttgctggtgtgtatggaaaaccatccactgacaatggtgctgacagcttctctaattgaagaaccaaatgatacaatagaacgaattaagaataaatggagtgaggtgtgtgatcaatcagaatccaaaaggcatcaatcaatggaagttgcattaaaaatgtcatatgatgcggtttcaatgactccaggtgcggtaactctatgggggttgattgcggaattgagtgtggattttccattttattttatcgatgctctgaagcagatattttcgaaaactgcatgggataacgcgcgaagtgcgcttgcaaacagaagtcttgtccaattttctgaaaatgcatcaagtttacatatgttgatgcctgtgaaagcccaatgggaacatttggccgggaaaaaggaaaaaaagaaatgctttgcattgtgggcaagactaatcgaacatgtagcaatgcaatcagatacatccgagcatacgcaagatcccgaattaagtaattccatcagaggtattgtacttgattgtatgcgaaactttatgatgatcacagaattacttatccaagatggtcagattaaagctgcggagaaatgtatcaatgctatgcaggattattatgaatcactgtcagatagcgcttttgaatttcttgataacttgcctctggataaattttcgttggtcacaaaaggaatggtaattaaatgtaagggagacatttgcagactaggtagaaaagaggagccagatattgcggatggatattaccaagaggcgcttgcttgttttgaggaaagtggagaggatgtatggcgtgcacaggtcatgaatgtgattggaaaaaatatgttctggagtttccatgatgcgtcaacagctgtagactggctaaaaaaatccgaaaaattatctcgtgatgtgtcgtatagccgaggaattgctgaggcgaaaaaggatcaggcgattatattaacggaagaatacaaccaatgtgatgaagctgatagatgtttggatgaagcttattccttgtacaaagagttgggggattaccggggaatggcccatactttgaaaagacagggcgttattatgtggaggtcaggagatgttcatggcgctgtagtaaaatatgaagaagcgctgggattttatgaacgtgcacattatattcagggacagggagatactttatcgcgtatatgcaccggatatattgagctaggagaaatggttaagctgcaggaagccattgcatccagtgaaaaacttatggataagatcccatatcagatgactaaaagcgaattagcagacagtatcaaaaaaggtagaaactggctgcttggatgggagttgaatcaggataatgaagaaagtggaacttttagcaccagttaaggatagcgagtgcctgcgggcagttattgaaaatgggactgacagcgtttacatggggtatcaacagtttaatgcccgcatgtttggtaaaaattttaatgaatcggaacttcgagagcatattaaatatgcacataaaaacaatgtcaaagtatatcttacattaaatacattgattcgggaagatgaaatgcgtctggcgttacagatggcgattcaggcggtaaaagaccgtatagatgggattttagtacaggacataggactggctgcggagattcagaaaaacatttccaatgctaatttgcatgccagtacgcaaatgtccgtgtccaaccattatggcgtccaagtattacatgaaatgggatttcgaagggtagtcttggctcgtgaattaaattataaggagattactgcaattaagcaagtgtgtcttgacggtcatgatatgaaccagatggaaatagaagcgtttatacacggaggactttgcattgcttattccggacagtgcttttcctcatcctattgttttggctcatctgcgaacagaggcaagtgtctgatgacctgttggaaaggatacgaacttaaattgggtgagaaagtcttagaaagaggaagtttgctaagaccacgagatttggaggggctgtatggactaaagtatctcatggaaggtggcattgactgccttaagattcaaggaagactccgaaacagcgattatatcggtgaaatagtaaacgtttatcgacacgccattgatgatgtttttgaaaaccgtgaaaatgaaaacagggaaaaaatttataacaagcgattatgggacgtcagtccaagaggcttgacaggagggaatttattgccggaatctgacaaaaatctaattatggatgctggtgttgatattttgattgataaaggcaaaaaaatggacagcagaaaggtttctggcacaccacaaaataaaaaaacagctgtttttctgagagatattacatttggtaaggactattctctgctccgggaggatatcgattggatatatataaaatatgaaagctttttgcaagatgaattgaaaaatatgattcatgaattgtgcggacggtatcgtatctgcatttatatgccaccaatgatttatgaaagaaactgtgaaatggtatacgctagagtggattgcattgtgaaagattatgccataaagggcattgttttatcaaatgtgagcgatcttatgctgataaaaagatatggggaaaagaacttagagtatatatccgggaatcacctgcatatttataatcattttactgcagataggttgatggagttgggtgtcggtataggtacatattcattggagttgccatttaatggttgtgctgctttgaaagagaatacaaacctccccatgcaacagattgtctttggacacccagatttgatgcatatgaagtattgtctgctttctcatagtaatgaatgcattaattgtggtcgatgtagtgataagaaatatagaaatatagaattaaagggagaggctgaatttcttgtgaaatttgataaacttcaaactgaaactgtactatacagtaaaaaaacttattctgcagatacaactcgtgttataggagattccttgcgagttgattttttgaatgaatcagttacagagatgaatgcgattataggcgatatcaaatgtggctgtttttatacaggcggagaatacacaaatgaaattctaaaaggagaataataaaatgagcgcgttaagccagatggataattttgtcccaccgaaatggattaaacataaaatactcactatttggaatttgcgtgatgagaatgacttaaaatctacgatacatcgatacagtatcaatgaatatgagaagtgtcttcaaaaaattgatgaagaactgaggtcttctggtgggaacttcgtatatattattaaattggtatacagaaactctgtttataaacttccgaatttcctgattcatagtcgagaggatcttctgacatgtagagataaactgaaagatgtaaaaaaggagcagtttatagaaatctggtattgtaaaaatataacgctgaaagaaacaatatttggaagagtgctgttttctctggatgaattatttccgagaatagtgaaacgaaaaatggaaattgcatggggaaattcagctcgactgatagagcaatatccaaatttggagtgtgcatttgcttcagtggagattgatggatgggaaaagaattttcgaattgttgatgtcattcaagcagacaagtctaaagctgagattcaagaagcagttgttatgttattagatttgttgatcatttatcagagaagaattattgattttggaaaatttgtaaatgaatgtgggtgttcatcgttatgtattgaatttttgtgtgaaaatgacagaaaatttacaatcatcgattgggactgcgataatgatatgaaagttataaatagaatctcccgtggagcaggtacgattgctgaactgtttgttgtaaaataaacagctgaacataatttaagatgagttttgtggagataactcgtggtcttaatctatagtagtttaagtagtcgaagtaggtatttttcacatggactacatgtagtcaatgtaaaaataccgtagtttcggggctttgagccccgtgaccacgagttttgaaaaggaggtgcgaaatatgtgctgtaattgctttttttgtggcgatggacgattctctgtgaacaaaaaaataggcttaaatggaacaaattggactgtatatgaagacgaaaatgtgtttataaccccagatatctcaccggttttaaaggggcacttccttatagtttccaaggaacatataaatagtttcggtaatggcagtagggaagtgtttctgtcactgcaaaaggccatggaaattttagtagaaaaagtttactgccaggagcaggttttgttttttgaacatggtgcggtgataagccatacagcaggaggttgtattgaccatgcacatttacatgcaattcccttagaaaaatctattgatgtagatgcatatatagacaaacacaagctcttagacacgccgaaattaaaaatgacctataaaactatgcatggatttgcgaaagaaagaaagtcatacatagcgtatgggtatagtaagaacgacatttggatacgtaatgcagactggctgccaactcagtttttccgtttattgatttctaattattatccgggagaatataattggaggattgcctgtaaatcagagtactcgaaagaattgtttagagaaacaatggaattggcggcacctttgttgatatataggaaggagcgtgaagataatgcctaaaagaataaccgtgtatgatgttttgatttcctgcccgtctgatgttggagagtatattgatagcataaagcgtggtgtttatcggtttaatagcactcatggagaatatcgaggtattatattacgtacgaaatattggaaggatgattcttttgcacaatctggtggaaaagcacaggaacttctgaatcaacagattgttgaaacgtcagatctggctattgcggttttttggacgaaatttggagagccaacagcgcactttgcttcaggcactgaggaagaaattgaaactatgatattaaaaggaaagcaggtgtttttgtactttttggacaaaccggtttcaccttctatgatgaacagcagagaatataaaaaaattgccaatttcaaaaagaaatatcgtgacaaaggaatttactctattgtcaaagatgaacgtgaattggaatcacggatcgaggatggattaatacgctatttttttgcttaaaaatccttcaaaaagaaaatcagagctctttcttgattttttagggtattccgcatataatctgtccgaaagatgccatttctatggtagaggacgaagaaggcttcgagtatccgcagatagatgaaagcaagtgtgttcgctgttaccaatgtgttagggtatgcccgattaaagcagcaagagcacagtaaggagagatatgaaaacaacattacttatcatggccgccggcatcggttcccgattcggtggtggaattaaacagttggagcccgttgatagcagtaatcatatcatcatggactactcaatcgatgatgcgtttgaggctggcttcaaccatgtagtgtttattatccgtaaggatattgagaatgagttcaaagaggtcatcggtgatcggaacgctgatatctgcaaggctcataatgtaactgtggactatgctttccaggatatcaacgatatccccggcgccctgccggaaggccggacgaagccgtggggaaccagtcaggcggtgcttgcagacaaggatatgctgactactcccttcattgtgatcaatgcggacgattactatggcaaagaaggctttaaggctatccatgagtatctggtgaacggcggcaagtcctgcatggctggctttgtgctgaagaacacattgtccgacaatggcggcgtaacccgcggcatctgcaagatggacgaggagagtaacctgactgaggttgtggaaaccaagaacatcgtgaaaagcggaatcggcgctgaggcggacggtgtggccattgacacagactctctcgtttctatgaatatgtggggtctgactcctgagtttctggatgtgctggagattgggtttaaggagttcttcgagaaagaagttccgggcaatcctctaaaagcagagtacctgattccgatcttcatcggcgagctgctggagcagggcaggatgtctgtgaaggtgcttagaagtaatgacacctggtacggcatgacctataaggaagatgtcgcagccgtaaaggacagtttcgggaagatgctggagaagggcgtgtatcagaaagagctgtatggggatctgctgtaaagcagagttgctggcgtaaatatagttggcagcaaacgaaaacgggcgaaattgaaaagtaggtttgtaagtgcttcaaaagaaggcgtagtgtaaaatagatattttctgttatacttactacaacttcttttgaagcacttacagtaggtttcgcctttttcaataccctacaaagtagattaacatggaaattctacgcataacagtgcggaaaacagaaatacaaccgtttgaaaaacaaaggaagtagattgacatggaaaacaataaaataggccgtccgcctaaaaagtgctatgatccagaatctctcatgcaggaactgatcgtaagtgcctcaaaagatggcgtagtgaaaatgacacgttctttctgctatactgattaaaatcagatatagtgaaggaggtagttttcatgagtgaaacgaatcaagaagctgtaaccaagtttgcggaagtcctgccgcaatcccttaataaaaaaccgtaccggcaggccccatcccagaaccaggaccgtcaggtcatggtcgtctgccaggatatgaaattcttttttccagaggggatccgtccagaatcactgcggacgttccttagtattctgaaacagttatgatgaggcatatggctgaaaaagccgagcatatctatcttgcatgtggagctacggatttccgcaaacagatacagggtctgactgccctggtcagtatgcagttccaactcgatccatatcagggcacgaatgtttttatcttttgtaataaaagaagggataccatcaaagtgctcagatatgataaaaatggttttatcctggcctccaaacaacttctggatggtatgagattccaaggccccgcactcctgctgaggtaagagagatatcttttcagcagatagaatggctgctgcaggggcttgagatcgagcagaaacacgcacatcatcaggtaaagatcgatcacaggaattcctgtttttaaaaaatggtagaaaaaacgaaccttcggtggtaaaatgaacccagtaaaaaatacgaggaaaaacatatgaccgaacatgaagaactcctgatgctgtgtgcaatggtggagaagcagaaagccgaactggaagccaaagaccagctcatccaaaaacagaatatccagattgaaaatatgatccaggcgctccttcacgcccgtaaaaagctattcggtccgtccactgagatgagaaaacagacagaaggacaactctcgttgtttgataccgcacaggggattgcaaaagaactgggtgtggagcagaaaaaggtcacggtaagaccatatgaacgtaagaacagacagccggggatccgtgcggagatgctggcagggcttccaacggagattgaggaatatgagattcctgcggaagacacctgcagtatctgcgggaacgtactgaacgtgatcggaaaacagtttgtccggaccgaggtggaatatgtaccggcgaagctgaaagtaaagcatatcgtcaggcaggttgcaaaatgcacggtatgcgggaccccttccggttctaacccgagcagccactttcaaaaagctgcggttccggctgctccgcttccacattccatctcaacgccatccctgcttgcccagatcatgtaccagaagttctgcatgggtatcccactgaacagacaggaatccgactggtaccgcctgggtctggtacttccaaggagcaacatggcccattggtgtatccgatgcagccgggaatggttcgaaccagtttattggaggatccatgaaaagctgaagttatgtgagatcctgcacatggacgagacccgtatccaatgcaataaagaggcaggcaagaaagccagcagtgagtcttttatgtgggtcatgcagagtgccgcatccgaaagcctgaaagggatcttcttttattatgcaagtacccggagcggatcgatcgcaagagagctgttaaagggttttgatggctatcttgtgaccgatgcttatgccggttatgaaaaggcagaaggtatccgccgtgcattgtgctggtcacactgccgccgatactttatagaaagcatcccacttgacagcagggtaaaggagatcccgggatcaaaaggtgccgaagggcgtgggtatatcgatctgctgtttaagatcgagtccgagatcagggacctgtcatatgaagaacgaaaagaaaaacgtcgggaagcgtcaagaccagttcttgatgccttttggtcgtgggtaaaagacacttctgtgctttatactacaaatgagaaactaacatcggcattaacgtatgccacaaaccaaagaaaatatctggagacctttatggaagatgggcgcctcccgatctccaataatctggtggaggcaaatatcaagccatttgctaccgcaaggcgtgcatggctatttgcagacactccaaaaggtgccatgacaaacgcagttctgtatacgttggtacaaagcgccaaggcaaatgaactggatgtatatgagtatttgaaatatctgctggaagagatgccgaacaaccgccatctggaacatccagagatcatagaccgatatctgccctggtcatccgaactgccagaacggtgtcgactaaaaaagcagataaaaaggtgcctcaaatggtaacagttacagtatagcagtttaagttgctatatgcactgcaagcgcgcaataaaataatggctatctttttgtaaagcatccagctatagttaaagcaaactgttccaacttcaactttttgatttgatccggcatctctgctgtatcatttctgaccagggcatcagatcttctataccttcgggctcatctttgtagtccggcatatagagcagtacggtctccagatacgcgtagatgttcagattgttaagttttccattgacggactctgcgccattatcgaagaacagcttaagatggatccgtcgtccagtgctctcttccttttctgtggaagaagacgggacaggatcaaagccctgttccgcgaggcggacggcttcgtcctgatctataagcggttgtctgtccgcggcggctatcaatggcccaggaagcagtcggaagtccggaatctttcctggcgggagtttgactggctgatgtcggggattgatattgaccagccaaaagccctcaaagcagagtaaaaaatcatctggatttcagcagaaatcctgcacagaaaaatccgaaaatctcctgtagattcggcatttttcaggagccattttcctttagtaaaagtcctgtttctggtataataagggtatcaaatccgaggagaaaacaatggcttccagtgcgaaatatatccagctgcgagagctgaggcttattattgacgaaaaatccagtcatgagaaagcgctccaggaacaggtggactatcttaccaaaaagcttttcggttcttccagcgaaagaagatccgatgacattccgggacaacacaatctctttgatgaagcggaaatggaacaggatccatccctgctggaagaagaaacgataatccgggagcatacccgtaaaaagaaggcagcgcatgaggatctcttcaaaggcctgaaaattgaaaaagtagtaattcctcttccggaagaagagcagatctgtccggtatgcggtacgcagatggtcctgatcggcgaggagtatgtccgccgggaactggaattcattcctgccacctgtaaggtgatcgaatactacagccagagttacggatgtccatcctgtaaggaaggactcggcgatacagagaaacctgtgatcataaagtctcaggctccggcgtccctggtagggaaaggccctgcctcggcatccaccgttgcgtggaccatgtatcagaagtatgccaatggactttccctttaccggcaggagaaggactggaaacagtatggggcccaaatcagccgcaccacccttgctaactggatcatctattgttcgcagaactatttccagccaatatatgattactttcatcgggagctgctgaaacgtaagtttgcgatggcggatgagacccggatccaggtgctgaatgaggaagggcgaagacctcagacccagtccttcatgtggctgttccgaagcggagaggatgggcttccggagatcatcctgtatggctattccccgaccaggggcggcagccatgcgaaggaattcctggaaggctacagcggatatctggagactgacggctatcaggggtataacaatctgccggggatcaaacgctgctcctgctgggcacatatccgccgatactttatcgacgctgtccccaaaggcaagcagtatgactacagtcagccggcagtgcagggagtccggtactgtaaccggttattcgctattgaagactccattaataaaaaatatcccggtgattatgaaaagcggaagcagctgcgtctcgagaaggaaaaacctgttctggaggctttttggttgtggcttgatcagcagaagcctgtccggaatacccggatggataaagcggtgaattatgttttgaaccgtcgggatacagcacagacctatctggaagacggccgctgcagctttaccaataatctcagcgagaatgcgatccgtccattcgcagtgggccgcaagagttggctgttcagcagttccgtggacggagcgaatgccagcgcagtggtctacacaatggttgagatggcaaaagcgcacggcttgaaaatttacggatacttgaaattccttctggaacatcggccgaataaagagatgtccgatgaacagctggctgaacttgcaccctggagtgaaaaactccaatctatcaaaaatcgcatgtgaattatagtgaattactccaactcgcaaagggctggggtaattttgcatctgaccgcattaatatttggcgcttacttactatgtatgaagaaacgggtcatggaggttcttgcattccagatagaatacaggatattttggcgttagatgtagcgtgtgttggaccggaaaataattctgatgagatgaaagtatcaatatttgtcaaagagccgcgtttttcttatcatagagaaatgataaaagaattggtggaaactgcaaaaaagcatgacataaactatgttattgatacgtttgcacctacatatggaacggactgtgaggatactatgatagcaggatatgatgttcgacatggagcggtgggaccgggcacatttgccacacatgggtacgaaaggacgcatactttggctgtgcaaaatacatatgatttaattaagtactttattttgtgaatagtaaattgcgccggatagctcatgttatcgtatttgcggttctgacaattctgcttggaatcacgctgcagacaggagaccttccgatgtggttcatgatatttccgatggcttggagttatgcggatgaggcaataaaaccattgattcaaggtagacacttctcttggtttgatgagggattaaacctgcttggaacagtaattggcggccttgtggtagcggtgattgtgtaagttttggaattattgtatcgcacaaagaacaatgccttccctctcattaccttgctatgtatctttttcagagctaatatcaccactacaagttcaatgaagaaggagaagtggtgacaactatggagaaaacaaagacaccccgcacgttcggttccagacccggccacacagccgaaatcgtaaatcagataaaatcgtatctgcgggaacatccagtggagtaccatggtcaggtagaccattacggtcaggagaactactatgatcagatgaattccttgctggagatgctctactagtacagcattgccaaaataataatgaatagacgttgcttttttattgtagtcggtgcataataattctatcactaaagaatggatgtgttattatgcgaaggaaaacaattgatactatcccggttttatctgatgccatgaaaaacatattatctgctttttcaaaaagccgctcccttccgtcaggactggtcaaaagagccagcattgtcctgcttgcgtcacagggggaactcaaccagaatattgcaccacaggtcgggcttcattataataatgttgccacctggcgcagtcggttcctcgcggcgctcccagccttgcggaggattgaaatggacgacccgaaaaagcttgaagatgagatacgggcagtcctgtccgataaaaaacgccccggtgccccgtctgtttttacgccggaccagatcatgcggatcatcgaccttgcctgcagcagcccaaatgattttgggtacgaagtaagccagtggagtctcccgctgttagtggcagaaattaaaaagcaggggatcgctgaacagatttctgagaaatctgtcagccgttttttaaaaatgaggtagatttacatccccacaaaatccgttactggcttcattcttcggaaaagacggaagccccggaatcttttgcgcggaaagtaaacgaaatctgcggcctgtaccagagtgcccaggaacaaagccgggaaggtgcacacattgtttccacggatgaaatgaccggggtacaagcgctggaacataaatatcctgacaagctcccattacccggccagtgcgccaaaatggagtttgagtatatccgccatggcacgaccagcctcatcgggttctttgatgttgcaacgggccgtatggaaatgccgtatttaaactccacacgcacagaagaggattttgtggaagccgtgaaagcattggtagggacagacccgcaagccccatggacatttatatgcgatggcctaaacacccataaatcggaagcccttgtccgctttgtggcagaagcctgtgcccttggcgtggaactgggcaaaaaagggaaaacagggatccttaaaagtatggaaagccgagcggatttcctgcatgacccttcccaccggatccgctttgtctatactccgaaacacagttcctggatgaaccagattgagatatggtttggcatcattaaccggaagctgctgaagcggaaaagctacctatcaatagaagaactggaagcaagcatcctgcgctttattgaacaatacaatcttacagcacacccatttaagtggacatatgccgggataccattagtaatttaatcactgatatttaagcaatgctgtactagtcatacacagagtttaattctgtggagacgccggagtttaaagcaatcgtgaatccgctggatgagaagcttcggtcgatagtggatacggatgggaaaactgaggcggaagtggacgaggaagcggatgcctatatgaacatcgtatttcacttgtgctgtgagtacgagcgccagagctatattgaaggcataaaggtcggggcgagattgatgatggagctgtgggaatgatattgaagggtgctgagatagaattgctgggactgtgagaaaatgcggaaacccctctgtggaaaagccaggattgatggctctcctgcagagggggatttttatgcttgtgtgatcactcacgctttaatatatttttgaagcctgctgtttggcttgtctggaattgtcattttgagctttccagactccaagagcggaataagatattttttggtaaaatatgtgaggttcttatagcctaaataagaacaaatttcttttttactgcgggctacttggcaataattaagaatctttgtttcgatatcttggtcagcgacttggtcagtgactaagtcgacttggtcacttgtgactaagttctgtggtggcggtccgacagtaacagtcgagttcgcttcgcttagaggaatcacagtacggaatatatcaccttctacaaattgcggttttccgccagagtagagctgggtatatttgtatgtgttcctcatgccggagccgagttcatcagccaggccaatttcacggaaaacctttgaaatagctggattcttgggaaacggcgcaaaagtggctaattctaagttgccaaatccatgtgagaggtttgcgttttcggtgtaaatctgttctttttcgatgacaattttggcaacataggcattcgaaaaatctctgtgggccaacagattcgagattatttcacgaaggattttatccctggcgctgacgctgatgatgccgtccaaaacaaaattgtcgtttagatgcagtcggccaaattccaacagtctgtcatagctttccagcagattggtggtaataacatctctgtcatcgtagcggtccatgttgaacatccgatagatggcatccgtcttatggtgagctaggacagagaaaatcaaatcgtcaggaccgaataagaggatagatgcgagggtaatcccttctttgccagtgctgctgtcccggaggattagtccggcattgcggagcatctcttcatctgtcatggctcgccagggatgatcctgtctgcggcttttggtcatttctctggccctgtccataaggtcatgccgcaggtcgttgactgtaaaaacagggtagacccgatttacaaagtaggaactttgctttcgggaataaagcctgtaaacggattcctgattgtccgtaatatcaatatccgattcatggttgcggtcatagattcgcccgttgcatcggcatacattgggattgacaggaacgcgaatatatagaataagcttcccgtcatgctcataatctatcggggtaagatagaggggcgggtacattttgttttcgttattgatgcaagtgacaaaatttttcttgatctggtcgatacagtcaggctggataccaagaattgtcccgttatccttgactccgagaaatatatgaccgccatctctgtttgaaaaggagcaaactgtatcgtacacatctttggttatatctgtagtggattttttgaactccacttctgtattttcaccattttgaatcaggattaaaagttcttttggcagttgcatgggtagttcaccttccttctgaatatgtgggcgattcccacactcgtattgtaaccgctgtggagagctatatcaaggagtttccgaaattttattttcttcagcaagctctctctgtatctgtcgatattctgccatctccgtttcatttgccggccggacggctggatcggctccgcatacagtttttccgcagtccgggtagcggtcgggcagtgtggcagcaggaaatatatagtggcaggcacggcagtagtataaagtttctataacattcatctcctcatctctgccatagactggcatgaacttctatttcttaagataatcatttcttagttccgggctgactggaagctcaaagcctttttcaagcagggccttatatttgaattcaatcagcacgggatcaacgccctgttcatgggcaatgtcgtcggtggtgcagaaatcatcgtgcaaagtctgaaattcccacaccgtatgttgccggatatcatcttccgggcagtctggatgctgtttccgttctttctccaataattccttaaaatcataatacccgatggactccaggacagcttgaacggttatcatcagttcggctgaaaaaaggttagcgcgccgttcctgtctggctgaggaaaggctgtagaaccatgtgtcctgcaaagggccgttcgtcctggcttcctcgcggtcaaaaaaatcatgccccagctcatgcccagccgccataagctgttcgacctcagttgcgtattcactcagccgtatgaagcggcggttatttacaactgcgtaaaagccgagtgtgtcaaccagccggggggttgtcttaaagttgatcgcccgctgttcgatgatatcgaagggattgcgggttccatatattcttgcggcgtaggccgccatccgtagtgcaaactggctcaaattgagtctcccttctcctggtgaggcatatctttcctaagattctgtcagaatcccacctgtgggcaagatggagcggtaaagtttgggataaaaaaatgattcagtgggtgaagaaatctttgaagagtgtaaggcaaaagacgaccatagggtttttgtctcatcatttacatttggattgagaaagaatgtgagaggatatcttccagtaaaaacagaggtatttataaggagaatccctttttactattaccgtgcggataggggatattcgtttagaagttggatagccgatcttattcgtgacacggaagaatatgaggaggagctggaaaagatatatcaagtattggagtacctgtattatgaaggtggggtttctattgatgaaataatgtcatatatcaaaatacaattatatggaaaagaagaggaaagtgagaagcagcatgatattgaaaccgctatttcaaaaagtttactgtacgcttcttcatggattacagaagaaaaacttttgtatgattgggcagagtatatcaagatatgtaaaaaaataggctggaacgattatttcccggaaaggttcattacaaaatataatgaggccttggaaatggcaggattatccccgattatatatggtttccattcaaaatcgtggcttctccatctggacagagaaagaaataaaatttcgtgcatggggaatttcccatgtgacgggcttggaaggccgataatgaaatggattggtataagaactgaaaaagtagaaggagtgtcctgtacctgtgtaaattcacgctatggagagttgataattcaaattaatccggaaagtatgatttatgttttgaattatgtagatgggaatggcgaattggcggaaccgggtgaagcagggacagttatatcttgggaacagcaatatgcgggacctttgaatatggtgtttgataatgaagcactaaaggaggcacggaaggcttttaagatgacacaaaaagagcttgcagatgctatagggacatctgttaggacctatcagaagtgggaaaatggtgatacaaagccggattgtcaatctcttttaagattgatgaactggttagaaatagaagatgtgcaatacttgattgcttataaaagttatccggcagaggaggaaaagggatgagaagtggagtgctaggcaaggacatcaggctttcgggtaaaaataaggaacaggacgcatggaaattatacacggcgactatgaagatattggatcaaggttgtgatgtggaagtaaagaaaacaaaagaccatataaaagtcagccgggttaccaggcaaacagagacagaaatgatgttctaatcaataaaatatcgtgccgttaatgaagtggcattaacgaaggaccaagcggggtcagtaagtatggagtgattactctattactttctgatcctgcttttttatttcggaaatatggtggcagatcggaaagaggatttgttgggagcaaaaatagtcgagtttggagaaaagaaaagcgggaagattttggaatagcttcaaatctgacatattatatacgaaagagtaaaacgtggatagatgtgattgggttttacgcgactcttaagcatgagcgatttgtaatttatcgaagtccacacgggaatcgacagcattagaggtcagatattgaaaaaatacaggaaaaggagagacgaaaagaagaatataagtgtgaggaaataagtgaatgaagaaattaaatggagaaataggtagcgtggaaacctatgtgaaatcgcaaaaaaaatttaggaaaaagtgacgggtatagtttgactgtgaatatagtagaaatatagggaggtcaatcatattctgtcgatggtaaaggagaaggtggatcttacaaatattattcatagaaaagccaatacgaactggtggctgtgatttacaatccaaatagcgagaaaaaatgtggacaagtaaggaaaaaacttccatatgttactttacacgaagggacgataggggtataatctaaaataactcatcattcgacactgatgagggacgattatattttgttgtgaatatttatttaaaatatttatttaaaatatttatttccaaaagataagtaaaacatgtcaggaaaggagtgacaataaagatcgcattataggcgattgctaagggctgaaataaataggcgatagcacgtagacatagttatttggattgtacattttaatttagaattactagaagacaggaaaatactacatagtttgtgtcgaattctatattgttacattcaaaatacgtggtcgaagtgcgcttgtttatggaattgagccataaaaaattgaaaaaatcttccggatattaacatactgaagtaaaaataaatgtatgccggagcagtaaatgataacgcacagagacttttccatgaaagtggaaatctgtaacgtaggtcattgactgctccggctttttttgattttcggggtgcagattcgaaggagaaaggggggtgttggtatggtcgatatccacagtgatgaatacatattggggcaaaatataagaaaatatcgaaaacagaaaggctggtcgcaaaaggatctcagtgacgctgtggatatggaccgtgccaacatttctggaatagaaaacggcgaaagaggtgtgatgagttgtgtaacgctaaggaaatttgctcaagcgttaggcgtgacaatggatgccttaatggaagaaaacgagatatcttttgatgaaataatctcaattcaagaaaaatataagatgctcaatcctttacacaaggcaatggtagaggaaacaatagatgcatatctggttaaagaaaatagagtttcaatctgagggaccgtacagtttttaaacaagctgtatggtcttttttgatttagggctgctttgagtgaaaatgtatcaaatttgacccatttatgtgtcaagcttgaaatctgcaaaatcatcctgttttgttatcatatagacagttcaagggacaggccctacagaatgtatctggcagcgttgccctgaacaaataaaatatcgtaagcccgattctagagaaggcgaaggataccatagcggagttcacagaacagcgaattatttgctggctgtggaggcgcttatatgggattactctgactatctctggaaccgggctttctctgttttattgccctgtccacagcgatgtgtggaattccccacagatgtttgctcctattgtgacagacctgctccggtatccttccctcccagagtccgagggaaaggacagaacaatgatgaagaacatgatgggtatggaaattggagcaatggcaatcaatggcgggattggcgtgatggagatccgtcagccgacagtggaactgcccagcgcagatgacgtggtaaaaatggtggcacaggctgccgcagatttggcgggagagattgcagaaaatgcgcacatcactcttcgggaactgaaaaggaaggtggctgcggttacagagaagaagctgccgtcattcaagcagcttatggaacagaaccctgtggcggtagcaaagagtatcgtgaacggtgcgacgctgactgcctatgagaacggatatgccgtgtatgagatggacggcgcgcatacggtcatggctgtggatcggtgtggcgattaccggtacgacttcagcgacggtacataccatgtggttcccgcagaggtatttgaagaggcggaatggagtcttcgcctggtcatggaaggagaacggcggatggagcacaaccggagcaagcgtgcatcaaataatgagtgcgtgtctctggaatgtgatggctcggactggtcggacgctgttatggtggatttcctgctggaggataacgcggagatgctggcggataaggaactgcatcgcctatatgctgcgatggggaagctgacagagcgccagttggagattgtgcagctgtacttctataaggggctgactcagcaggagattgcggaggagttggggattgcgcgtagatcggtaggtaactgtatcgatggtgctttgaaaaaaattaaaaagaatttctgaaaaaatacctcccaaacagctcaaaatggtgtgctttatgagagggttacttctcaacaacaggaaggagggcaagagccatgaatgcagtaaacaaggctcccatggttgcaacagagaccgaagctgaagcacaggtcacacaggaggcacgcccacccggcaacagatcagaggagtctacatcaaccgggacagcaaagaaaatctttgtctgttccccataccggccaatgtctgagacggaggaaagccggaaaacagagctggaggcaaatctgcatcgggccagaacagcctgccgtatcctctccacccttggtttcatgccgttagcgccgcatctgtatttcaccacattcctgaatgatggagacaagaaagaacgtgcagacggcatccggttcgggatgcggtggctggaggaggccgatgaggtctgggtgttcggcggcacgatttcagaggggatggcggcggagattgcaaaggcgaaggaactgggtaagacggtacgcagcttgccggaacctgggcgtatggtggaactgctgctgaagatgattacagagaactatcatgtgccgaaaaacaagaaaacggaagggcagcataaagctgcggaaagtgaggacaacgatggaaatgaagaatgagaagaacggtattctggaggaactgctcaaggagatgcaggaggctgggattatccgggcagttgcctgtggcacaggcgggaactgtgcggcggcacaggaggcagagaaagcgccggaagccggccatgaggcggataagtcccagatggagaatcaggcggacaaacagaagcaggaagttctggacaagcacagcgttccggcggttacgctgaacatcaagaacctgcacatccacatggacgagcgcatgacatcgtacaattacggtttcggtcaggaaacctcccatgccgctgtacctgacggcggagagcatggcttagagcttcccgaggacgattccgatgatattgatttcgaggctatgtcggaagctatccgtaaggaaaccgggctgtgcgagacagttatcctgacagtgcttctggcacagatgcactacctggatacggtgtttggggaagaggagggcaaggcatgatggatgagcagatgaacgtgctgggcgcgccaaagaagattgtagatgggctggttgaggtttttaaggcttcgcccggatgtttgaaggagtatcggagcagttggaactgctggcggaggatgcagtggagacattggaggacaagcctgcattcccggcaaaggaactgcttcccgcaaaagtatccgggaagaaaggcgcggcagttacccgcccccggaagaacccggaaaagaagaaccgtaaaggtgatacggctccggtggctgatgatgcagctcccgcagatgctgatacggcagaggataccgtgaagtacacaaaaaccgcagcagaggaaactcctcctgacagtacagacagtaatcttcaggcagatacagaggatggactgccgtgggaggaagataccggccagaaggaagcggctgcactaactgctgataatcaattaaaatcggctcccacagaccagtcagctacaacgatcccattgtatgaagcaaagaattatctccgtgtggattccagtgatgaggacgccctggtcggcgtccttttattgtctgcggagcagctgtgcgtggatgtggcgaggctgagtaacgaacagtggaaagttatcgacgctctggcctgtgatggggagggcagcatcctccccacggacacagacctgtatacggaggaggaactgtcgcaggtcaggagcatcatgcgtgtggcaatcctgtacgcatttggttatctgtatgagcaccgggaggaagcggaccaccacgcgcttcttctgacgcttcgcagcctcctttttgccgtgcgggaaggggtgaacttctgatatggagagggagattgcccgcttcaacgaacggctggctattcagaaaaacagcgtgtctgtcgataaggtggggaaccatgtgaaccgctgggaggattattattcctgctactgttatgctgggacttaccagtatgacgctgaacgggagagcgccgtaaccacgcaggagcagagcatcaagtttgaagtgcgctattgcagtgaactgaagaatctggattcgacacactaccgtgtggttttccatgggagcgtttacgatatccagtccgtagacatgatgaactaccagaaacgcaccatccgcattatctgcaaactggaggaggggtgatgatggcaaaaagctgcagtattgacgagcttgccgatgtgatcaacgagggcttacaggagtacgccacactgacggcaaccggcgtaaagaaagcggtccgtaaatccgcaaaaacggtgaaggaacagatttccgccaatgcgccggtgaagtccggacggtatgccaaaagctgggtggcgaagaccacggaggagaacagccagaagttagtgcagacggtgtgttccccgacaagatatatgctggcgcacctgctggaaaaaggccgcgccaagcggagcggcggccgtgtggctggtaagccccatatcgccccggcggaggcagccggtatcgagctgctgaccagcctgatcgaaaaggaattgaggtgaggagatgacgcacgatgatgtgctggcactgatggaggcaattaaggccgctactggctgcccctacgcctaccaccattttgccgagggggaatccccggacccgccgttcctctgctttttgtacccggatgaggcggagttcggcgcggacaataccgtctaccatgctttcaaccatctggatattgaggtgtataccgacctcaaagccccggaactggaacagaaagtggaggcggtgttatccgattatgaacttttctaccataaatccgaagtatggatcgaggaagagaagatgtacgaggttttgtatgaactgaccgtctgagaggacggttttattttgaagaagcggcagaggccacgggagatacggaggaaaatagccgcatccatgtggaaaagtgtacggagtggcagcggctctttacaaaagaccgttttgcgctggcggtattctacgatgcactggctgtctatgcggcaccggccaatggcggcatgaagatcaacggcgtggattacgggaacgtggcggtggtggcaaaccgtgcggagggctatggcagatacctagtataactcgattttaataagtttacattattatcctgaaaaccaagggaaacgtgcgcccaaagcacggacacgtaagccaagaaatcagattactaccaatgcttaaattgtaagcttatttaaatcgagttatactaggccagaacctgttcctggaatacggacagatcaccctggacacggcagcaaagaccatccaggtcacgcagaagatcctggcaacctccaacacgcaccagtacttctggctggaggccaatgaggagccagcgccactcctggagtcgccggaactggaagccggccatatgctgatcctgggctatgaccgtggtgcagatacgctcaatctctataatacaaaggcgttccaggcgctgggggtgaacggctcctatatcgccgcatggtaccagaaccagctgtggtatccgcatatgaaccccagcctgtcatttgttgtggacggcactgagtataaggcgggccagctgttcgcgtcggagcagaaaaacaattatatcgaaaaacgctaccaggcgaagtttacggagctggacaataaattcagccgtttagtcactaatactgtgtaccttgccagcggcgctttcacgattgaccaggaagctggtaagttgcagatcacaaaaaggacgctgggcgcaccggagaattttcattatttctggctagaagcacagaaagcgcctgtggcgatggcagacaatacgccgttggctcccggcggctccaattaccccatgcgtatcctcgccatggacaggagggattcctccagcttaccgccagcccagatggagatgccttgggcgatatcgtttcgccgtcccattgggactgtatggagggacgtcagttctccatgtttttcgattgcctatccagatatgaaggtagggagaacttgtaccgtgtgacgaacagcaagggcctgacgaggaatgaatactgcctgaattacacaccggctgctgacgatacggatttcaaagtcaatgtgatccggctggatggggaaacgatggcagccgcagagagcaaacctgtcacagtacgtgtgcatcatccgctgccgaagaagctggtgaaaaatatctgcatctgcggcgattccctggtggactgcaacaaggtggcgacggaggtttaccggctgctggcagaggacggagactgtgaggtcaaccagctcggtaccaggggttcggcagacggcaggcatgaggggcgcggcagctggagatggaaggattacctgcagggcgaggattatgcggggaagaacaacgccttctgggatgtggagaaggggcggttggatttccagaaatactgcgccaccaatgggtatgacggcatcggtttatgcggccccggtgcggattattcgtatcttgtgaacagcagcatgggcatcttccgcaagagcatgagcacactgaaccttgcgctcattaaggcgtttgacgaaggcgcatacaaagagaatgcgacctgctttgcgcatgggctgcggacggaccgcaggctggcattcccttatacagataaagctgtgacagaccggtatgaggaaaccagccggacgctgaccaacagcatccatcccagcaccagagggtatcaggcatgggcagccggctattattgccagattcgggcatctacatcgcttttatcaaaaatgctgtggtcaaaggcgacgaggtggaatacacaacaaactttggtgtgaagctgataagcagcggcaacggccggacgctgggaagtttcctgggcttccgaagggcgaacccggacggcactgtggaattcctggacgagaactggaaggtcagcggcaggggcgtgtgctatacgaggaaggaaatcaagactggggtgaaggagaagagtgtgagtaaggtgagcatggaacctgacgagaaacggaagaaggcgcaggagcttattcggcaggtcagggagggaagcgtaaaatagaagaacagtgtgccccactgggccggtgcattggaatgtagaaatgacaatctgatgagcctgcatggtggggcgctttttgtgtcttctgatagctttttgctgtctttatgggatttccacaaaggggcgctgcctgtttttagtggttccgtagaataatctggagtggcattgattccggttgctatgtgcggttttttcgtatatcttgtggtgctaaagaacctgacaagttgaatttaaagagtttgatggttctgaaaaaaatagcaggaggagatgcacatgagcgcacaggagagattaaggaatatcgatgttttgagttatgagctggaaacagatgagatgattacagcccagctggtgaaaacttatctgagtggcttgcccgaagaaaatgctttggagatcatgcgaggtgtgatgaaggggtctgtgattcatctggcggcagaagaggcagaggatgagggacagcaggatacagaagaatcccggctcgttgaaggcaaacagctggcggcactgatcgatacagcggtggcaagcatacacagatgcttggaggagcatatgttctctgcaaatacggaagaagcgaaggaagcgcgggctatggccattcgggcggttggtagtatcagagggaagctgactgtggaaaatatatcgccggagctgctgatattcttgacggactgctatagggcactgaggaaccaatgagataatgtgaataaaaagttaatttcagtatcttattttgggaaaacgacttttctgttgactttttctgatattttaggtatcattaacggacagagaggcatactatgtttcgagaggaggcttatcaatgaaacatttatctcaagaattgcttgctgaagttgtaaaaagacaacgcaatagcaaaagtttgacacaggaacaggtgagcgaaaaaacgggaattaatagagctatgattggccgaattgagagaaaggaatacattccatctatccctcagttggaaagtctggctacgacattggattttgatatcgacggtttattcgttgatgaaatgaagccgactgtttatacagcatttcgcggttctcacctgacagaacaagaacaagatggggtgaatcatttatttgaaatgatgctggcagttaagaagcagatcgtgttaagaagggcgttgcatcatgagtaaagagattgagcttactgcgctgcagattgagaatgttcgaaaaaaagcggatgaaaccagaaagctttttggtatttttggcgatgttcccatcgctaatgatatttttatgcttttggaaaagaataatattattctttgtgaatatccctttgaggcatctgaaggttcgcataccgacgctacccttacccgctttgaaacaagagatgaacccattgtgtttattggattaaacacatccctgtattatgaccaacagatatttgcccttgcacatgagctatatcattttaagacgaaaacaggcaaatcatatacagaagaagaaaatgaagatccattgctggaaaaacaggctgacagatttgcagcagagttattgttgccaagtgggactttacattcacgtgtagtttctgagtttaaatcggaaatgattaatgaggcgctttatttgcggacattaagatttattgcaaaattacagtgtgaatggtggttgccatatcatgcgatagtcaatcgtctatacgaagagaaatacatcaataagtctttttatgagcatttatacgcgatgaatgatcgggatgacaaaagtgtctattgtcggatatttaaaacacttgatccggagaaatatgctttgttaaatagcaggactcttcgaaaaggagtgtcaaatgctgcgcttgaaacaattctgttgaactatgaggatggggaagttccagatgaagaattagttgaacttcttatgttgtttggaaagtcacctgaagatttaggatatgaattgacagtatcgccggatgatctggacgatttaaatgatctgtttgaaggcggtgagcaggatgaatgttaatacaaaagatatcaatcctgcattagccagtctttttaaggattgtgagcaggtggtgttccttgatgcaaatttatttatagttccggataggagtaaaattggtgcgaggccgattgcatttcaaaaatatcaggagtattggcttgaaccactttttgatgcttttccgaatctggcagtacatgaatcagtttatgcggaattagtcgaaggagcagtaaaagcttttgctgatgaaaagaaagaagaagttcctacaaagttaagagtttttaaagactcggagctaactggttgtgagaaaaatctttttgaaatgcagattcacaaaatggcacctttttctggatatattccagagcgggataatgcaaaagatagaggagaaattcattcccttgcgtatatggctgtcaaaaggtacttatattttgcagctaacgataacctgccaatgcaattgatttgtaaagccgaagagctggaaactggtttggataacatgagtctgcttcagtcttatgagatactatattatctttacaagacaggaaggtatgataacaaagggcttagaatgttgtataagtatcagtattatttaaccagccgagagaaaaagcagaaccctgactggggcaatttcattactgctatggatgatttgtatggaaaaatagaataaacggtaaagttggccccggtggttattttccaatttcactacgacttgtgaagcaggagagtgaccatcggggcttcttttttgcctgtttctaccacagtctttttaaatacggatgatattatcattcacatttttacaacgaaaataatgagaacatcatccgcatttttataacgaaattcccccgaatgaacattttaggatatgttcccattacgaccgctgatttttacatcggcggtcttttctttttgcgctcagaaaatcatatccagaccgcaatatgctcatagtcagctcatgacctaccagaatgtagctacataccgctatatccaagtaggttatgagctttttatgtgttgattagcctattattacacgaaattgagggaaggcaaatttgtggccatcacggataatcgtaggtacggatgtggagaatgctcgtctggcgaaagcggcacacactttcgctgagctcctgcaggaaggtgcaattaaagagaatattgatacactgtttatgggatttactgaggcagaggctgtgaagctgtttgccaatacatatctggcattaagagtaagttatttcaatgagctggacacctacgcagagatgaaaggtctgaacacacagcagattatcaacggcgtttgccttgatcctcgtattggtactcattacaataacccatcctttggttacggcggatactgtctgccgaaagataccaagcagctgctggcaaactatgctgacgtgccggaaaatctcatagaagcaattgtggaaagcaatcggacgagaaaagatttcatcgctgaccgggtactggagatcgctggtggatacagcacaaacgatggctgggatgaaaataaggaaaatgagattgtagttggcgtatatcgcctgactatgaagagtaattcagataatttccggcagagcagcatccagggcgttatgaagcgaataaaggcaaagggcgctactgtagtgatttacgagccgacactgaaggatggagagaggttctttgggtcagtcgtagttaatgatctggagaagttcaagggaatgagtcaggcgattatcgctaatcggtatgataagtgcttggatgacgtgaaagagaaagtgtatacgcgcgacattttccggcgtgattaggaatccctatcttaaattaattggcggatggaggaagtaatatgtatgagagaataaaaattattgtttgtgcccataagaaatgtaatatgccgaaagatccaatgtatctaccgctccatgtaggtgctgctggaaagaagaataaggatgggagtccattagattttggttatgtaagagacgatataggagataatatttctgatcggaattgtaactttgggacacagaccggattatattgggcatggaaaaaccttgatgctgattacaagggatgaaatcgagccgatgcttgataaatataaagttttcgtccctaagaagaggcgatactatatagaatccctgtattcccactatgcacatacccatgatgaaacacattttcaaatagttgagaaaattattagcagtgattgtcctgaatacctagtataactcgatttaaataagcttacaatttaagcattggtagtaatctgatttcttggcttacgtgtccgtgctttgggcgcacgtttcccttggttttcaggataataatgtaaacttattaaaatcgagttatactagtacagcattgccaaaataataatgaatagacgttgcttttttattgtagtcggtgcataataattctatcactaaagaatggatgtgttattatgcgaaggaaaacaattgatactatcccggttttatctgatgccatgaaaaacatattatctgctttttcaaaaagccgctcccttccgtcaggactggtcaaaagagccagcattgtcctgcttgcgtcacagggggaactcaaccagaatattgcaccacaggtcgggcttcattataataatgttgccacctggcgcagtcggttcctcgcggcgctcccagccttgcggaggattgaaatggacgacccgaaaaagcttgaagatgagatacgggcagtcctgtccgataaaaaacgccccggtgccccgtctgtttttacgccggaccagatcatgcggatcatcgaccttgcctgcagcaacccaaatgattttgggtacgaagtaagccagtggagtctcccgctgttagtggcagaaattaaaaagcaggggatcgctgaacagatttctgagaaatctgtcagccgttttttaaaaatgaggtagatttacatccccacaaaatccgttactggcttcattcttcggaaaagacggaagccccggaatcttttgcgcggaaagtaaacgaaatctgcggcctgtaccagagtgcccaggaacaaagccgggaaggtgcacacattgtttccacggatgaaatgaccggggtacaagcgctggaacataaatatcctgacaagctcccattacccggccagtgcgccaaaatggagtttgagtatatccgccatggcacgaccagcctcatcgggttctttgatgttgcaacgggccgtatggaaatgccgtatttaaactccacacgcacagaagaggattttgtggaagccgtgaaagcattggtagggacagacccgcaagccccatggacatttatatgcgatggcctaaacacccataaatcggaagcccttgtccgctttgtggcagaagcctgtgcccttggcgtggaactgggcaaaaaagggaaaacagggatccttaaaagtatggaaagccgagcggatttcctgcatgacccttcccaccggatccgctttgtctatactccgaaacacagttcctggatgaaccagattgagatatggtttggcatcattaaccggaagctgctgaagcggaaaagctacctatcaatagaagaactggaagcaagcatcctgcgctttattgaacaatacaatcttacagcacacccatttaagtggacatatgccgggataccattagtaatttaatcactgatatttaagcaatgctgtactagatgcctttaaaaaggtgatgaaaagaaaatggggatatatgttcaatatgatgatcctggagagaaatatgatggatgattattgttcatggcttttcaatattctttttcaggtagttgaacgtatagataagtccaatttgtcagcttttgatagccgtttctgtggaaggataagcgaaattttgtttgatgtttggctggaatacaaattacagactggagaaatcagcaaatcagaggtgaaggaacttccatatatggaagatgttaattgggcttttaaagtaaaggtttttctttcggcaaaatttctccacaagaaatatggagtaagttcataattgattacataaggagagcagaattatgaagtttaaatacgttgtagtaggagctggtcttgcgggaattacgatagctgagaggattgccacgcagctccatgaaaaagtgttaattattgaaaaaagaccgcagataggtggcaatgtttatgatgaatataacgacgcaggtatcctcattcaaaaatatgggccacacacatttcacacaaacgacaaagaagtgtttgactatgtgtgccaatattgtgactggcatgaatatcagcaccgcgttatgtcatatgttaatggtaatttcgtaccgatgccgatttctttggaaaccatcaatcagctctacaatatgaacctttctgaagatgggatggacgcattcattgaaagtcggaagattaagattgatgagattaaaaccagcgaagatgtggtgttgagtcagggagggcaggatatttatgagaagttctttaagtacttcacaatcaaacaatggggtgtatctcctgctgaattagaaagtatcaagttcatttttgaaacacatgattgtgagtcctatcagcctgtcgccagcacccgttggccgatggactatgattatacccggattacggagttcaaaaagctcactgaccaaaagaacgataagactactatcctcaaggaaatcccttgcgatggggaagaaccgttctatacctttcctacagcagaatggaaagctcttgcgcagcagtatagggatttagcaacgcaggaagagaatgtgattttcctagtaggagattggcagagtacaagtactatgacatggatgatgttattcggcgttcattagatgtgttttcagagattgctaaggtgaattaatgagaaacaagaagaaaaaaattggcctgatcggatatctgggttatgcaacgtcaactccaattatcgggggtcagatgagcaaaacgagaggcatcatcaagcaacttgagcaggagtatccaggccagatcatgagtgtagacacttctaattggaaaaaggaggtgttttcactgattttgcagtgttttgaagtcgccaaccagtgtgatgttgtaattgttatgccgaataagaatggtattaagtttgttttgcctttctttgcacttttaaagggtatcaaacgatataaaatggcgtatccaattgttggaggttggctgacgggattgctgaaaaagcatagatatctggcttgggcctttaaaaaagttaattatctcttgccggaaactaagcagttgatggaagaacttaagaagtttacagatgcgcccatagatgttatgtctattttctcaacaaggaaaccgttgaaattagaaagtctagattttgatgcgcagataccgttcaagttctgtacattctccagagtgactccaacaaaaggtattgacgatgcaatagaggcaattgcaaatgtcaatcaaagcgtagacggtcttctatgcaaattagatgtttggggacctatagaagaaaagtactctgatcattacaaaaagatttttgaaaagaataaggagtttgctacatataagggtttaataaccagtgatgaaggcctcgaaaaactttcagaatactacatgatgctatttccgacttattatccgggcgaagggttccctacagcaatttgcgagagctttatggcaggtttgcctgttatagcatcagactggcgtttcaataatgaacttgtagagaataaagaaacaagctttctgattcctgttcatgatgtcgacgggattgcgagatgcattgattacgccattaatcatcgagaagatatcaacaagatgaaaacaaagtgtttaatgattagtgaacaatttaagcctgttgaggttatgagaaatttggatttctggataaggaaggaacataattttggcaagtgaagctgatttatgtcgaactgtaaaatgaggagaatgtagtatgaaaaaattgttgatatatttccctgaagagaaactgtttcctaaaggggggcaggcggggtatttgtttaatttaaaaaaaggattggacgcaataggtgaatctgagtatcttcctattgatatttctttttataataatggaccatcacgttttgaggataattcaaaactccggaatatgatgcctgagcgtattttggagataagaagggctattaacgatgcctattttctacgcaagaagcttcctgtagatagagaactgtataattacgatatgatacattttcactggacagaggaaatgtatctgaatcgtgatttcctttcagattataaagggaaagtaatattaacgtaagtaagtaataatccgtatcttgacaaaagtaagcgccaaatatacctgcggattttctaatccgccttcttccgctataattgtagctgttagatacttagactatttcactacaattatggaggataggttatggcagctactcgcaaagcccgtgttcctatggcagaacagatcaggcttatcaatgaatgccgccagagcggcatgacagatgctgaatggtgccgtgaaaatgacatcgcagtaagcaccttttataactgggtcagccgatgccggaaagcggcagcggaacagatccctgcaccgaattacggtcatcatgcagatccacttccaaaacaggatgtggttcccattgatattgttccggatcatcttccggagcagcatgcggcatcacagatgcagcaaatgtaccttgacaattcacatacgattgaagtgaccatgaaagatgtgatcattcggatcagcaatgatgccgaccctgtccttcttacaaggacactccgtctgatccgggagacttcatgttaggcgatatctccggacttgaaaagatctacatcgtctgtggcttatcctctcgatatttttatcctcatctttttgagaaggcattgattttaaggcattttttcagaaaaatatgaggataaaaagtcatatgcgataatgaaatcacaataaaatcggaaggatgtgatttcatgaattacgacgaaaccgtaaacaaagtaatgatactgctgaaagaaaaggagatatgttcaagtagccgaaagtcacacagagattgctatgagtccctcaggctttttataaagcagagaaatgaggagtattcagattgtattcgtgaaggttggatatctgagatcaaaactgaattaccacggcaaagatgtgccatatggatacagtatgtttaccagttggaggagatggactccacagggactgtttccgaccgcagactttatcttaatcagtcaaactatgacaagctgcctttattatggagaaaagatcttgacatatatctggatgattgtagtaaacgctatacaactcgtacattagaattaacccgtatttactgttcttcaggcttattctttctggatgatatcggggttcatgctattacggaggtcacctatgactcgattataaaactgacaaagacaaaaatgtattgttctgatgatacaagagccgtgatactgaataatactgcgcgaatgatcaggttttatggtgaaaagggactttgccctatgagctatgttcttgtttttgactgccagatatttcctcatatcggattactgtcggatttctctgatgaaagtcttacagtgctccggaatataacgagtgtagccatgtcggtggacagtttctataattcaatcgtaccttttattgaacttttagaaactcatggatatgttgggacaactttgaaacttgctaaacatgcattgactgcattgtatctttttcttgatatgaatcaattaggatttcatcaagatatcatgtggatctggttcgcagaaatcagaaaaacaatggggacttcatggctccactggaggcgtgttctgaaattttatgaagattatacccttactggtgatatccatccgaatggtaagtacagataccagcctatcagtttcgataaactgccattatggtgcagagagccaatagaaggtcttttggaacagaaaagacgtgagtttcgagagccaggtacaatcgatagttacatgtattcctgtacccgtttttgtatgtttttgcttgatcatggctatgaaagtttcaagaatctttcattcgctgttgtaaaagatttttcattacatgatgagcatgccacttttgcgggaagagcaggacgctttgtcattgtaagggcatttcttcgttttcttgatgaaaacggatatacagatgtacacaagctggatctatgtttgatgaccggtaccgctccgtgcgataagatcattgatgtattatctgatgagcagattcaaagaattcatacattccgtacagaacataatacccctgtagaacttcgtgatattgcgatagtattacttggtctgcggatgggaatgagggcgtatgatgttctttctctccgttttcaggacatagactggaaaaaacgacagatttcaataatcatgaaaaaaaccaggactcagatcacccttcccatgcctgttgaagtgggcaatgcgttatatctgtatataaccaaaggaagaccccggaataatagcggatacattttcataaggtcaaaagctccttatggaaaacttacaggtaagatatgtaccaaagcgctttggcgtatccttcctgaacgaaaagatgtaaaaggcggcggttttcatgtgacccgtaggacatctgccacgaatctcttgcggaaccatgcagggattgatgatgtaatggatgcacttggacaccgtgattccacaagtgtcatgaagtatctgcttctggatgatgaaagaagcaggaaatgtggattatccctggagagtacagggctccttttgagaggagggctggcatgaagatgggtgaataccagttcaaaagctgtttcgcaccatatcttgaaaagtttataagcgaaaaacgggctgtaggttttatatatgaaagcgaagaatggaaactgaaacgctttgatgccttttgcatagaaagcgcagttacagaaccttgcttaagcagggatcttgtaaaggaatgggggacattgcgtgatggcgaagctcttgccacatgctcttccaggacatctgtactacggcagtttgcgctgtttctgacttcactgggtatggaagcatatattccatcaaatttctacaaggcagagaaaaacgtagttcacatcctgtcagaagctgaaataaaagcgttctttgaagcagttgacgattgtgttcctgctataaaagcgacaggatttcatagattagttaccgagtataaagtgatctttcggcttatctattgctgtggtctgcgtatttcagaagccaggaagctgtattggaaggatgtggatcttcaatacggaacaatccatatatatcagtcgaaaggtcacaaagaccgattgatctacatggccacagatctgactgaactgttacaggcatacgctaaagtgctgcgcgataaataccattgtctgtcagactgggttttcccagcgcgggagacagataagtgcctcagtgttggtacaatcgataaaaagtttcgtgatttctgggcattaacaccttttgcagaatcatgtgacaaggctccgacagtccattgtcttcgccatgcttttgtagttaaaagaatgaatctgtggatggaagaaggggttcctttaaaagaaatgctccccttcctcagccggtacctgggtcatcagagcccggatgaaacattctattattatcatcaggttgctgaagcattccgtatcatcagggataaagatgaaactggaagatatgtgatcccagaggtaaatgcttatgaatagaaaaaaatctcagaaaaaactgtttttttcgaagaccctcgaatttcttgagcattatctcccggatcaagtattaaaaagtagaaacacggttgaaacatatcgggatgcattgacagttttcaggcgatatgtaacagatatcaggcacctgtcgatacggtcattcgggtttgaagactgtacacatgattttttattgtcatacatagagttcctaaaacaaagtggtaatgctgaaacaacatgcaacaacaggttagctgcaatcagagcatacctatggtatgctgcagacagtgatatttccctgcagacagtagctttgacagcatcgagagttccttttctcaaagtacctaagctgacacgggaggtgatatcggaagaagctcttaaagcattacttacagcaccaccccacacaaagattggtcaacgggatcagctgattctgatactgctttatgattctgccattagagtctccgaattattatccctggatgtatcttctgtaaatctcaatgcggaaataccatatctgaggatatatggaaagggtgataaagaaagaatcgttgctatcacagaaaaaacagtccgtcatttaaagaattatctgaacctctatcatccaacaatcattcctgacctgcccttgatctatacaatgatcaaaggccgaaaagacaggatgtctgtaggaaatgtagaacgcatcataaaaaagtatgcgtctcagatacggtcacagtacccagattttccagaacactgctatccacacatgctgcgtaggacgcgtgcaacaaatctatatcaggatggaacagaactagagcttgtttccaggatactgggacattcttcgacagaaacaacacgaatctatgctgtcccttctatagaaatgatgcgaaaagcaatggagacaggaagtttatcaacggatgagaaaccattgtggccagatgatgaagaagaaatggcacgtatctgtgggttaagatgaaaaatgttatcctcatcatttatgatgtaaaaacgctcaaatacagctattctcagaaatgatgaggataaaaatatcataagaataaccccgtttatcctattgttagggaaaacggggtatacggatatgcgcaaatcgattgatggcttgtgtgccattatcgaagaccagcttaagatggatccgtcgtccagtgcactcttccttttctgcgggagaagacgggacagaatcaaagcgctgttccgtgagccggatggcttcgtattgatttataaaaggctgtctgttcccggcggctatcaatggccgcggaagcagtcagaagtcaggaacctttcctggcgggagtttgactggctgatgtcagggatcgatatcgaccagcccaaagctctcaaagcagagtaaaacgctgctgattttcatggaaaatcctgcacagaaaaatggcagatttccttataaattcggcacttttcagtccgcgttttcctttagtggaagcgacatttctggtataataaggatatcaattccaaggagagaacgatggcttccagtgcaaaagatatccagctgcgagagctgaaagataccatattacaattgaaaacaatggtctctgagcagacagagctgatcaaatctctccgtcttatcattgacgaaaaatccaaccatgaaaaagctcttcaggaacaggtagactatctgacaaaaaagctcttcggttcctccagtgagaggcggtctgatgacatccccggacagcagaacctgttcgatgaagcggaaatggaacaggatccttcccagctggaagaagaaaccgtgatccgggagcatacccgtaagaaaaaagcaacacatgaggaacttttcaaagggctgccggttgaaaaggtagtcattcctcttccggaggaagaccagatctgcccggtctgcagcacacggatggttctcatcggcgaggagtatatccgccgcgaactggaattcattcctgctacatgcaaggtgatcgaatactacagccagagttacggctgcccgtcctgtaaagatgggcttggcgctacggaaaagcctgtgatcgtaaagtctcaggttccggaagcattggtaggaaaaggtccggcatccgcctccactgtcgcatggacgatgtatcagaagtacgcgaatgggttgcctctctaccgtcaggagaaagactggaaacagtatggggctcagatcagccggacgacacttgccaactggatcatctactgctcgcaacattactttcagccgatgtatgattacttccatcgggaactactgaagcgaagctttgcaatggcagacgaaaccaggatccaggtactgaaggaagaagaccgcagagctcagacacagtccttcatgtggctgttccgaagcggggaggacggtcttccggcgatcatcctgtatggatattctcctaccagaagcggaagccatgcgagggagttcctgaaaggataccatggatatctggaaacggatggctatcaggggtataacggtctgccagatatcaaacgctgcgcttgctgggcacacatacgtcgatattttatcgatgccgtccccaaagggaagcagtatgattacagccagccgacggtacagggagtccagtattgcaaccgtctgttcgcgatcgaagactccattaacaaaaaatatcccggcgattatgaaaagcggaaacagctgcgtctcgagaaggaaaaacccattctggaggctttctggtcgtggctggatcagcagaaaccagtgcggaatacccgcatggacaaggcggtgaattatgtccagaaccgccgggatacggcggagacctatctggaagatggacgctgcagctttaccaacaatctcagcgagaatgcgatccgaccgtttgcggttggccggaagaactggctgttcagtaattctgtagacggtgccaatgccagcgcagtggtctacacaatggttgagatggcaaaagcacacgacctgaatatttacagttacctaaaatttctactggagcatcggccaacgaaagagatgaccgacgatcagctcgcagagctggcgccttggagtgaaaaactccaatctatcaaaaatcgcatgtgaattatagtaaattactccaactcgcaaagggctggggtaattctatatctgaccgtattattatttgacggttactgacaaaataagaaatcccccagcacttac

SEQ ID NO: 492 - DNA, 31941 bp, Enterocloster clostridioformis
  source 1..31941: mol_type = genomic DNA
atttgcaatccgtgctttattttaagaacaaagggggaaaaacgcatttaggcatttgcatttttcatgggctggtatataatcggtactgttaaaagcggcatgtatcgcacgtaagagactaaaggacagtctctaagtgctcataacgagccgctgcactaagcggtcaaaggacgcccgccaagtgccagcggcatgtatcgcacgtaagagaccaaaagacggtctctaagtgctcataacaaggaggcaggaatatgcgaggagtggagacgcgtatacaggaaatcagacacaggatattcagggaagtggcaaggatggcctatcatacggaatggccggtggataaacgtattgaagagcttccgtataaaattataccgggagaagtgggtaatttccgcaatgacgtttttttggagagggctattgtcggggaacggctcagattggccatggggcttccgtaccgcagcgcggcggaacatgcgccggtttcggataacatagaagcggcggacagaccggagacctattacacgcctcctctgattaatgtgattaaatttgcctgtaatgcctgtcatgaaaagagggtatttgtgacagacggctgtcagggctgcctggcccatccatgtgaggaggtgtgtcctaaggatgccatcaagctggacaggaccaatggacgctcccatatcaatgacgataaatgcatcaaatgcggaagatgcgcggatgtttgttcttataaggccatcattattcaggaaagaccatgcgccgccgcctgcggcatggacgctatttccacggatgagaatggaaaggcggatattgattacgacaagtgcgtgtcctgcggaatgtgcctggtgaattgtccctttggagccatagcggataagtcgcagatattccaggtcatacgcgccatccagtcaggggaaagagtttatgcggcggttgccccggcttttgtgggacagttcggtcccaaggttacacccggcaagctgcgtgcagccatgaaggcgctggggtttgcggatgtatttgaggtagcggtgggagctgacctgtgcgctacccaggaggcgattgacttcatccgggaagtgccggaaaagcttccttttatggccacatcctgctgcccggcctggtccatgatggctaagaagctgtttccggagcatgcggactgtatttccatggcattgacccccatgaccctgacggcaaggctgattaagcggcaccattccaatgcaaaggttgtatttatcggtccctgtgcagccaagaagctggaggctatgcgtacagacatacgaagtgatgtggatttcgttcttacttttgaggaaatggacggcatctttgacgcccgtcatgtggatgtggagaagatagaagaagatccggaaggcgtcaatgacgcttccacggacggccgtaactttgcggtggcaggcggggtggccaagtccgtggtggatgtgattcaccagcgttatccggataaggagattaaggtagccaatgcagagggccttaaggaatgcagaaaactgctgaccatggcaaaggccgggaaatacaatggctaccttttggagggaatggcgtgtccgggcggatgcgtggccggagcaggcaccatgcagcctattaagaagtcccaggcctccgtgaacctgtacgcatccaaggcaaagcataagacctccaatgagacagagcatgtgaaggaactggataagctggtggattagagcgtgttaatctttctccgtcatgatttccaaaatggtgcggtctgtctgcgccatgccgggattgctgattcgtcccatattgcggatagcgccctcgggtgtggcgtggcatatgccgtcctttggatccagtacggttccgtctacggccaggcaggcgctcataagaactgccccgccggccgtggccagcttttcatgcagggctgtcctgccggtaagggagtattccttctgaaagataggcgtgagaactccgtttactgtccgggctgtgcggacaatattggcgtgggtgtttcgtattgtgctggccaaggattgtctgattcatacagataagcagatggcccagattgtccaggaggcaggatatgccaatctgtccaactttacaaggaggttcaagagctcagagaatatgacgccgggacagtacaggtatttgtatggtgatgggaagaaaatatagatcaggtatggcaggagatatgacggtgtgagaaacgccgcatctcctgccatttttttatttggcggccggaacggaccctctgtggcagatgcgaaaaactttggtatttgccgcaaattcagtgtattgagtgagataaagccttttactggtaataaattttttgattaacatagaagggctggatgcgtgaaaaaattgtaaaagatgcataaataatgaaataaaatatagtgcaacatttatctattgacaaatttaaaaaatagtaataagattaaatcacgaaataaaattggaaaaacgctttactaaaagctttttcctggtaaaaggaaacaattacatttcaggtgaaggaaggagtagttttatgaagaaacgttttttggcaatgacaatggcggcagtgttaggattaagtctggttgggtgtggctccagcggcacaggagctaaggcagagagcaatggaggcagcagtcagactgcggcggaaggctccggcgaggcggcagattctgagggcaaaagtccgataaaggtagcggttgtttactctggtaatctgggtgacaaatcctacaatgattcctgtaatgccggcgcacagcaggcagccaaggatttcggggtggaggtaaagaatctggaaggcaccaccgcagacgagtgggaggccaaccttctggcatgctgcgagggcggatatgatttggtcatctgctctaactctaatttccaggaatatcttgagaaatataaagacagctatccggacgttaaatttgctatcatcgatacaactgtaaaagggccaaacgtggtttccatcagctttgcccagaatcagggttcctttttagccggcgcagtggcagctatgttcacaacccactccgagattgaaggtgtaaatgacgatgccattataggctgggtcggaggccaggatattccggtgcttcacgatttctatgttggatttgagcagggagcaaaatatataaatcccgacatcaccattcttcagtcttatgcaggaacatggattgatccacttaagggtaaggaactgacattggctcagtatgaacagggcgctgacattgtcatgaatgtggcttccggtacaggtacaggtattctggaggcagccaaggaagctggaaaatatgccattggcgttgatttgaatcaggataacgaccagccgggacatgtagtgacatctatggttaaacgagttgacacagcctgctacagcgtgattgagtctgtagtggagggtaacttcaaaggagacaccaccagctatctggaaatttccaacgatggtgtggacttaactgatttcgcagtcattaaggagcatttaagtgataagttccctgcagatatccaggacaaggtgcaggaactgaaagataagatcatctctggcgagattgtggtaaataactacgagggattcggcaaggacgctcagtaaggctgtataaagtgcggaaatacttcaggggcggcagggcatgaatatgtcttcctgccctgggttttatgaaatctttagaggcaaagattcagggaaaagggtgaccggaatgaacggatatgtagtggaaatgaatagtatcaggaaatcatttggctccgtacaggcggtaaaagatgggcagttcaacttgaagaagggtgaaatacactccctgattggtgaaaatggaacaggaaaatccaccatgatgaaactgctgtacggactatatgattttgacgggggagatataaaaatcaaaggtgagaatataagccacatcacccccaagattgccatagaaaaaggaataggcatggtgcaccaggaattcatgctggtcaacgagcttacggtactggagaatattattctgggatttgagcccaggaagggatgcaccatagattttgaaaaagcaaaaaatacagtgcagcactatatagaccagtacggcatggatatacaaatgagtaagaaaataaatcagatttccgtgggagaagcccagagagtggagattattaaaatattgaccagaggagcagatataatcatactggatgaaccgacagcggtgctgacgcctcaggaaacccgcaggctttttgagattctggagaatttgaggaaggacggcaagtccattgttttcatttcacataaactcaatgaggtaatggagatatcggaccgtattacggtaatgaggcagggatgttttatcggtaccgtagataaacaggatacttccccttcggatttggccaggatgatgataggaagggaagttttcctggacataaaaaaggagaaggctgatatcggtgatgtggtcctggaggtcagagatttgtggacatcgggggaaaaagagatatccaagatacgcggtgtctccatggaagtcagggcaggagaaatcgtgggaattgccggtattgatgggaatggacagagtgagtttatagaggctataaccggattgagaaaggtggagaagggatgtgttattctgggaggaacggaaatcactaatttttctccaaggaaatccagggaagccggacttgcccatattcctgaagaccgaaataccagaggtttaaaccgtaccatgacaatacgggagaacctggtggcggttcaggaggacaaagcgccctttgccaggggaatcatggtaaatgattctgcctcctacccatttgcgaaagagatggccgaaaaattcgatatacgtcccagggatactgagattcccgcatcctcactttcgggaggaaatgcccagaaggtagtggtggcgagagaggtttccataggcggaaaacttctggtggcatcccagcctacaagaggtgttgatataggcgctattgaatcaatccgcactattttgcaggatgtcaagaaaaagggcctgggagtgcttctggtatctgcggacctggaggaaatcatgtctttgtctgaccgtattgtggttatgtatgagggcaggattacagggcgcatgatggcggaggaagcagatgaagaaaagctggggcttctgatgatgggcggccatgatatggaaggctgcggtatccaggagcaggaaggaggcagacaatgaatccaagagtagaatcagtgatgaaaagcctgaggaggattttactgctggctcttctggcgctgggcataggagctgtttttatactgctgattcatgaaaatccactggaagcatatgcggctttgtttaagggagcttttgtggggaagctgaagattggtacaaccctggccaactttaccccgctgcttttgacgtccattgcatttgcggtggcggctaaggcaggagccttcaatgtaggcgttgagggcgaggtgttcttaggcggtatggcagctgcctatgtgggaatctactgcacatggcttccaaagcctttgctgctggcggcatgttttggggctgccgttgcagcaggtgctgcatgggcatggattccgggatttttaaaggcgtattacggcgtcagtgaggtgtgtactaccattctgatgaacagtgtggcactgtatatcacttcctatttagtaagcggaccaatcagtgcaggcgttgccaatccccagtccataccggtgaatgtgacgcttcccaaacttttgaaaccaagtaatgccaacgcggggctgtttatagctattataacggtaattgctgtcatctggatgctgaacaaaacaacgctgggctataaaataagaaccgtgggaaccaatccggccaatgctgagtatgttggaatcaatccgaagaaggtgtttatccgtaccatgatgctcagcggcgccattggcggcctggcaggctgtatcgaggtgctgggtacatacggatacttcctgaataactttgccgcgaacctgggaacaaacggtatgctggcttccctgattgtaaagaacaatgtggttaccaccccgttcatcgcgtttttcctggcagtgctgcgctccggagctttgggtatgcagcagaataccggtgttccaaaatccattgtagataccattaccgctatctttattatcgtggctaccatggaattgttgttccagtttaacaaaaaacgcaaggcaaaagcagatgcgcagtaggaggaggacatatgcaatttgataagatttttgatatttcattaatatatgcgacgttccgttcagctacgcccatcatatatgcagctctttgtgcagccattacccagcaggcggatattcttaatattggtactgagggtatcatgcttacaggcgcgtttacggctgtaactgttagttatctgactggaagctgggttctgggaatccttatttcaatggttgcaggccttctcattgccatgattatggctgtggggcacattaagtacaaggcagagatttgtgccattggtatgggtattaatctgtttgccattgcctttaccaaattcatgctcaatagcatgcttggagtaagcggctcctttaccagcccgcagattaaaggaatacctaaggtacatataccgtttttagacggcgtgcctgttctggacagcctgtttaacaactggagtgttacggaatggtttgttatcgtgctggtatttcttatgatgtttcttttttataagacagtatggggactgcggctgagggcagtgggacagtttcccatggctgcagagacagcgggaattaatgtaaatgccatgaaataccaggcaatagccatatccggtctgattggagggctggcaggagctcatctgtcccttggatacagcaggctttttacagagggcatgacgaattccagaggatttatgggtgtggctgccatgtattttggaggagcccatcctgcacttacagcggtcggctgtctgatattcggatttacggattcattgggagcccgtatacaggcgtatggtgttccatcccagtttgtattgctgatgccctacgtggtgaccattgctgtgctggcagtttccatgatatctaagaaaaaagcccaggagaagaaaaagagttcgctggttacgattgaatagcaggaggtcaagatatggataagcgcaagattattttagactgtgatccgggccatgacgacgcggttgccataatgctggcagctaagagcccgcaaattgatttattgggcatcacggtggttgccggaaaccagacattggagaaaacaactgccaatgcgctgaatgtatgccaatatctggggctggatattccggtgtacgcaggatgcggacagcccatgatacgggataagcaggttattgcggatgacatacatggagagacaggacttgacggaccggtatttgcacctctccggaaaaaagcggaagataaacacgcggtgctgtatataatagatacgctgatggcatcggacggcgatattacacttgtacccacaggccctctgaccaatattgccatggcaatccgcctggaaccgagaattcttcccaagattcgtgagattgtgcttatgggaggctgctatcagttgggaaatgtgacgcctgcggcagagtttaatattctggcggacgcagatgcggcccatgtggtgttcacatgcaataggcccataaccatggtgggactggatgtgaccagaaaggtactgtgttatccgtccgtgattgaacgaatggaaaaaatcggcacgccgccggcaatgctgtttgtggatttgatgctgtttttcggcaagagtcaaaaagctgtattcggatgggagggagggcctctccacgaccctctgaccatagcatacctgatagacccggccgtccttactacgaaagcaatgtttacggaaatagacatccgcagcgttcaaagttatggccgtacgaattgtgacttcttcggatatttcaagagggagcccaacagcaatgtggcagtggaagtggatgtggaaaagttctgggatatcattgaacagggaatccgcaattacggttaaaggagttgaaatgatgaggccgctgaaagaagttttggaagaaaataaacagtcatatatacagcgtttgatggaccttattgctattgatacccatgatttgggccatgggatagcaggggggctggaaaagcaggggcaggagtatatggtgaaattgttcggggatatgggagcggatatcatccgccgggatcccatgacggaggaagccattgaacaatgcctggccaaatatcaggaagggaacattggacataattacgatgaccgctataatgtgtatgctgtttttaaaggagacaaggacggcaggagtttgatgtttaacggccatatagataccatgcctgcgggaaatgaaaatgagtggaatacgccgccgcatacgccaaccatgaaggacggcaggctttacggcctgggcgcggctgatatgaaaggcggtcttatggcatctgttatggcagtacaactgcttaaggatgccggggtaaagctgccgggagatgtacatatcacttccgtctgcgacgaggaaggcggaggcaatggttctatggcggccatcatgtcgggagaaaaagccgatggtgtggttgtctgcgagccttcttccgatgaattgatactggctcatatgggatttgtattttttaaagtggagtttgagggaaaagccaatcattcaggtgcaaagtggaagggagtcagcgcaattgataaggcccttaaggttatccgggaactggaggagctggaacacaaatggctcctgacctataaacatcccctgcttcctgctcccaatctgaatataggtacgattcacggcggcagcgccgggtccaccgtgccgggacattgttattttgagacatgcatccattatctgcccagacagatgagctatgaccaaattgtagaggagtttacagatgcggtgaaccgggtggcggacagtgacttatggctgcgccagcacaggccggtgataaccatgtatcaggccggcggggcctttgaacaggaatccgacgacagctttgtgtcctgctttatgaatggatacgaaaaagcccttgggaggcaggtgcgcctggtcggttctccggcaggctgtgactcaagattatggaagaacatcgctggctgccccaccatgcagtttggccccggacggttggaagagtgccatgctgtcaacgaatatgtggaggcggaatcatatctggaagccattcttgtttatgcccagcttatactggaatggtgtaaggcaaacaaatagaatgaaaaataaggagaagagagatgagtaagaaagtattgttggcaggagaatcctggatgagctacaccacacatgtgaaaggatttgacagtttttatacctctgtatatgagacaggagaaaagtggctgaaagcagccctggaagagggcggctatgaggttacctttatgcccaaccatctggcaggagaggaatttccatttacaatggaagaattaaagaaatacgatgcggtgattctttctgacattggagcaaatacgcttcttcttccgtcagccacatttatgagaagcgagaagaaaccaaacagatgcaatctgattcgcgattacgtgctggatgggggggcccttatgatggtgggaggctaccttaccttttcaggcgtggatgcaaaaggaaaatggcatgatactgcggtgcaggaggttcttccggtagaggttcttaccgtggacgaccgtatggagcactgcgagggaactacgcctgtgacggttgctgagcatgaagccctgaacggaattcccagggaattcccgcaggtactgggatataataagaccattgcaaagccggaagcggtcgtggccgctgtggtagatgatgacccgtttattgcctttggagaatatggaaagggaaagagcgctgtagtaaccacggactgcgccccccattgggcaccgccggaattctgtgagtgggaatattataacaggatgtggcagggaatcatggactggctgacaaagtaagaataagaatggggactgctgcctgaaatcaaggattccatgggcggcagtcctctttttgcaggaggattgcagatgggaacagagaaaagaacagagaaaaggacagaggaacagaggagagcggaggctctggcgttgttgaagcacatactggatatacccagtgtcaacggaaaggacagggaacaggagacagctgtttatctggcagaatatttaaaaagaaagggtatggaaacaagggttcagctgatagatgagcatcacggaaacgtgattggcgtgctcaaaggaaaaacagaggagaccatactttttaacggacatctggatacggttccatatggggatataaacgaatggaataccaatccggctgtgtgtacagaacaggacgggcgcctttatgcaagaggagccagtgatatgaaaagcggattggcagtcatggcttttgttctgggagagctggctgagagcggatgcgtcccgcagaagacgattgtttttgcgggaacctgcgatgaggaacgcggcggtttgggcgcaaaggaaatcataaaggaatacccggatttatttccagagctgctcctgattggagagcctacttcatgtcaggctggtgtggctcagaaaggatgtatctggttaaagctgtctgtttcaggcaagacaagccatggagcagaaccctggcagggaatcaatgccctggagcagggcttcggcctgcttgcggatttgagagaggagcttaagagggaggagcatcctgtgctgggacgcagtacgctccagattaccatggcggagggaggaattgcccccaatatgacgccggacagggccaaattcctggctgatatccggattgtaccgcccttgaatgaaaaggaggttctgaaccggttggaatgccttatgcaaaagcggtgtgaagtttataacgggggcctggcctttgtgcctgagataacaaattacaggatgccggcagagacaggcccggaaaaccagtggcttcacaggctgaaaggattcataggcgatgatgcaggggagaccggtatcaactattttacagacgcctccattctcctcacagcctggccggacagtccggcgcttctctttggtccgggagagcctcagatgtgtcataagcccaatgaatatgtggagatatccaagtatttggaggcaattcgggtcatggaaaaattttgctggtacattgctaaataataaacttatgatataatgaaatgtaagattttgagcatgttttaacagggggcagaatttgcgaacaacaattaaggatatagcgaagtacacaggtttttctattaccaccatatcattggtgctgaatggaaaggcgcataagattccaaaggcaacagaggaggcgattctccaggctgcgaaggagctcaattaccggccaaatcaattagccgtggggctggtaaagaagcagacaaagaccctgggactgattttatctgacatccggaacagcttttttgccaatatggctaagtccattgaagatgaatgccgcagaaacggctggaatctcatactgtgcaataccaatgacctccatgagcgtgagatgaaatatctgcagatgctggctgacaaaggtgtggacggggtattgatctgcatggcaagggagaatgacagtgagaaagtggaggagatggtggcgctgatggattcactcaacataccctttgtccttgtggaccgcttttaccctgaagtcaaaggctgttccgtgattgtggaccatgatgagggaggatatcttgctgccaggcatctgctggaattgggccataccaggattggatgcgtgggcggcccaaaggacctggctgattccaaccggaggacccagggctatatacgggcgctgatggaaaaaggagtggaatttgacccgtccctcatattttatggggattatgacctgagcagcggtgtgcggggggcagaatatctgctcaaaaaagatgttacagcaatttttgcctataatgacatgtcggcgtatggagtgtttcactatttaaagcagcagggaatctctgttccggaggatatatcgctgattggatatgacgatatctttttttcagagatattgagtgtgcctctcacatcaattcatcagccggtggaggagatgggaacagaggcggtccagcagatgattcggattatccgccagaaacagaaacaggacacaaagaaaaatattatgtttcagccgtatttggtggtaagacagagtacggcggctcccgcaggtgtaatgcacaaataaatatatctatatatttcctgcctcttaagaaatttcagatttttataataatttgttcacattcggttcagaggcaggcattatacttaataaagaataagggaaaaaggagtgaaaaaatgaacatactgtttttcctgactcctaaaagtgacgtggcgtatataagcgaggatgatacgttaaggcaggctttggagaaaatggagcaccacaagtattccgcggtaccgattgtcagcaggacagggcgctatgtggggacgctgacggaaggtgatctgttatggggaatcaagaaccagttcaacctggatctgaaaggggctgagaagatacctgtcacagccatacgccgccggtgtgacaaccgtccggttaaggcagacgcagatatggaggatctgatcgggaaggcattgaaccagaattttgttccggtactggatgatcagaagagtttcattggcatcattaccagaaaggacatcatcaagtatttctaccagaagtgcgaaaacgccggggaacgttccaagaagtgtcgggaacagggcggaaaggaacataaaaagacggacctgtccgcagtggtaaagctgcgcagccaggagggagtcctggtgtagcgggataggccgtccggcacagtgagggctgcgcggttacagggaaccatggaaaacgccatacggcgggatgcatggttccctgttaatatacagatatgggccctcttttgttttgtgcagatgcttccggtgtaaaagccgcaaactgaaaactcaggttaaatatgcacgaaaacagcagacaaacccgggaaaagatggtataatgtcgccagacaatataatgcgccaatgcgttgtcacgtcaaagcgagttagtgcggaaaaccagacaggatatacgggtgcagggaaagggaggtcagacaacatgatttgggcaaaagaggagacaatgtccagggcggagattgaagcggtacagctgagccgcctgaaagacacggtgaaccgggtttacgggaaggtaccggcataccgcgccaagatggaggaggcaggtgtaaggccggagcatatacagacactgaaggatttgcagaagcttccttttgtgacgaaacaggatatgagggataattacccctatggcctgtttgcggttccaaggaaggaactgcgcagaatccatgcgtccagcggcacgacgggaaagcccactgtggtgggatatacggagaatgacctggaggtgtggaaggaatgtgtggcccgcctggccgtggcaggaggcgcctcggacgaggatgtggcccagatttgctttgggtacggcatgttcacaggcgccttgggacttcacaatggattggagaaggtaggcgccgcggtggttccgtcctctaccggcaatacccagaagcagctgatgtacatgaaggattttgagaccaccctgctggtggccaccccctcctatgccatgcgcattgcggaggtggccctggaaatgggaatcaatcccagaaaggatttgaaggtaaagacgcttgtactgggcagcgagctgatgacagaggccatgagaaacgagctctacaaggtatggggagaggatgtaaacctgacccagaattacggcatgagcgagctgatggggcccggcgtgtcgggagaatgccttaagcttaacggaatgcatatcaatgaggaccattttattgcggagataatagattccgctacaggggaagtgcttcctcccggagaaaagggagagctggttatcacctgcatttccaaggaggcgctgcctctcatccgctaccgtaccagggatattaccaggcttatgtatgagccgtgtccctgcggccgcaccacggccaggatggagaacctgtcaggacgtacggatgatatgttaaagattcgcggcgtcaacgtattccccagccagattgaggaagtgctgattaatacagagggaatcggacctaactatgaaatcgtggtggacaggaagaaccattccgacatactgattatcaaggttgaggtggaagctgagagcatgatggactcctatgctgcattggagcggctggaaaacacattgaaggataagatgcgcctgatgcttggtctggatgccaagatccaactggtttcccccaatacccttcagcggtttgagggaaaggcaaagagggtcacggacctgcgaaaggaagcctgatgaggcaccgggacagtctttatggagtccggtacggttaatacatactgaaaggaaggaagaaacgtgtcagagaaaagaatattacttggcaatgaagccatagcaagaggtgcctatgaggcaggagtaaaggtatccgccgcctacccgggcacccccagtacggaggtcagcgagtcactggtccagtacgatgagatttacgcggagtgggctcccaatgagaaggtggccacagaggtggctatcggtgcatccatagcaggcgtgcgttccatgtgcgtcatgaagcatgtgggtataaatgtggctgcggatccgctttatacggcggcatacaccggcgtccggggaggactggtgctggtggtggctgatgatccgggcatgtacagttcccagaacgagcaggacagccgtatggtggccagggctgctatggtccccattgtggaaccgtccgacagtgccgaggccaaggaatttatgaaatatgcctatgacctcagtgagaaatacgatacccctgttatcctgtgcagtaccacccgtctgtcccattcccaggggctggtggaactggaggagagggccgagccctttgacatcccctatgagagggatatggccaaatatgtcatgatgcccggcaatgccatcaaacgccatgtggtggtggaagcgcgcatgaaacagatggctgaggatgccaacagctttcccgtcaaccgggtggaatacaatgatttgtccgtgggctttattaccaacggcattgcgtaccagtatgtgaaggaagccatgccccaggcatccgtcctaaagctggggcttctcaatccccttccaaggaagcttatagaggaatttgcgtctaaggtggataagctttacatatttgaggagctggagcccgtagtggaggaacaggttaagtcctggggcattaagaaggcagtgggcaaggaaatattcacggtccagggagaatacagcgcaaatctgattagggagcgcgtgctgggtcaggcgtcacaggtggataaggcggcccaggttcccgcaagacctcccatactgtgtccgggatgtccgcacagaagcgtatacgctgtgcttaacaagctgaagatacatgctgccggagatatcggctgctatacgctgggagcagtggcgcccttaagcgttatcgacaccacgatctgcatgggagccagtatcagcactctccacggcatggagaaggcaaagggaagagagtatattaagaactgggtggctgtaatcggtgattccaccttcatgcacacaggcatcaattctctcatgaacatggtctataaccaggccgccggaacagtggtcatcctggataattccaccacgggaatgacgggacatcaggaccatgccgctaccggcaagacccttaaggggcaggtggttcctgccatcaatatttacggtctgtgcaaatcgctgggcattgagcatgtctgtgaggtggacgcctttgaccaggcggagctggagcgggtaatcaaagaggaagtggcaagggatgctgtatccgtcatcatcaccaaggcgccctgcgccctgcttaagggaatcaaattccccaacaagtgcaggccgctgccggaaaaatgtaagaaatgcggagcgtgcttaaggccgggctgtcctgcccttacaaagaatgaggacggcaccatatccattgacgagaccatgtgcaatggctgcggattgtgtaaacagctttgtaaatttgacgcgatcaatctggtaaaggcgggtgaataaaatgacatcaaagaatattatgatagtaggcgtaggcggccagggaacccttcttaccagccgcatacttggaaagcttgcaatcggcgcgggctatgacgtgaagctgtccgaggtgcacggcatggcccagcgcggcggcagtgtggtaacctttgtgagatatggagaaaaggtggcggaacccattgtggaggaaggccaggcagacgtgctgattgcctttgagcgtctggaggcgctgcggtatctgcatttcctcaaaaaggacggcgtgatcattgtcaatgactggcgcattgaccccatcacagtggtgacggggatggctgaatatccggaaggaatcattgaccggttaaaggaagcgcgcaggaccattgtggtggaggccacggaggaagcgaaaaagatgggcgcgcccaaggcatttaacgtcattgtcctgggagctgctgcaaagcatatgggatttgaaaaggaagactggctgaaggtgattgagacaacggttccgcctaagacggtggaaattaataaaaaggcatttgagaccggttacgcgctttctgtctagacggacaaaagccggcggtaaaacggaaaatggactgtaagcagataaaggatgtaaattatatcatgtgagagttggaggggttacaggcaaatgatatggaatgagactaaggagtgcatgagcagggatgagatgaccaatctgcagagcgcaaggctgagaaaattagttgacagagtgtaccacagtgtggagtattaccgcaagaaaatgcaggcagtgggattggagccgggagatatccggggaatcgaggatctggaaaagcttccatttaccacaaaggacgatttgagagacacataccccttcggcatgtttgcggtgcccaattcccagattacccgcatccacgcgtccagcggcaccaccggaaaggccacggtggtgggatatacacgcaaggacatcgacgtgtggagcgagtgcgtggcccggtgcattaccatggccggactgggaagcaatgacatcatccaggtggcttacgggtacggtctgtttaccggaggcctgggagcccattacggtgcagaggagatgggagccaccgtggtccccatgtccacaggcaacaccaagaagctgatcaccatgatggtggatttcggggtgacaggaatcatgtgtacgccctcctaccttcttcatattgcggaaaccattgaggagatgggggtcaaggacaagattaagctgaaggcatccatcaacggagcagagccgtggactgagaaaatgagaacccagatagagcgtcagctgggaatccacgctcacgatatctacggcctcagcgagatcatgggaccgggcgttgccacggactgccagttccatgaggggctccatattcatgaggaccatttcctgccggagatcgtggatcagaatacattgaagccattgagggacggcatgaccggtgaactggttatttccaccctgactaaggagggactgcctttaatacgttaccgcacaaaggatttgaccagccttgaccacagtacctgccagtgtggaaggaccacagccaggattgccagattcacaggaaggacagatgacatgctgattatccggggcgtcaacgtattcccgtcccagatagagtctgcactgctggaaatgggcggcaccacgcctcattatctgttgattgtggaccgtgtgaacaatctggacaccttagaggtgcaggtggaagtggaggagcggttcttctcagatgaaatccgggagctggagaatctgacaggaaagatcgcctatatgattcagcaggccataggtctggcggtaaaggtaaagctggtggagccaaagagcattgagcggagcatgggtaagacgaagcatgtgattgacaagagaaatctgaattaagaaagggcggggtataaaaatgtttgtaaaacaattatctgtattcatagaaaaccgtgaaggcagactggaacaggttacagaagtactgaaggagcaggatatcaatatactgtccctcagcatggcagataccacggagtacggtatgctgagaatgattgtgtctgatccggataaggcaaaggcggcgctgagggaaaaaggattttcagccatgctgaccgatgtgctggcagtaaaactggaggatcaggtgggcgaactccacaagatgacccacatcctctgcagccaggggctgaatatcgagtacatgtacgcattggcttccgctaaccgcagggcaatgattgtgaaggcgtctgacggagagacagctgccagggcagtgacagacggcggattggtgctgtacagcaatgaggaaatgtgctggtaatttgccggtagtgtgccggtagtttggcatgacagggctataagaaacagtgagtgaaaggtaagataaaggtgccgcggaatcatctgagatgatgattgagcggcacctttgcgttatggctgtcagataccccggaaagaggacctggcaggtttggagagagggaccagcatgtgcgggcgtaattccttcgggtcatgggtgacggacaagagtctgtcctggtgcttcactgcctttaagacagcagcggtagccttcaccttctccagtatttctccctcctcccagaatattcagggagtaggaggtgttgcaccgggtattgatttcagtatgtccgatgcaggtgacgattctggtataaaatctgccgctttacagtccttttcatcctcatagataatagttccccatacgaataacaccccacaccgtcagaatgattaagtaaagcagggccggtttccagatggattctaaatgcttaaacaagtgtaagaccataaagatatactgaagagtaaacataaaaataatcaataatgctcccaaaagccgttgtttaagcgcgtttcttcccatagccggatttaaatgtcgttcatggcggtcaaccgccttccagtagtgggtatgtcttttttgaccataagttgcctcccggtgtcatgactatcctttggagaaaccgctggctgtcacatgggccacctcattgcccaggtcatccttcacctccaccagatagtagcaggtgctccgtccttcctttacttttctggcttcagctatgaggcgtgtgcctctggcaacacccaggtaggtgatttgggatgtggttgagacgtgtaggggtttgttccagttggaagcaactgcaaaggcaaaatcagccagagtaaagatggcgcctcccatgaccgtgcccgctgcgttgagatggtgcggttgtatttccaaccaacattttgcatatccctcttccacctgctcaatgaccgcaccgttatccgtggcaaaacgatcgttggaaaagatcttttgtatttgttccagtttctgctcatccatatgggggacctcctgtggttatatgtatgaattgataataaatatatgccaactatataccagaaaaaggaagattgtcaatggttgtctgttatgcaggcgggaatgtgaggagaaaagatgtcaaatgatattgaaaagaggttgaaaggagagcaggtgcataaaacagggcctcgtggggaggccctgttctgcatgactgctgtttatcaatttatattagctgttgccgccgcagccgctttcggcgatagctggtccgggtcctccggctgtacggggggtagggcggccgccgcatcctggattgccccaggttgcgtcgttgaagccttcccaatagccattgcggaagccttccctatatgcctggcgcctggcgcccgtacagatatcatgtccgccgccgctgttgccgccgctgcatccgcaatcacagccgcaaccgctgttgccgccgcagccgcagccgcagccgcaaccgctgttgccgccgcatccgcagccgcatccgcagccgctgttgccgccgcatccgcagccgcaaccgctgttgccgccgctgcagccacatccacagccgcatccactgttattgccgcatccgcatccactgttgttgccacagccacagccacatccacaattacaacgattccatccacatctacaaattctaaagcaacacatatattgtactctccttttttgttggtttgtactatatcatatgggacgctcagacaaagtgtgagtgattgtctcaatgtattttattgtcacccgttgtttttctcctcataaactatagtagaaaaagataaatggaaggagtatccaacctatggattcttatacagatgtaagcacccagtgctgcggccgcgggcgtatgtcatgcggtacatcgtttggaaatggatgcggttcttatacaagtccggattatccggatatgaacgcatttccatgggactcatggggaagctatcctgagctttcctatcctacccctgcagccccggccactcagccagccaatatgtcatgtccctctactgaaggaggcgtgctggagcagcagtttccggtagccatggcttatgtgccgtggcagcagtggcagaccacctatgcccctgagaggggccttgtccaaggaactattttccctgatctggatttacaatttaattacgggaggtgcggaagatgatgaatcagatgatgaatcccgaccttaatgcttcccgtgaggctatgctccgtgaggtagaccaggctggcttcgcggtggttgacgcaaacctctaccttgacacccatccttgtgacgcagctgctattgattactataatcagatggcagacgcgtacagaaatgcagcagcagcctttgaggcccagttcggccctttgacggcttccgccaatagagatgctgcatactggtcctggattaacgatccttggccatgggaaggagggtgctattaatgtggatttatgagaagagattggaatttccggttaatatcaaagagcccaatgctcagatggctcagtttataatgagccaatatggtgggccggacggcgaaatgggcgcttccatgcgttatctttcccagcgctacgccatgccatataaggagtgcaagggaaccctgacagatataggcacagaggagcttgcccacctggaaatcgtggctgccatcatccatcagctgactaagggactgactgcagaccagctggtagagcagggcttcggaccttactatatcgaccataccaccggtatctggccccaggcggcaggagggataccttttaacgcatgtgagttccagtccaagggagacgtgattacggaccttcatgaggatatggccgcagaacagaaagccaggagcacttatgacaatatcctgcgtgttgtcaaggattatgacgtttgtgaacccattaaattcctgagggaaagggaagtcgttcattatcagagatttggcgaattgctgcgcatcacccaggagaagctggacagcaggaatttctatgcgttcaatcctgccttcgatgtgcctgcaccatcctgccaggatcagatgagacagatgtaaggtcatattcaaagttatatgtgaaaggcgccgcggtctatctggcaaaaccagaggccgcagcgccttcttttgaatcgtacatacagctttccaatttcaccagctctccgccaatgagttccacatcctcatcctggtgggttgagaggattaagagccgcccgtcctgcttttccctgatatatgaaatgacattgcgttttaattcgtcgtccataccggtaaagggttcgtccataagaaggatacgggaaggggtgaggagggcccgcatgacggctacccggcgcttcatgccgccgcttaaggtggacacagggcggttcaggcattcctccggaagcaggcgggccagttcccatctgatgcgggaccctttgactgaacggccggcacacatggatacattttcaatgggagaaaaggactcacagagcctgtcctcctgaaaaacagcggaaacagtcagggaattcatgtcctggggttttccgtctgcgagtatcaggccatggtccgcctgttccagccccatgagaattcgcagcagagtggttttgcctgaaccggagggactcatcagacaatagcattgtccctgatgaaaggacaggttcaggttccttaatacgggcagcccgtcaaatgatttagatatattttgtaattccagggtcattccatatacgctcctcaatgttttattttcctcaacagataaagaaagaaacgttcaaacagtgcgttgattactatgatgacaaaggtccaggcaaagagaccggccgtgtcaagatacagcttggagtagtacagctgttctcctatggaaccttccggtatgccgataacttccgcggccacgccggatttccagctcattccaagggcagtccggcacccgtttacaatgtatggaaggagggccggtacatagatatagtgaatgcgtttccacatgggcatgcggaaaacccgggccatttccagcagtttcttatccgtatgttccagcccggacagggtgctcacatagaccatgggcaccaccaccagaaaggaggtgaacactgccaggttgcgggaaccaatccatatcagcgccaggatgacgaaggaggcaacgggtacggacttaatcagcagcatgaccggatccagcagttcctttaccagaggaaagagataggccaggcttcccaggaggatgcttaagaaaaaggctcccaggaaaccaaggcttattctggcaaaggaattcaggatggtggcccagaaggaaggggccgctgcctgttgtgccagggcctttatcatgtccagagggcctacgaatatgatattgttgtgtatcaggagattggctgcctgccatactgcaatccagaacagccaaatcagatattttcttattcgtgtgttgtgatttgtgggttgattcatgagggatatctccgcaatcaggggttaaggcatgtagtaaaaatcatctccgggcatctgtccgccgatggatttgggatcctgctcatttaaggtggagaggtaaccgcttaaggcattcttcatctcctgtccggtcagacacacgatgttgcagtagggtagagctttctgggcaatgggagccttctccacaataccctgtttggcaatcagctgggcggcgtcctctgtatgttccgtggcaaatagggtggaggcctcatggtcctttataaagtccgcaacaggggaacggttctccctgagaaaatcgccgcgcaccagggtaacgcctgtcaccagcatgcttccggagtccttgtttaaaatattccactgttccgttaaatccagcactgtttttaagtcgggattctggatgcaggcggcagtggcaaagggctgcggcagaacgccgatggcactggaatcctgctttaacagggatgccacttcagtggcctcggacttgaactgcaggtccacatcagatgcggaaagaccgttttcctttaaaaggtaattcatgacgtattcgggggtggtcccctttcctgtcatgtaaatggtgcgtccctttaagccggccatggaggtaatggaatcatctgaggccaccacatagaggacgcccagggtattgatatccaggactgtgatatttccctgggtcttggcgtagagcacgctggcaacattggcaggcaccagggcgatatccaggtcgccgtttgctatcttgcccaccagttcatcagccttgccggccatggtgaattcatagacattggacgtctcgcccttggaagccttgtccatcagggatacaagtcccatggaggtggggcctttcagggagcctacgcggatggcggcctggcaggtcagcttgttttcatcggaacccgtgttcagttcaccgccggcaccggattcagggtccggggaggatgattcgccggaagggctttctgaagcttggtccggggcggttttgtctcctgactgggctatggtctgatccccggtctccgcttccgtctgtccctcggtctgtattttggcctgggactctgtgccaggtgtgccggagccgcttttgccgcatccgcccagcaccagggagacgctcatcaatgccattaaaagtaaggaaacatgttttttcataatacttcaactcctctcgtaaatatcattaactatagcacaacaggcctgtcttttctataaaatatttgagaaatattattgatatagatatcacaatgtgagataatgaaaccatggtttggggtgagcccataatacacgcagatagtggaggaataagggatgaaagtaacgatatgtattggaagcgcctgtcatttaaagggatccagggagattatcagtaagctccagaagctggtagatgagaacgggctgtctgataaggtggacttaaacggtgcgttctgttccggtaattgtgaccatggagtgtgcgtgacggtggagggcgagctgtactccctgaagccggaagatacagaagaattttttgaaaatgagattaaggggagactttgattatgggcatggaaatcatagatttcaaagccacaaagtgcaaacactgctataaatgcgtccgttactgcggggtaaaggccatccaggtcaaggatgagcgggcggtcatcatgccggacaagtgcatcctgtgcggccactgtctgaaaatctgcccccagtcagcaaaaacccttaagagcgacctgaacatggtccgcggatttttgcgcgaaggcatgcgtgtggtggtgtccattgcaccgtcctatatggggttattgaaatacaagacaattggtcaggtgcggggggctctgctgcgcctggggtttgaggatgtgagggagacttccgagggagccgcttttgtgacggccgagtatgcgaagctcctggcagagcacaagatggagaacatcataaccacatgctgtccaagcgccaatgacctggtggaaatctactatccgcagctcataccttacctggcgccggtggtgtcccccatgattgcccacggaaagcttctgaaggaagaactgggacgggatgtgaaggtcgtgttccttggaccgtgtattgcaaagaaaaaagaagccctggacctgaggcatgagggatatattgacgctgtattaaatttcaatgacataaacaaatggctggaggaaaaggacatcgtaattgaggactgtgaagaccggccatttaccgcatttgaccccaaggtgaaccggctgtatcccgtgaccaacggcgtggtgaactccgtgctggccaccgaggagaagggggacggatacaggaagttctatgtccatggggaggacaattgtattgatctgtgtaagagtatgtcccgcggtgaaatcaaaggctgttttatcgagatgaatatgtgttccggcggctgcatcaagggccccacggtggatgaggagttcatatccagattcaaggtaaagctggacatggaggagagcatctgcagggagccggctgaggaaaagcagatggagccggtatgggaaaatgtaaacttcagaaagcggttcgaggaccactcacccagggacccccagcctacggaggaacagatacgggaaatactgcgcatgaccaacaagctgaagccggaggacgagctgaactgcggcgcctgcggttatcccacctgccgggaaaaggccattgccgtattccagcacaaggcggaggtgagtatgtgcatcccctttatgcatgaaaaggcggagtccatggccaatctggtgatggagacttccccgaacattgtactgattgtgggcgatgacatgcgcatcatggagtactcggatgtgggcgagaaatatttcggcaggactcgttcccaggcattgcagatgtatctgtatgaacttatcgacccagtgaacttccaatgggtatttgatacacatcagaatatccatggcaagcgggtcaattatccggaatataatctttccacgctgcagaatattgtgtacatagaaaaggaaaatgctgtcctggccaccttcatagacataacccgtgaggaggagctggccaaggaagagtatgagagaaagctggagaccatagatctggcccagaaggtcatccacaagcagatgatggtggctcaggaaatagcaggtctcctgggagagacaacagctgagacaaaaactactctgaccaagctgtgccactccctgttagaggacggcagtgacgccgggtatgcggggggagaactggagcgggagattccgggcgtacagctgggaagcggagccgtgcccttaaagggtgttatgacagccggggcgcccggcggagcgggagccgggcagataccgggagccggggaacagaaaaagcctacgggctatgtccatatcggcagcgccaatccgcgcggcggaaaatccgggtatgttcatctgagcaatgtggatttaaagaaaccaggcggcaacggaggtaaataatgggaattacagtggatgttgcatataaaagcctgaacaaatacaccgaaatcctgtgcggggacaaggtggagcttttgcagaccgaggattccaacatcatgattctggcagatggcatgggaagcggggttaaggccaatatcctgtccacgctgacctctaagatactgggaaccatgttcctcaatggggctaccctggaggaatgtgtggataccatcagtgagacccttcccatctgccaggtcaggcaggtagcctattccaccttcagcatactgcaggtataccataatggtgatgcgtatctggtggaatatgataatcccggatgcatattcatccgggacggaaagcttatggagataccgaaaaatgtacgggtcatgcagggcaaggaaatcaacgagtacagattcaaggtcaaaaaaggcgatgccctgattctcatgagtgacggcaccattcatgcgggagtgggtgagctgctgaatttcggatggctgtggcaggacattgcggactacgcggtgagacagtatcccctgacggtatcggccatgcgtctggctgccagcatcagcagggcctgtgatgagctgtatcagttccggcccggagatgataccacggtggcgtgtatgcgtattattgacagcaagccggttcatctcatgactggtcctgccaggaatccggaagacgacgtccgcatggtccaggattttatggatgatgccaatgccaagaccattgtctgcggaggaaccagcgccactatcgtgtccagagtgctgggaaagaagctggatgtatccctggattatgtggatccggagataccccccatcgcatacatggatggcgtggatttggttacggagggagtccttacccttaaccgggttctccagctgctgcgcagatatgtgaagaatgagactgtatccgaagaatttttccaggagctggataagcccaacggaggttccatggtggccaaggtgctcatagaagactgcacggaggttcacctgtatgtgggaaaggcaatcaacagcgcgtaccagaatccgggacttccctttgacctgggtatccgccagaatctggtggaacagctgaggcatgtgattgaggagatgggaaaaacagtggtggttacatattactaatgttgtacgccatttaatacttgcattttcacagtaaatatagtagatttctagtgttgatataattttaacaaactcgaattgtgatatagaagcagacatatatggcatatgccaatgatatgtattgcgcgcaggagaccataggacggtctccaagtgcccgtaacgaggaggagaaaaagatggtaaccaatgatgctacgatcctgcgtttgaaacacgatgtactttacgaggtggctaaggctgcgtgggagggaaatctggacgagaagcgggagcagattccatattccatgataccgggacctcaggcgacttaccgctgctgtatctataaggaaagggaaatcattcggcagagggtccgcctggcagaaggaaaatgtcccaccgggaaggacacatccaatgtggtccaggtcatcaacgcggcctgcgaggagtgtcccattgcatcctacatagtgacagataactgccgtaaatgtatgggcaaggcctgccagaactcctgtaatttcggagccatcagcatggggcgtgaaagggcctatatcgagcccggcaaatgtaaggaatgcggcaaatgctcacaggcctgtccctataacgccattgctcatctggagcgtccttgtaagaaaatttgtccggtagatgccattacttatgatgagtacggtatctgcgtgattgatgagaagaagtgtatccagtgcggagcctgtatccatagctgcccgttcggggccataggatccaagacctttatggtagatgtgatccgcctgattaaagcaggaaaaagggtggttgccatggtggcacctgctacggagggacagtttggtcctgacattaccatggccagctggaagattgcattaaagcagctgggatttgcggatatgatagaagtgggattgggcggagacatgacagcagcctacgaggcagaggaatgggcccaggcaaataaggagggaaagaagatgactacctcctgctgtcccgcgtttgtgaacatgattaagcagcattttccaatgctgctggagaatatgtccaccacagtgtcacctatgtgtgctgtctccagaatgataaagagccaggctccggatacagtcacagtattcatcggcccctgcatagccaaaaagagtgagagcctggacttgaatgtaaagggcaatgcagactatgcaatgaccttcggtgagataagagccatgatgcgcgccaagggtgtggagcttcagccggccgagaacgattatcaggaaagctctgtgtttggaaagcgatttggcaacggcggcggagtgacggcggctgtgctggaatgtctgaaggagatggacgaaaacacggatatcaaagtggcccgctgcaacggcgccgcagagtgcaagaaggcactgctgctcatgaaggtaggaaagcttccggaagatttcgtggaaggcatggcctgtgtgggcggctgtgtgggcggtcccagccgtcataaaacggagacagaggccaagaaggccagggaccagctgattggagctgctgaggagaggcatgtgctggagaatttgaagaagtatccaatggatgagttttcgatgcataggcattaagctgcggtagtttagatgccgacttgtggtttttgaagaagaatggtggataaaaccacaagatgtagtggtttttgggggaaaaatgagtggatttgcggcctggaaatgggtgtttttctgggcgtgagaaatagatgccttggccctgggagatgactttcctggggctttttggtatttgcagatatagtaattaatatatgagggtgaatgctttacaggtatgttttttggtaagctggattaagataataataaacactgaaactttatcataaaggcagagaagaaatgcttacatttattcatgcgtaaatattgatttccataatgttagagtaatacagtcaacagctaaatgctttttctgggcatttgaaaaatgatgcggacgagtggcggagaatgtgacaataaagttcgacatcattagattacacctggtggcagatttcgttgcatatactattatttattttggttaaaagataaaatcgttggaaatgagtacttattatggtatattagtaatgccagaaatgcttaaatttaagaattctaatcctctcagatacgtggaaattaaaaggtagtagtttatggcttgttctttaattagagaagtggttaataaattaagaatgctttggagttttcaggtatctgggaagaaatatgtaatttagtattatgagaaagctgcccttatatgggcgattgcagataaattgactggtggatataaaccgcacgaatatggagaagtcatcttgccaatgacagtaatacgccgttttgactgcatcattgctgatacaaaggccgcggtacttgaaaaatatgaaagtgtaaaatctcttcccatgcgtgatgtattattgcgcaaagcttccggacacgatttttataatacaagcaaatatgattttgataagttattagatgatcccgataatatcgaagctaattttcgtgattacctgaacggtttttctgaaaatatacaggatattattgagaagttcaaatttgacggccatatcaccacgatggcaaataagggcattctctatattgtgattaaggaatttacatcgtccaaggcaaatctccatccaagcgtaatctccaatctggagatgggatatatttttgaagaaatcatccgccggttttctgaggcgcataacgaagattctgggcagcattatactcctcgtgaagtgatcgaacttatggtcaacattttgttctacgataataacgatgtcctctccggcaataatgtggcaaaaacgatttatgaaagcaaagtgcagacaatgatacaattcagagatagccttgtcgcctaaaatccgagggggtgcaaatccattttagggggtgcagattgataaatcgatagaaggagagataaacacatggcaaattcgtataaaacaattgatgaatcaacgtgggagcgtgccgtgcactgcatggttttcagaaacagcatagagccgtctttctgcgtgacttttgaagcggatatcacgaacttcaagaaaaaagtaaaggcagaaggcatctcgttcactctggcgatggtgtatgctgtctgcaaatgcgcaaatgaagtagag

SEQ ID NO: 493 - DNA, 8710 bp, Enterocloster clostridioformis
  source 1..8710: mol_type = genomic DNA
tcctcaatcaaatcaaacagtttctgtatatcctctctcttaaggccatcaatcgtatcatttaacatttcactatatgtatcaaagaacatttttctttcctccaatttcctctttatacttcttccacatattctccggagttatcctccagtatgtcatagcctgcgcgcaggtaaaggtcaagctggggcggtgtcgcgataccaagcgttacaaagtcctctgtattttccgctggattgcgggtgccgtgcaggacgccgggaggcgcaaacacaatatctcctgtctcaaccggaatccacttgtcataaaggtaacactcacccttaccgctgtggatgatgaggatttcctcagaaatgggatgcttatggggcgcaaattccttacctggcttatgaaatccaaccgcgatatttgctccgcggcatcccatctttggatttaaagcgaaatgaacatcgtgtccatttggcattgtccacacttcaccgccgctgatactaaactttcctccatatttcaatacatgctctttgtttgtcattacaaaatctccttttcctgaaattattctatcattcaatttttttatgatcgaaaccggataactggcttgattgcaaaaccagacatcatgtcatcaaacgccttaagggcatccttataatcataaaccgtaatcagcttctttaagtcatcctgaagcctcaccagaatatcaactgccgcgctggtaccatctgtctttagatgtggatacgggcccttggagcccagaatggtcagctctttgcgcataatgggcaaaagctctacctggtctgcaaagccgctgtaaacactgcccaccacgatgcgccctcccggccggaccacctggaacgcgctctgaaggaccgggagcgctcctgtaagctcaataatcacatccacaccctttgaaccgcacatttcaaatatctggtcctgccaattcccgtcattgctgtcaatcacatcaataaatccaagactctgcactttttccagacgcgccttactattatccactcccacaaccacatctacgcccatgctctttataatgcgggccgcaatcagccccatgggtcccatgccaaagacaaccgccgtatccccatgcttcacatcagcccgacgcgccacgtggtaagcacagttggttggttccagcagagttgcggtaatatcatcaatggtatccgggacagggctgataaaactgtattccggcgtatttaacaccagggtttcctctgtaaatcctccgggcagaagggcatcattcatgctcctgcaataattgggaagcccgttgcggcaattccagcagtgtccgcaggccctggaaagctcacttgccacgcgcatacccttcttaataccatttgcgccatcgccaggatctgctaccacgccggaaaactcgtgcccgaaatatctttcattctcaagggaacgttttccacggtaaagcgcgatatcgcttccgcagatactgcaggccgttacatcaatcttaactgttcccggctcaagggccttaatgtccccgcagttatcctgtaatactaatttcccataatcaaccaatgccactcttctcataatatctatcctttccatacctccggacgtatgtcccggtatctgactacagcataattcatccaaaaatagaacgggcgtatttaataccgttgcccatatgttcaaccgactcttcaaaggtgtcataccagagtttccacggataaagcccaaatacctcaaaggaacaatacctcttaaaatccacttcccgaagcgcctccgccacagacgcaaagtcaaagtgtccatctcccggcgcctggcggtttgagtccgcaagatgcaggtttgccagggtatgtccatatttgcggatggtttcagccggatttacttcttctatattcaggtgataggtatccgccatggtacgcacatttggaaggttcaccatattcacaaaatttaccgcttcttccaatgtgttcaagaagttggtttcataccggttaattgcctccaccgccagggtaacccctttttcctgggcatacagaccaacccggcgtattacctcagccatacatttcactcctgcctccctgtcccagtcaggctcaaagcttctggtctttccgccgcttcccactataacggtagggcattccatatcatatgcaacatccactacctgtttcaaataggcggcagactgattcatcatctccgaatccgtgctcaaaagccgaatggttccgtcgaaaatatagtgaagggcgctgcaaacaattcctgcatcatgaatccagcctaaaacctcttttcggcgctccggggtggattccaccggcaggtgaagggccgcggtaagctccacggcatcatatcccagctttgccgaagtatcaataatttttttcagatccgccatgccaaaggccgcggtacaggcactaaacttcatatatatctcctcctacaattaatttccttatacggttataccacactgtatcccagcatcaccggaacataggtgaccagcgacgggatataggtaatcagcagcaatgcggcaatctctgcaattagatatggaataatgcccttgatgccttcctccaccgtaatatctccaattctgcttcctataaataagcagtatcccagcggaggcgtaatgttaccaatggtaaggttaagcgccatgataacaccaaaatgaattgtactgataccaagagcagccgcaactggagccagaatcggagcaaggataataacagacgctcctccatccatgaacattcccataataagaagcaggatattcacaagcatcagaaatacatatttgttacttgttaaggaaagaatcaggtcattcacaataaccggcatctggagcgctgtcagaccgtaactgaatatccgggcacaggcaataatcagcagcaatggtgccgcactgttaaccgttgcaagcagcagagaccagatatcccgaagccttaaggtgcggctgacaaaaagactgaccagcagactgtaaacaaccgcaatggcgcccgcttctgtaggagtacatacacctcccatgatacctcccacaatgataaccggcatgcccaatgggatgataccatcaagagcaaccttcacaacttcgttgcggctcagccgttcatcgtgcttcggaaaatgatacatgtgattacggaccagcaatacaatcatcagtatcaagcctaccagaatccccggtatcaggcctcccataaacattgctccaaccgaacacccaaccgcggtggcaaatacaaccatgatgatactcggcgggataattggcccgcaggtagaagccgcagcaataattccaaccgcctcttttgtggggtatccctcctctttcatggcgggaatcaggataccgcccatgcaggaggtacttgcctgtgcggaaccagtaatgccgccaaagaacatactcgccacaatactggaaagcccaagactggcgggcaggcgtccaatcagcagcattgcaaaccgaatcagcttctccgtaatctttccccggttcataatctcacctgcaagcatgaaaaacggtatagccaaaaggggcaggcttcctatgccgttaaaaatagactgtggaataaccagtgtggcaagaggagttgctgtggatgatgccagtgccacaaggctgagcaaaccggtaaacatcaggctgatgtaaatcgggatacctgcaatgataaaaacaaaggtcaaaatgaccaggagcgcaattacttctcccatctatgtttcctcctattcattctcggacgctgcgtccgttaatatctttgtcttgaccaccttcagatactcataaatgcaaagcccgaatcccatgggaattgacatgtaaaaatacattctcggaatacgaagtaccgtactcttcatggttccgcctaaggtaaactgcattgaaatcacgaacatgaacaccagcaacacaatcgtaagtatattgattgcagcccgcattgcaattcgcgccgttcttgatttccggttgttaataaaagaggtgaattccgcatgaccattggaacgcactgctcttgcactcccaaacatgcccatggcgacaagcagcatctggttcacttcgtccgcccatagaaaacctgtatgtaaaacataacgcccaaatacacttcccgctgcgatcaccacaatccctgccaggcagaacgcagaaacaatgtcctcaatccacgcaaccacagaatcaaaccttttaaaagtcatcttgccctccttatcgaattatactgtaatcgattacaatttatgtctatagcttaatggatatttatattgttgtcaattgttatttttactgatatcattttgtatttattgttactttttactatatttagctttgttaatatctgttcggatttttttaaattgtaatcgattacagtcatgtcaaatagcaatttaaattattttgcatgtttttcttgcaatgccaactttaatgttataaaatgtaatcgattacagtatttatcattaaaaaataattctgctccatataaatgcgtttttcaatttttgtttcttgggaggataaatatgaatgcaccaaccataaaagatgtagcgaatgccgcaggagtttccgttgcaaccatatccagagtgctcagtaaccccgatcttgtcaaaccggcaacaaaggaacatgtacttcagataatcaaagaaatgaattaccagccaaacgttcttgcacgtcagcttcggactcagacaacaagagctgtcattgttattgttcctaatatagaaaactccttttttcatggaatattatcaggtatcggtacggaagctgaacggcaaggatatcaaatgctgattgctgatttaaagagccagccgtccttggaaaagcattacattgaggcaattaagcagcggcaggtggacggaatcatttccctatccgctaatatgacacaaaagctagaaacactgattacggaaagataccctttagttatggtagtgcaatgcgtacccaattacaaaataccaagcgtttccattgataatatggctgcttcaaaagcgcttatgactcatcttatccggcttggacaccgcgagattgcacacctcactgtatcacctttacagatgccttatcaggatcgtctcaacggttatatttctgctcttgaagaacacaaaattcctgttgataatgaactgatcagttacggagaacccgccatcaagggcggctatgatcagatgtggacattactggcaaaacaaaaaaaattcaccgctgtatttgccgcaggtgatacaatggcaattggtgctatgaaagcattaaaagatcagggactgcgtgttcctgaagactgtgctgttgtcggctttgatgatattgatctttcttctgtatgggaaccagcgattaccacaatacgtcagcccaaggagatgatgggaaggattgcattccagaaactgctggccctcatgcagaatgaacctattgcagtcagtcaagaatatctaccatacgaactggtaatacgggaaagttgcggctattttctatgactaacagtgcctgatattttctcaggttattacacaaataaaaacttatcactttacagcatattcaaaaatattgtacatagtgctttatcgtagaatgcgtttgcgacaaacatatcaaaggaaagtaatctttacaagccaaaaaccctggaagactcatctcccagggccaaggcatctatttctcacgccctgaaaaacacccatttccaggacgcaaattcacttaatttttcctcaaaaaccaccatatcttgtagttttatccaccatttctctccaaaaaccacaagcggcatctaaactatcgcagcttaatgtggtgctgcggtggaatagatgcctgcatttacattattttattgatacattggaatactatctatcccttaactatccactcacctgaacggttatttccccttctgacaatatatcccttatcctgcaattctgcaatcatcctttttacagtgcgcaatgaaactcctaactccttttgtaattccttttgtgtgactcttgcattctgcttcataatggtcaacactctttcttcaggagacgttaccttaattccaataatggtgccaatggtgtcagaattagtgccaatggtgtcagaattggtgccagaattagtgccaatgatgccagcttggattaatgacggctgcctgtacatatttatacggaaatccccgtcaaaatcgatcagctctggttctggaataccatattcctggcattcacgtattattcgaggaataccgctgccccatttttcaatgattttcatataagagaatgcgttggctattgcacgattcctgattttagagtatccttccttcattttttcaatcgtcacaccattcattagcatacccggagaagtaatctccaatcggttatcataaagcgctacctggatattgcctgggtccaaataactgcgatgagctacagcattggcaatcaactcacggatgctgtctatcggaagctcataaacatcctgcctgtaaataccatctatcttcattccccggttaattttctccagcacatattggtatgcggcctccatctgttcctgaattggaccgttaaattcccgcctgtctacaaagtacgcacggtcattacctttaaaaatagcgcactggatgttttgctgcatggtattcttccctgtcagcaaagcatatgcattcgtcggaacaatttctccatctttttcccataaaatcccccaggataacagtacattctctgttacatctttaatctcagctttggctgcatcggtcaatgcatgttcgagggcgactttttttaaatcgtgacatagttttttaatgtcgtcttttgtaactgtcaagccatcacacggctcactgtcataatagcggttctgtccttccagtatcaattcctttaacataaaatcaggtgcaagacgggtcgttcctgcaacccggataaatgttccgtctactattccctttgattttaagtaatacgggcgcattttaccagaactgatttctacaacaataacggtcttatctccaactgtctgtaacgtcacgtccgggataatcctcggctcacaactatctgatatagcattggtgatagagtctatagtctggaaaattgtatccggattcatgcctgttacatctaatgttgaatcatcaataccaaatacaatccttccaccacgtccattggcaaaggcaactaccgttttcatatacttttcactttttcccggtacatctactttatattcgatgctctttgattcacctgaaaacagtttgtctattgccatattctcccctcctcaagctctcttttatataatagcacatttctttatgaatattattacccttaaatctttactatattatataaaggaaatattgtaattacaatagacgcagaagatttgtccttgatatataaacagtaaccattaaatctacgaaaccaaaaaattcatacatggcacattgaaagcttaattataatatactgttgttgatttcagcgaacaccaaatttttgtcagcgatttttgagctacaagagttactattggggtgagaagtatgtcggttagttataataagctttggaagctattaattgatagaaatatgaagaagaaagacctgtgtgctgtataggtattagtcatgctttagtgggttatagatggctgttgtctattatgttggagcttgaagagcgtacaggttcctccgaattgagaagaaataaacctgttcccgtatgccgtattttcattcaggtcattcccgatatcccagtacagtctgatcagttgctcatttacattcagcaacgctctgtactgtgcagctttaattttatccttgatatccgatatgagctgaatctgcttgctttcctgtatttccattacgccctccaattctgcagacgccgtctgcaaaattcatttgtctttatgatttttttaaccgtgcaagcccgctttcacaatcatcctacatattgttccgattttgctcatcaaaataattctgtaacgcgtcaacaaactgcccgatatgaatcccgtcaacaaaagaatgatgtgcttgaattgaaacggggattattgtacgtccatctttctcgtagtactttccccaatcgaacagcggtgtggcattatccttcttccctgaatttgtatgggaaatatgcgtataagtcacccacggcatgggcgaacactggaatacatcatttcccagaggaccggtaaagtattctttctgctcatctgctgttttcgaagccagttcaacatactctgtcaggtcatccacgaaaggtacattcactactttgaacaatccggtttccttgttgagatatgtaaaggctgtatcaattttatcatacagaacaactttcccatctaaaaatctgtaccttagtg

SEQ ID NO: 494 - DNA, 7547 bp, Enterocloster clostridioformis
  source 1..7547: mol_type = genomic DNA
gccagtgagagccgacccttccgcatgaggcccacaaggtattgttgctccccgttgctgtctgggataaagtccagcaacctttccagcgtcaccctcccaccgagccggtacgccgtcacagggtactcccggcccaatttggagccggagccaaccacccggaacccctgtaaaatgccctgcatttgcggctcctttatggtagaggtgtacctgttccatatctgccgggtaagggcatacttcaattccttcaagcatttctggttatgagggtacatagggatcggctcttccaggacataatacaggtgaagtccggtcccgctgtttacaacaaaagtcgcctggggaagaatatccttgttcatctggtgcagcgtgtcccggagctggggcatacccaccccatccagatcaaagaccaaggcatagagataccgagcgttcttgccacaccgccgcctcccaaagtaagacagaggggacatgatagtaaagtccgtatcaaagacctcggccagctccgacaattcgtccgtgatggtatagcgtttggccttgccgtcaccctcgatctccagagcaatccctgcggccttcggcaccgtcaccgcgatcccattgcccttcgcgtcctcaaaatggcctttccgctcaaaactgcctaccggaaagatctcccggtaaaattcaaagggagtgaccggctccaggaacttcgccaaatgctcgttcttttccaggtacaattcccgcagccgctccatagcggcctgctgatccatagccatacgcacacctccaaaagaaaaagtaacaaaaagaaaatccgctgcggcggggatcgcctgcgggcgggaaggggggaaagggggagccaaagagcggcccctacggggccttaaagagaaagtcacctccccctttcccccctcgctctggggcatggaaatgatggaaaaccctacgggtttaccacattcccacaccccgccgctcaccccccttttcccctccgactttctccctgtccgagagagaattttaagagattttattgagggcctaaaggcccttaggggggcatatattatcaatatattttttccctatttttcgacagccataattccggcccttttttctatccctcacaggcccgtacacgcggcatatattatcaatatattttttccctattttcagttgttattatagcctgtccgaacggctctttcaagtcccccggacaggctttctttacagctccatgccgccccaggtgtggctccgttcctgctcctgttccggctgctgcagctccggcacaggcagcaactcccgcgccctttcgatcaagggccggaactgctccggtaggtgccgatccaggaagtccagcaccgccccgaccccctccaagagccgggacgagaagttgcgctcactgtccaagctgtcctccaggtacgccacctgctgccgcaggtcacggttttcgctgataagctcctgccgctcctgggcctccttcagcttttctttcatggacggcaaccggctctggagctgcttgttctcggctttcagctcccgcacttcctgctccgctgccgccccacggatcgccgctgccttcagctcttttatctgctccactgtaacgcccttgacggcccctgtcagcgttttctccggccggatcgcgtccaggtcaacctgcaccttctccgccgcctggagccgccgtacagtctttccgagggcctttttctgccgttccagcacagccatgtcctgctccgctgccgtcacctgttcctggacggcctccaacctctgagccgcagctcggtactccggcaagtccatgtggggacggcccccgcccaagctgacgatctcgaactcgtgtgcctgggcgatctccgcaagggacgctttctccctctccatccaggctttccattccgtctgcttgcggcccaggctttcaaagccctgctgctttaatgcctgtttcatggagaccctggtagacaggccccgggtctgctccgtggccaccggaacgaagtctacatggaggtggggcgtggcctcgtccatgtgcagcaccatattgaacacccgcaggtgggggttgcgctcctggaaggactccgcaaattctttgagcgctgccgctgcccgttcccctccaggggacccgcacccacagtcgttcaggttgccgatctggaagattgcctcgtgaaatagcttttcctgcttgctctgccggatatgctcatagtagtccggtatcttgtccctggtctttttctttttggcattgtaggcggccagggcctcgtcaaagacttcatgatagacctgtttcagatcttcgttgcaaaaggtcacattctgccccgtccggctccggtctacattcgcagctgtaaagctccggttgttgtgccggatactgccccggccagtcatgccggatatggttgtcccgataaaatcacccatcctttctatcgtccgtatcccttactgctcccatcttaccatagtccccgcgagggggcaacacctctttgttactttctcggtgagaaagtaactcaaaagcactttcacaccgccgccccgttggggcgtcagtatgaaagtgcttttgcgcgctcccgcgggggttcgccggagctgggcgggagcagcgggaaaccgcagcggccggcagctccggcgggcagctcccaaggcaacgatattaagggcttgtcctctctgcccctttcgctccgtacccgttcgggagatggctcttgagtgcgcttttcagaaaaaagttgaaaaaagcaaaatgcgcccgtccgcaagacgcggacgggcgcaaaggaaatgtaagcagtagctaaatgtattgacagttcacattcatagccggaatatcccgcttgcggagcatagctttttttgaccgcaaagcattaggcgggttacagtaaataaaaatggacacggcgatacctccccgataccgccgtatccttaaaaaagggcgactttaatacactacccgcaatccattctataatagggaacagcggcttttgcgcaatattaaataaaaaagccgataacacataggttttttgacctaatgcgttatcggctctgcgtctatgcgtctggcacttttaatcatttttttttgaatttattatatgtgttagctaactgtccacaagccgcgttaatctctctgccatgagaaactctcatagtaacttcaagtcctgcttgctctaattgatgtttgaatgcaactatttcccgtttctgtggtgctttaattcttgaattgcttgttgggttgtattgtaacacgttaatcataacttttttgccccgaaaccattttgcaagttgtcttacatctgagggccggtcatttatacccggtaaaagcaaatacgcaaagacaattttgcgattatgcctttcagaataggataaggcttgcttaacaacatcttcaatagcatatatgcgcatgtgaggaataatacgatttcttgcagattgtgttgctgcgtgtaaagatattgtcaactgaattttaagatgttcctcgcgcaatttttttaattgatcgaccggaccaactgttgatatggtaatgccgtcggttggaaagttgagcccatatctatctcggagaatatggattgcttttatcaagttgtcataattgaataaaggctctcccatacccataaaaacgatacggtttacttttcgacgcaacaatataatctgttgtacgatttctgacgatgttagattacgaacaaagccatttcgcccggactcacaaaaaatacaaccaacaggacaaccgacttgtgtgctcacgcaaacagttccaccatctcgccgcttgataaaaaccgtttcaatgtatttgttgtctttcagttcgtaaacatacttttcagtatcactgcttttgcaaatattttttaccaacattgatagattttttttgcgtggtaattgcttatataattcttcatataaggcttttgcttcattctcgccaataacttccgacatttctttgtaagtaaatccgtatggatcattccgtacttccgcaggcgtatatttaggtaaacgtttcatttttatatcctttcttctaaataataaaagtttgtttttctgtatttttgattacaatctctaatttttctacatcaatgatatgcgtcaatttgcatttagggcagaaaagaggaaaatcttttaatacagtattatgaaatacttgaactctcgtctttccgttacaaatcggacattttatccaatattttttaagcattatatttcactcgtcctttttacacaaaaaaatgcaggtcaatcctcaacatgagcattgacctgcatttataatgcacagagcagtacaacaaaactaaggcatagcttgcactatgtctatactatatctatacgtcgttagttttttgtatagcatccgcaaaataagcatgacaaaaaagcccatgttgaaaatgggaaaatcctttttttcaatgcttatctaatacgcatgctatgcaacataaacgccgcctccttttacataaattttattttatcagaaaatcagtctactgtcaatacacaacaggaagtatttaacctaatgatatgaattgtgtggacatatccaaaaagaaaggtgaactgtaaaatgtaacagggtgaatgaaaatggcaaaaagacccgtaccattgtacgactttaaggctttcggggcagctataaaagccgcgagaaatgaatacggcgagagccgcaaaaaggtaagcgacgagttatatatttccccgcgctaccttgcgaatatcgagaacaagggacaacagccgagtttacacctcaaatagttacctatttttcatctgttttatgtgcttaatccatcctctaataagccatacataaacacagacagcaataataacagagaaaagcagaactgaaattcctttactcatttctccttgaaggagcagatctccccctataaaaaggctcattcccaccaacaggagatagcccacaatgaggattgccaaaaacgcctgacacaaagtcctcaatacccttttcgtttttatagagcctaccgcttgaaaggctcccatcattacaaactctacaacaagaaaaaatacgaaaaagcccaaaatgataaatatcttatctcccatttggaacctcctttagcctcgaaagagcctactaaaccaactccgcttttgttccggctcccgaccctgctgctccgctccggtctccccagtaaggagctgctgctgaattgtccccgcgtgaagggcctgggccgctgccgctgtttgctgcgctgcggccaacgcatcagtgagccgggtaatggtctgggcctgctgctcgatctgccgatctttcatttcaagctgcccttgcagcgtgtcgatggtggcctgcaaaacagaaatcacaccatcaaccgccaccgttttttcgtcatttttggttgacggcgcgtcaaccaaaccgtcaaccgcacccgtcaaccggttgtcggtggttgacggtgcattttcagaaaatgcctgttttatcagcttttcaccgtcaacctctaccatcaacctaccgtcaaccgttgccgtcaacccctgtaaactggttgacagcggttcacgcttgatttttttgaaaaccgcctgctttgatacccctatctcgtcggctatctgccggatcgttttcatacctttacaaacaggccgacaggacacacacccttaaaaccaggcgtagatatgtaccagcagccagggccttccggctcccaggctatttcaagagtaatctcatgccaaccatctggaaacagagccgtaaaaccctgcccggcgtgtatgccttctccctccaggagcagacgggggtgcggatcatcgtccgccggatcagggagctgcagctgcgcgatcctctctttatcccagctcataaaccggcccttcctttctcaatcgtcatagtggcccaggcaggagataatataaatcaccccgccctgctcatagtaaacaatgcgattggtttcgtcaatgcggcggctccaccagccgctcagattagcccgcagaggctccggcttaccgatcccctcataggggcttctctgaatatccttgatcagtgcgtttatccgtttcagcgtctttttgtcctgcgtctgccaatacagatactcgctccacgcccgatcctcccacagcaacctcatcagtccacctcgatcaagtcatgctcagcaaaatgggccttgccagttttcacatcctgcatgacgctctccaggtgccgaaggttgctttctgaatagaacggatcagccgaaacctcaaacggtatgcggtactctctgccgaccttctttgcgaacatcgtaaaggccgcgctcatggaaaggcccatctcggcacaggcccgttccattctcttcttgacatcttcatccatcttgatatttacattgaccgtgtgtgccatatcgaacactcctttcctactcatagtatatgcagaaagaaagaaaaaatcaagtatttttctttacctttctgtaaatgccgttacccctgatgtgtggacatttagagggtaaaaaagccttgatttatgcggctttccgggcgcagtagagagggggtggtatctttaccatcagagagccggaaaagccttcctggaccgctccagggccgaaaacagcccctaatccttacccggccccaaagcctccaccagcagatcactcaccgcctgggagggcgtcacgcgcaccgtgatatgcccatcctggacacgcacagtcgaaggcgcggtgtcccaccacttacggatcgttttgggatcaaggcccgtatcccggtggcagtcggccttgcgaccttctgggtgctgctgccgccactcatacactcgattctgggccgatggacggccattcccttcccgccaattatcgtgaattatgtccctcgttgccctggcaatcttcaaatgctgctcctgcttgcgccagttccgcttattgacgggcatagtcagaccagagatcttcgctatatcgtccctgggaaatgtcacataatcctcgttatacatctccagagcgcacaccacatcatctttcgtaaaacggttgatgtcctccacgctcatatcatcatagggtttcagcagggagaaagcgtcccggcgcagctcgtcctcgctgatcccacacttcttcgcatagatcgccagcgtcataatgccataaaaccgatggcccaccctgatctcgtccccgatccggtgcagccaccagtcataaaggtcacgcttgaccgtccagcgaccccgccgctccttcttgacaatccgccgctcataccagtccgggtacttctccttcgcctcg

SEQ ID NO: 495 - DNA, 4673 bp, Enterocloster clostridioformis
  source 1..4673: mol_type = genomic DNA
ttgaaagggcgttttcaattgagacgaatatttcagtgcgtttatctttgttttttggagcaattaaaatgggaaaaatgaatgaagaagaggacttctataatcttttacttgaaaaccaggaatataatgtagcaaatagaggatatcatctggcatattattctgacatgccgtcagatggagaattaccgtttctcgatacaggtgaagtagattggtcaaatacattaaaagcgtttattagacattttgaaagtaaaaaaagagaacaatattttttacgcagaatagatttgattacaatgttacaattaatggaatcaagacaatcaacaggaccgcttactagaaaaattttggaaaattttgaacaacttacctttcatccggttattcgaaatgagaaagattttcaaaagaaaatagaaaaagcttttaatactgtgaaagcgaaatttgaagaattctgtgaattgtaattttcaaagaaagaattagggtatgcttatgtatagatattggggtcaaaaaggggcgaagtggaccggcgaaggcgtcggcctttttgaccttaatatcatattatatagttggcctggattctatcagttgcatttataaaaacaagatattaaaatatttatttttagatcattaatatattttagcatagctattttttgaataaattagtttaatcggacatcagattcatatgttttcttcaattattagatgacttaaattagagcatcaagcgattccgaataacaaataaagtggattatatcatttccgcttggggagaattgcgtccttccaccatcattattatccactcaacaaatgtcgagagtttgtgtagaattgtgcagaaaataaggaatagcttattaacgaaaagtgatagaaaatgataaatgttaaaaaatggctgaaaaatgtttaggaagagtattgtggtgattgaacttttgtgataaactctttgtaaagagccagtaatgttcaattaatttggactttttgaaactatttttagtttcaaaacggtttgtccaacaggtagcacgatagaaatcggaatgcttgttccaagctttccaatttctatcgcactccctgttagccaaagcagttttatcaagtggctcttttttgtgtgggagaaaatgatgaataggacgccggaagaagttattaatttaagaccacttgtttttttatgtggaccattatatgatccatcagataagaaagaccgaagaaaaattttgcgacagtatctgacgagatataaaacgacacttagttataatggaaaagattatgtgattgaaccatttgcattgattattgataaggtttttaacacagaagatctggaaaataaccaaaatattgcattgatagaagaagtgattgctgcatgtgcatataaaaattatatttttatagatacaatgtcaacagctttggagttgggactttttgcaaatagctattctcaaaacagaaccacggcattactgccaaaagatttcagatcgtttaaaccatcaataggatattttgtacaacagacgataaaaaagtcggataatattgcactttgtatttatgggaataaaagaatcaataaatttattgatggaggcagacaggttatagaaaatctggttgcttttaaatcacatcaaattccacgcgaaatagagcgtgatataaagaaagactttagcaaaggaatagagagctttattctgcggattgaatttacaacaaatattaaggatgctgaaaaaatcttataccaggttaatacagaggggattcgaatggttattcctccacgaattttattttatttggtagaaacctttggaagtattaacaatatcaaaaatgcactgctggattattttgaatattatgagtgcgaaaaagataaagagctggttataatgtctatattaatacgaaaaggattgtgtattctggagttggattcgccgtttgaatatagcatcatcgatgtaattgggagcatgagctatttcatagaaaagttaaaaactcgtgtagcctttcatcagaattatgagcgactgcggtatgctccgataaaacgttggagatctcgaaaacgattttctgcatgcgaattattgggcctggatattattgaaatgaggcagatgcagtcactgtttggatataataagaaaaaatctgttatatccaaaaacctactcataaatggcaagaaaaggaaaataaaaatgtattcttgcacatcagaaggctttgctttaagaaattttcatttaagacttatgaagcagttgcagaagttatttgaactgcagccatatagttatgcttatcgcaaagataggtcgattttaatgtgtatgaaccaacacattgacagtaaatttttcttaaagatagatattagagactttttcaatagcatatcaaaagggaaaatgaataaaattatcaagtgtcatttgtgctacgatcctaaacaggcttatgaagataatgtgatatggagaaagagcaggtatttaggtgagtatgtaaaggaatggttgggaattaaagaaattacagatatatgttttgtgaatggtcggttagccttgggaatggttacatcaccaattctatcaaatatttacatggatttctttgatgcacggtttcatgataactatcctgaattagtttatacaagatattccgatgatatattaatttcatctggaaaatggttcgactataaatctattttaaatttcattgcaaaagaattgtgctatcttggactggagatgaatgagcataaggttggattttataaattgaagcaagcgggtgatcatattaagtttttaggattaaatatagtccatggaccagcggaagaaaattatattacagttggaaagcagtatataaaagatgtttgttccaatatttctcaatatgaaaaaaagataggattatttaaaaaatctcaaattattgggcaaatagaatatattaagtttattagtaccagagattatttgcaattgcagaaaatatatagaatcaaaaatcataaagatttaaacgtggaagaattgaatcgagtgggattgtaacaataaaattagaatatagttataatctgcaagtgatgacatgaacaatattaaatgatcaaaggcaggtgattgaatggagaatcaaggtgaaatcattatttatcaaacagaagatggcctaacacacatagaggtgaaaattgaggatgaaaccgtctggttgagtcaacagcaaatggcagacttgtaccaaacctctaggacgaatgtggtcgagcatataaaacacatttacgaagatggtgaactggatgagcagtcaacctgtcggaatttccgacaggttcgtcaagaaggcaatagagaagttgcaaggaatataccattttataatcttgacatgatcatatcacttggatatagagtaaaatcatcgattgccacgagatttcggcgttgggcgacagagcgtttgagggaatacatgattaaaggctttactatggatgatgaaaggttgaaaggcaatggcggtggtaattactggcgtgaattacttgaacgtattagagatatccgctcatctgaaaaggtattgtatcgacaagttctggatttatatgccacaagtgtagattacgatcctcgtagtgaggattcaatagagttctttaaaatagtgcagaataagctgcatttcgcggctcatggccatacagcggcagaagtgatatacgaacgagcagattcagaaaagccgtttatgggacttactacattttcgggagaacttccggaattaaaggatattagtattgcaaaaaattatctgaatgaggaagaattaaaagttttgaataatcttgtttctggttattttgatttggctgaaattaatgcaatcgagcataagccaatgtacatgaaagattatattgaccagttggatgctattttattgtcaggtaatagaaaactgcttgcgggatatggaaaagtgagtcatgatcaggcaatgaaaaaggcaaaggaagagtatagaaaataccaaaaaaatacactttcaccggtggagcaggcatatatggaaactattaaggacgttggtgagaatgcgaaaaagagagtaagaaaagaaagaggaaatagaagatgaatcttgagtaggtatgcaatggcttgctgtgcatttgagcgggatgtttactattggagttccgccaaggggcaactatatatttctgccatcattattatccactcaacaaattgtcgaagtttgcgtggaattatgccggaaagagatgatggggaacataaatttatgagtgaaaatggatagtaactttagttgtctgaaatatttataaacgcatgagtaaaatgaggaggaagataaatgagtttaattccaagtggtttaagtgtacaagaagcatatcgtagatatagaaatggtcaaattgttgttaataggaagtatcagagaaaattagtatggacacagaatgaaaaaagaattcttcgttagcagtcgatattgaaaatgcactaatgagatataaaaag

SEQ ID NO: 496 - DNA, 1923 bp, Enterocloster clostridioformis
  source 1..1923: mol_type = genomic DNA
agtagtcatgacggaggggaaaaggaacatcgtccatcagctcctggaagagtatgacatccagactgcggaggatatccaggaagccctcaaagacctgctggggagcaccctgaaggagatgatggaagcggagatggatgagcatctcggctatgggaggtcagaacggtcggattcggatgattaccgcaatggctacaagcccaagcggatcaacagcagcttcgggagcatggacatccaggtgccccaggacaggaagtccacgtttgaaccccaggtggtaagaaagcgccagaaggacatttccggcattgaccagaagatcatatccatgtatgcaaaaggcatgacaacccgccaaatctcggataccttgatggacatttatggttttgaggcttcggaagggttcatctcggacgtgacggacaagatactgccgcagattgaagactggcagaaccgcccgctggaggaagtctatcccgtggtctacatcgacgcaatccattattccgtgcgggaggacggggtaatccgcaagcttgccgcctatgtcatcctcggccttacgctggaaggtaaaaaggaagtcctgagcatacagatcggggagaatgaaagctccaagtactggctctgcgttctgaacgagttgaagaaccgcggtgtgaaggatatcctcattctctgctcggacgggctcacgggcattaaggaagccataacggcggcattcccgaagacggagcagcagcgctgcatcgtacatatggtacggaacacgctgaaatacgtctccgacaaggaccggaaagcatttgccacggacctgaaaaccatctaccatgccgcaaacgaggaaaaggcgctggaggcgctggagaaggtgacggaaaagtggacgccaaagtaccccaactcaatgaaacgctggcatgacaactgggatgtggtatcccccatcttcaagttttccatggaggtcaggaaggtgatctatactaccaacgcgatcgagagcctcaactctacctaccggaagctcaaccgccagcggagcgtgttcccgggcagcacggcgctcttaaaggctctgtacctggccacgttcgaggcgacgaagaagtggaccatgcccatccgcaactgggggcaggtctatggggaactgtccattatgtacgaaggcagactgccggaataagagcgcacaggcataggtgtacacctatccggaaaggagctttccatgtatggattttcaaaatacgatgctcaggacaggtacgacagctataatactgtacaggtgaagttaaaactgaatatgaagacagatgcagatatcctggcctgggtcagacagcacaaatatggcagggacacttccgtccaaggggccatcaaggccctgatacgggaagacatcgccagaggccaggccgatgggacacaaggttaatccctctgcattttacattcgttggctgtctgcagctctgacagggattccatgatagacaggtaatcgatcccctccacaacagtccctgtgccagggtcaaacagttcatcgtctgcggtggctttcgggtcataggatttcagttcactgtcataccagctatagatatcactgtataagtcggctgcatgatccagcagggactgcagtccattgatctttgccctgatatcttcaggtacaaagggatcgtctgtttttagcttcatggcacacctcctgatgttttcctgtaagaagtgtaccataatttgatgggattttccaatacatcttgacagaatccaaaagcatccgtatagtaaaggtaggtggtcacgacatccacctacctttctcattaacttatcatagaagatctcaatttacagactttttttcatactctc

SEQ ID NO: 497 - DNA, 1771 bp, Enterocloster clostridioformis
  source 1..1771: mol_type = genomic DNA
ttttgtttgcccagcatgggcgttttctaatgggtgaaagtcccaagtgcgcgtaggcaacaacgaagcacatagccgaacagcaagggtgtccgccgtgagacggaatctgaaagaagctgtaagcaaacctctgacctgacggacaggaaccgcatataaggctcggaaatacggataaggtggcaaaaggcactgaagtccaaaaggttgccggaagtacgagtaaatgcggcaggtacatggaggaaaagaacacgcaccttaactggggaggtctcacaggcggtctcattagccgtagtaacaacgaattgtgagaagtcagcagaagccatagtagtgaggaagttcctgtaatggggacggagcgaagggctgaacaatcaatcagttgaagtacgttccacttcgtagccggagcatacgcctgtcgatgacttcaaaggcggcaaaggcaaaaggggcagaaaggaaacaacgcatggacacaagcagtctcatggagcagatattaagcagggataatctaaatgcggcgtatctgcaagtcgtaaggaataaaggagcggcaggcgtggacgggatgaccgttgaagaacttggcgcatatctttcggaaaacggcgaaaacattaaggaacagttgcggacgaggaagtataagccgaagccagtccgcagggtggagatacccaaacccgatggtggtacaagaaatcttggagtgccaacagcagtagaccgctttgtacagcaggcggtggcacaggtgcttaccccgatatttgaggagcagtttcacgaccacagctatggattcagacccaagcggtgtgcacagcaggcagtccttaaagcattggaaatgatgaatgacggacacaactggatagtggatatcgacctagcgaaattctttgacacagtagaccatgacaagctgatgacgattttcggacggacaataaaggacggagatgtcatatcggtggtaagaaagattctggtcagcggcgtaatgattgatgatgagtatgaagatacggtagtcggcacaccgcagggtggaaatatctcgccgctgttagcaaatatcatgttaaatgagctggacaaagaactggaagcaaggaggctggatttcgtccggtatgcagatgaccttattataatggtcgggagcagacaggcggcagagcgggtaatgaagagcgtggctcggtttatagaggaaaagcttggactgaaagtgaacgcggaaaagagcagggttgataaaccaaagggcattaagtatctggggtttggattttactatgactcatttgccaaagggtacaaagccagaccacacccgaaagcggcagcaaagttcaaggcgcagatgaagaaatatacaagcaggagctggggagtgggcaatggttataaaattgggaaactcaaccggcttatccgagggtggataaattatttcaaaatcggaagcatgaaaaggctgtgcgcaaaaatggacggacagattcggtatcgactgcgcatgtgcatatggaaacactggaaaacgccaaagaacagggaaaagaatcttatcaaacttggtctgccgccaaatgcggcacatggcatttcatatgccaaaggatatgccagagtgtgcagaagctggaatctccacatttgtatcagtaaagagagactagctaagtttggtcttgtatccatggaagactactacgccgaaaaggctgttacatgttaagttgat

SEQ ID NO: 498 - DNA, 1618 bp, Enterocloster clostridioformis
  source 1..1618: mol_type = genomic DNA
tcttgctttacagaggacccagtctcatttcaaaattttttgtgaactcccctccggtagccttgcaatctgcttgttttgatggtaagatgaagatgggagagaaggatagctgtgaggcagcactttcccggataagaatatctgctgtgggagatttccacagttgcggaaaaagatttaacttagctaagacggcggaagggaggcggttgccggtggcgagtgtaaatgtaactctttcggatattaatatacagtggcatccggcgttttgcgctgcggcagagcttgaactttcggcaaaccgtgcggaactggatttccagcgtgagtataatttaagcaagaagcctttgcagattgacctgcttgtggttgagaagctggatgaagtgagcatccagaatgaaatcgggcgcattttcaggcggtataacgtgattgagtataagtcgcccggtgatgggatgacgatagatgatttctttaagacggtcggatacgcctgtatctacaagggtcttggagagacggttgaccagattcctattgaccagttgacggtttcgttgttccgggaaggctatccggaagaactgtttagcagcttggagagatatgggcttgcggttaaaaaggaatttgacggcgtatattatgtagaagggcttctgatcccggcgcaggttgtggtgacgagggaacttgaaagcggaaagcatctgtggttaaaggtactttccagaaatccattggaagaagatgtccttggttttgtcgaggacgcgcaaaagctcacagaggagggagaacgcgcaaatatggatgcggttttgcaggtgagtttatcggcaaactataagctgtatgaagaattgaaaaggaggtatcctgagatgtgtgaagcgatgaaaatattaatgcatgatgagctaagtgaagcgcagagagatggcattgcacagggcgagatgaagaaggctaaggagactgccatcaacatgaagaaaaaaggttactcggataatactattgctgaattgttagaagtaggtgtgaacattgtacagcagtgggtggctggcactgtgagcttggcaaaataagagaattttagccctctgtgtaaagataggtttgacctatgtttctcacagagggctttgttttatcctaatctcccgaaaaaattatacacaaccagctccctgatgttgtgaatccattgaaaatactaggtttttaagcattctctctttacaaatatgtgtataaattatataatataagaagaaatattatacacatatttgaaggagccgcgccatgtcgtcattggtttatgtcaaaaatccaaatggtaaaatctatgtatatagcaacgtttctgtttatgataaggaaaccaaaaaggtcaaacatattcgcaagagcatcgggcatctggatccagcaacaggcgaagtggttcccaaccgcaggaaaggcgatattgcccgcaaaaaggctgaaacgaaagaacctgctggccgctgtgttgttgaaaacaccggcatacagtcccttttggataaagctgtttcagacataggactgacagtaccgctcaccgcag

SEQ ID NO: 499 - DNA, 923 bp, Enterocloster clostridioformis
  source 1..923: mol_type = genomic DNA
tagtgtggctgcaccaaagccggaaaaagagcagagaacaaggcagaaaaaagcatgtctgaaaatataaaaaggaagaaaagagcgaaaaaggaaaaggctgttttcagtgggacaaaagggcgggtttcactcgcaccttgacaggaagttgtctccttcccaccgacttcccactcattgttcagtcgaaaatagaacaaagtaaaatcaaagcagaagtatcaggacttaacaatccgagtacttctgctttttttctggtttttcactcacagttccaacatgtatactacactgtttacttactatacaacatacaataataatgaagctaaacataacaatacagccgatgaacaggagatagattttttagattatctgacaggcggttttatgcggtttttgattcagctaagtagaaacaaaaagaaaatataatctttgcaaaacgtatgttcccatgttaaaataaacattaggaaagcactcacgacaggagtggaacctcccagacttagtaaaaacggttcgccggaatacataggaaaggaggtagcgcccatgacagcatacgagattatttcaatcttcatagggatactagctctactcatatcctttggcagcttgattgtagcgattatcgcctttctcgataagagaaataagcgtaaataaaatgcccaccctgtctgatccacagggtaggcggtgtccataaggacatttaagtaatctactgggagcatccacttttggagtgggtgctttcttttacacttctattataatcaatcaagttcctaaattcaagtgattcttagaaatttccgtccaaatcctcacgccgggttacagttcacaggtgccctaaatcaatatcgtcaaagtgacgaaatttaaaaattaagaaatga

SEQ ID NO: 500 - DNA, 910 bp, Enterocloster clostridioformis
  source 1..910: mol_type = genomic DNA
gaccgccagctgttcgccgtggtgacggcggatgccgggtgcggcaagtcaacgctggtgcgccgttttgtggagacgctccccaaagaggaatatatcttcctctacctgtcggactccaaactgaccccaagatggttctacaaaggcatgctcgaccagctgggcgtggaatcaaagttctaccgcggcgatgccaagaggcagcttcagaaggaggtggagatcatccgcggcgtgcagggcaggaaagtcgtctgcatcctggatgaagcacaccttctggaaaaagagaccattgaggaattccgcttcctgctgaattataaattcgattctatgagccctatggcactcgtgctcgtcgggcagacggagctgtgggataaactccggctccagcggtatgcggccgtcaggcagcggattgatttaagctgcatcctgccccatcttgaccgtgcgcagacggaaagatatatccgttcccaccttgcgtatgccggaggcaggcaggatatctttaccgataaggccatggacgagatcttccgcgagtccacggggatcccaaggcgcatcaaccggatctgtaacggctgcctgatgtacgccagccagcagggaaagcgtctcacggacgaacatcaggtaaggtttgtcctcgaacatgagatgctgggaggtgaggcctgatggttcagaacaaagaacatcgcccggcagagacctttgctgaccgcatgcgccagtccggcgtattggatctgctggaggaatacatggacatccgggacgaactggaggaagccctcaattccatagaactgctccatggggatatcaggatcgccatggatgacatcagcggacagcttgaagatcttcaggagcatatggataacgtcag

SEQ ID NO: 501 - DNA, 879 bp, Enterocloster clostridioformis
  source 1..879: mol_type = genomic DNA
actatggaggcagtcatcatgaaaaagataaaaattgagtttaccaatgagcggctcatcccagccagcggccttgcagttgtcggtgccattctcggcaaaagcgacttcgtaaagcggtgcaaccgtatggatgtcaccccaaaccgttcacagcaccagatcaagaacggggatgtcctgctcacttatatcggacttctcaccatggggaaacctgcttatgagtccgtccatgagtttgatgacgacccggatttttacaaatacgcacttggcattgtcagaagcatcccttctgaggagacgctgcgccagcggatggatgacattggctcatccatgcgttcttatatccttgcggaaaacatcaagatgctcagggataatggcattgtaccgggaaaactcccgaacggttatgtgcctgtggatattgatgtcacgccctttgataattccaagaccaaaaagcagggtgtctccagaacttataagggatgtgacggctatgcgccgataatggcatatattggaacggagggctatctggtcaactgtgaactccgggaaggaaaacagcattgccagaagcatacccctgagtttttacgggaaaccatccgtatgtgcagggagattacggatgaaccgctcctgatccgccttgattcaggaaacgatgccgcagagaatatcggtatcctggtggaagcgggctgttatttcgtcataaaacgcaacctccgcagggaaagcaaagaggactggctgcagatggcacaggaatacagccaagatatcgaaactccccgtgaagggaaaaccgtctatatcggcagcgactggaaaccggtttcctataaaacagcggatgat

SEQ ID NO: 502 - DNA, 811 bp, Enterocloster clostridioformis
  source 1..811: mol_type = genomic DNA
tattacacagtattactgcaccagtcgcaataccagtcaatgcatcaaccttttctcttccatcagtgtcacccacttgtttttgtaactctgctgctaccatttctttatcgtatttcagtctttctaacattggcttatgcctaaactcaaagtttctaaatatatcatcccaagtaaacgcatacacctcataattttctgatttggataccaatccaatttttcctttatcctcgaatactttgtattgacttttaatgtattcatcaatttccttgcagacagctataaatttccatttacgaaattcactattaaattgtggctgtcttcttacaaaatccatataatcttctatctgcctcaaaactttcttcgtcaatggtactttaggtgcttttagttctactacgatgttttcgtctagtaccgtttcaaacgtgttttcaaccgttcgtgtattacacataaaaatatccatacgacgctcattctcaatgtctggttctaatgaggccttaatattttcctcaccatacaaaatatttgtatattgctgcaatgccttttgcattctttgatcagcactggccaaattatattgctctccaaatagccaaaactgtctctccactattttttgtatatggtcacgctcatttgcaaactgtgttaaatcatatacaatactttttaataattctatcactttataacgttcttcaatgaatttaattgtttcaataatattttccaaagaagtttttttcaatatctgtgaaaaatcatgtctttgttgtggagatag

SEQ ID NO: 503 - DNA, 632 bp, Enterocloster clostridioformis
  source 1..632: mol_type = genomic DNA
cttttctcagggaggcccggatccataaggtcaaaacactggaagagcttaaccgccactggaaaaactacctggaggaatactgccataagcagccgcacgagggcatccgggagtattatgagagccttggcatgcccgtcccaccggaagggatcacccctctccaggagtggaaccgggactgccggcctttaaagttcctggatacatccgtagtggcggaagcgttcctccaccatgaagaacgccttgttgacaagggcggctgtatcagctttcagggccgcaaatatgagacaaaaccgtcccttatcggattgaagcgtttaccgcaaagccgctcgaaatgaggccgttttgtgataaaaaagaccccctgccgatttccatgcaggaaacggagccggataattcccgtatgctggaggcgctgaaaaagaagagcgcagcatccaaaaagcacatggcagatgccatctctttcggacagtacaggaaggatggtggcagcaatgtataaagctttttacgaattgcagcgtctccctttcgtgcgcgatatcccgtcggggatgctgtatgagtcaccggcgatggcggacacccttgggcgcctgtcttatgcggcg

SEQ ID NO: 504 - DNA, 572 bp, Enterocloster clostridioformis
  source 1..572: mol_type = genomic DNA
agctgccggaaggtgtatggtattttgcggcaaccaatgcaaaagagcaggtattcctggagtatccgcagcagtccttccccgaaacgaaaaggggccgtccccgtaagcacccggtactatctaatggcccgacatccgtgcgtgatattgcagaggatccatccctgccatgggaaacggtggtgctggcagaaggggcaaaaggcccaatcattgcagaacggaaattcctgcgttgtttttcctgccgtgcagacggaagccggaattatgtgaagccaggggatgaaatatggctttatctgaggaaatatgcaggtgatgaaataaaatatttcgtcagtaacgcccccgcggacctcccggtaggggaactggacagggcagcaacgttaaggtggccgattgaacaatgctttgaggaatgcaagagcaatctggggatgggggattatgagtgccgcagctaccaaggctggaaccgccatatgctgtttgtaatgataacccatctgtttgccacccagatacgggaaatctttaaaaaaaagcaatcccgttgacaatgc

SEQ ID NO: 505 - DNA, 513 bp, Enterocloster clostridioformis
  source 1..513: mol_type = genomic DNA
caatttgctctttcttcttttgaaaacagagagaaaactaagggcaaacggcagatgggaccgggagtgaaaaaccggaaaacaaaaagcagaagtacccggattgttaagtcctgatacttctgcttatgtttactttgttctattttcggctggacagtgagtgtgaagccggtgggaagataacaaagtaatcaggattaattcaatcgctgattacagtataacagattggaaaaatggcgtatagccgggaatctgcacaaagtttatggtttttatcctgcactattacgtccacaacattttttgaatttcttaccacttccacatggacatgggtcattcggatatatttttctaccgtcttcatggcaatgtggaacttccttgcgttttgggtccggctctccataatagactgtcccatcatatctattctcaattcttaaaatatcagaaaatggtataatctgttcagaaatataccagcttgatactttttgattacga

SEQ ID NO: 506 - DNA, 502 bp, Enterocloster clostridioformis
  source 1..502: mol_type = genomic DNA
gagggcgaccgaaggtatgaaggacacagataaacccagggacaaagtttttggatttgttcagggagaaaaaatattctttgatgacatcagaaacagcctcgaaaaggcagttaagcagagtgcggtcttcgaggaaaaagcggcggagggattcgtcaatggtgaagacgagatggcgatgggtacactgtattaatttaaaagacatagcggtagacctgtcattggaatacttagcgccgcaggaggggcaaaacttggagtggcagcggaaaggaacgaacttgaggttaccgcaatggggacagccatacatggcgccaccataagaaggatccccgcagttaatgaccttatcaatgttttccatgacgacaggtctgggttttatatcgtattcaatgatttcgtaatagtctctgagcatcttctgaatcacattcatgagattattatggaataaaatgacgcaaaaaacaagccctaattcccctcatga

SEQ ID NO: 507 - DNA, 488 bp, Enterocloster clostridioformis
  source 1..488: mol_type = genomic DNA
tatactaggaagtgcagcccggttacctacgccggcgcggactgtccgccggtggcgatcttccagggcggccgcgataccattgtggagccggatcagagcgagattctgtaccacgccttggtgaaggcgggagcggacgccacctttgtggcctgctccggcggcgggcacggtccctccctgggggaggagatcgaccagtttgcctacaattttctgaaaaaaaggctgtgacaggagggggaaaccatgaaagaggccaacggattttacatgtatgtgtccaccagggcctgctatgacccggccaaaacaattttcgtcttcgcacccggggagatggcggcggacttgtccctggcggagcagtttgcccggaagtcaggctggcaggcgttgtccgaatacgatggggcggtgctgattctccctctggctccggagggatggaacgcacagtcccattccctgccgggcttaattta

SEQ ID NO: 508 - DNA, 470 bp, Enterocloster clostridioformis
  source 1..470: mol_type = genomic DNA
tcttgttcagttgttcctctgtaaaaagcggatccataacacagcctcaactttctgaaatctctaccagaaagtataccagaaaaagcattccgttcctataggaaactgcattccgggacggaggaaaatccgcccaaaacaaagtgattttcggctttttgcgaattgacaggatccgggctcatatgacgatcttcgggtgacgttcttcaaatgcgccgctggggttcagggataaaccatcgcacagccaatggatctctttcagcgtaactttctgcagttcatccggtgtgtcaggccaatggaaggaatcgcggtccagccgtttcatcaggatccaaaaccctgacccgtcccactgaaggatcttgagcaatgtgcgcctgcgattgcagaacgcgaacatacagcgggagtacggatcgagatggaatttcagtttgatgatggccgctaaaccagtg

SEQ ID NO: 509 - DNA, 462 bp, Enterocloster clostridioformis
  source 1..462: mol_type = genomic DNA
ccacttcaaaccgtgcaggcacaaacttcaggcgcttcaccgtctcttttgtcacgactttatatttggtattgcagtccggacagtttcggtccgcgccggtcagcttatactcaattacttccgttgtctcaaaggcggaaagatcttcctcctttttgccggaacgtttctttcttttataggaagacggatggatctcctccatttccggctccggcgcatcaggctctgcttcctgctctgcctcgttaaaaaggttcagctgcgtatagccatccgcatatttttcgctggatgggccaaactgtttccgctgcgcaagagtcagacggtcagaaagcatcgcgttcaggaattccagttcctttgttttttcttcgaggatctggatctttgtttcctgtttctgataatgctcccgcatggttttcatcagggagatgatatcctccctgctca

SEQ ID NO: 510 - DNA, 458 bp, Enterocloster clostridioformis
  source 1..458: mol_type = genomic DNA
catcctgttgggcttgcagaaacgtttggacgagctttcgcgtgcgcttgcgtatgtctgcatctgtctcgtgccgaaaccggctttataaaggtgacgctgcagggtagggcgcttgagtacgcccggctccgcccagccctcctgctccaggatgaagatgatctgctccacgctccgcctgggtacttccttcctcagttggattgcctgctccacaatcttccggtaattatccggcagcctcccggagacaaccgcctgagccggcacgacgggtttgagaccctcgaagcctttttcttcataggcggcaaggtaccggaagatggtacgctcggataagcctgactttgaggctgcttcttcccgcagctggctgcgtttggcgggatccaggctctcatcaagcagtggcgcgatcaaggtgtagcgtgagagcgcctcgttatccctcc

SEQ ID NO: 511 - DNA, 426 bp, Enterocloster clostridioformis
  source 1..426: mol_type = genomic DNA
cctttctagagctgtaccataaacatgaacgggttcctctggatgaattatacaaaaggacaaggataaggcatggcttttatccccggtcccgctctgcttgactttctctcccatctgcttcatactacatttattacagatgggaggcggttgcaaatgaatcaaagatatgtggatgaactcagacaaaaatacatcaaaaatcctccagaaggaatgacacccaagctggtcagaaatatgaccgattccgatttattggatatgcattactttttaactgaagatgatgaccttgacgatgatgggttagaagaaggattctatatcaatcttttttaatcaccgtctattttctatgtcctgatttagcagtgttatcggtttacataactcgttttcagtaaggactttcctaatata

SEQ ID NO: 512 - DNA, 359 bp, Enterocloster clostridioformis
  source 1..359: mol_type = genomic DNA
cgatgttcgatccgattgcattagatgcttggtattccgatgaaaataatgattccttactccaaacggaactggaacactatcttcaaaattatttttcctgtttttcccagcagccacaacgaaggttgttccaaacttttatacaagggcttttgagcccgttggaacgcaaatcgattgagccaattgcccttcacttttccggtgaaaagtatgtcagacccttgcagcagttctttacccgttccccttttgatgagcagccccttctggatacctaccaggagctcctgtccaggcagattggggcaggctgcggcatgttgtccgtggatgacacaagctttgtaaaaaaa

SEQ ID NO: 513 - DNA, 355 bp, Enterocloster clostridioformis
  source 1..355: mol_type = genomic DNA
ccatttcatgtctgcagtttgggcattgcagggggtcgtaccccatggtaagaaggaaaagcttacgccaggtgttgaaatcgaggagaatcctgtgtttggattttgggactgctttatggagctgattgtcaatctcccggtgtctggcataaagcccatagtaccgggtcatcttgaagtttttttcaggtatatgcagaatgagcagcttaatgaaatcaatggcgggaagagtcttttttacaaaagagttgtcttcatgcttattgtaatggaaagtcaccatctccccatcgtaggaatcaatcctggaaagagcaatgacagggcggccaagataacggctgacata

SEQ ID NO: 514 - DNA, 341 bp, Enterocloster clostridioformis
  source 1..341: mol_type = genomic DNA
gtaatacgaggcatgctcctttacgtgtctgccagccataagttcttcataacagcagtgcaggatatggtcaaaattccgttcgtctgtcgccgccttgaaactatcatggtagacgtggatatagaatcgatgccctttccacgtggaagattccgtgaccgcgtacagttcgtccccaaagactgcacagtaattgtgatgtgaacggatgctatccctgtagcgttctactgccttgcaagcgaaaccgaccgtaaaaggcactccgaccaggaacttcttatgactggcatacattgcgtcaaggttcggttcactataaaagcctttatccatga

SEQ ID NO: 515 - DNA, 318 bp, Enterocloster clostridioformis
  source 1..318: mol_type = genomic DNA
ccacctgatggaatttttctattttcccctttgattttccgctgcggacttttgcgtgccgaaccgtaatcccaagtctggcaagggagaatttcagctgttttgccacatactgcgaaccgttgtcaaagtatacggcatcacaagccccggccttcaagaggacgttccggaaggtatcctccacgatgctttcctcctggttgtcataaaaccgggaatggaccaggtatctggagtggtcatcgatggcggaggacagatatgtctgcaccatcgccccgtttttccctatggggagcttacacccatacttga

SEQ ID NO: 516 - DNA, 316 bp, Enterocloster clostridioformis
  source 1..316: mol_type = genomic DNA
aaaataaattcataaatttgctataaaggggcttatcgtatgaaacactttaaatataatccgacatctttaactcaactttaatgatacaacttttaaaattgcatacgaatatatttcacctttaatggctcgtacagactttatgttttatgcgggcttttttctatgtttttcaaaagttataaacggtattttcatgatgaaacatttcgtttatatagttttgctttggtagaaaggaggtgaaatcgtgaggatatcttctttcgagcatatcgtcagattacaatttaatgctttgatgatgattgtt

SEQ ID NO: 517 - DNA, 304 bp, Enterocloster clostridioformis
  source 1..304: mol_type = genomic DNA
atcgaaggttgcaacctctacatataatcccatatgctatactgctttgttttctctacgtttttatagattgttttataatttttttcctgtccctgttctttcacatatctacttatgatttgctcattcccatgttcactcaccgttgctacgtaatagccatctgtccagaattctcctccccacaattttttcttcacttgtggacatttcgcgaacacctcccgggctatgatgctcttcactatttggatgattttttttggactatatgcaggcactgactggataagaaaatgta

SEQ ID NO: 518 - DNA, 292 bp, Enterocloster clostridioformis
  source 1..292: mol_type = genomic DNA
tatacacatatttagggggtcaacccatatagctcataaatgtctttttgaaatggggtaagctcagtggtgtatttttttcgtgttccatttatactaacactgcggacagttttcatttcgcttattactttttgaaggtcatgatttttaaaccatccagccgcattcatcacctgctttaaccgggttgtgatcaggagtgctataaactgtatgaaaatcctgccttccatggctgccgccgaatggatacgtaaacgcttcatgtcaagatcatttttgaggtcat

SEQ ID NO: 519 - DNA, 287 bp, Enterocloster clostridioformis
  source 1..287: mol_type = genomic DNA
tcacgcctgcgctgcagcagaactttttcagcaggtggattgatgtaaaccgccagaaagatgtctatgcaatggacatcaccagtgtatcctcctacagcgaattgattgactttgtccgttggggatacaaccgtgatggggaaaaactgccccagatcaacctccttatgctcaccggcgtcacttcccatatgccgctgtattacaggattattcccggcagcataaaggatgtgaacaccctggaggacagcatagcgaatatatccgttttggacagtccg

SEQ ID NO: 520 - DNA, 281 bp, Enterocloster clostridioformis
  source 1..281: mol_type = genomic DNA
gtctgatttaatgatcaatttaatgtccctatggcattttctagacaattgtatatacttttcgtaatcaccagatcgattcatttttaccttgttcccggaaactaacaaactatgagccattaaccgtcccatctcaggatattgtctcaccaattcaggatgcttgttcatgattaaaatgcatgtctcatataatttttctgggtttccgcttatcgagtcatctccaattgaatactcaactagcccttcgtctagacaataaagtgagtattcct

SEQ ID NO: 521 - DNA, 247 bp, Enterocloster clostridioformis
  source 1..247: mol_type = genomic DNA
gagacaaaacataaagtcaggcgcagaaggctgcgcacggtgattggtaatatgatcatgatggcaggtcacgttacagagcatgcccggcagttgttgttaggccttggccgaagtaatacatggcggtatgcttttgcgcaggtgtatacagcatttgcggatttccggtcataaatgtcatcctgccaggtagcctttgagaaaccaaggggaaagcatgcccttttgaaaggatttctagtgt

SEQ ID NO: 522 - DNA, 235 bp, Enterocloster clostridioformis
  source 1..235: mol_type = genomic DNA
tgggtcgcaaagattgggcttggcataaacgtagaatccatttctgtccctatggtaaacggcggctttcatctttttaaaagagggaccgatgcgtttttccagtttatttaacaaaacagtctgaaaggatttacggaggtaggaataattgaaatatgtgaccttgcgccagacaccatcatcagaaaacccgccttcggtaaggagacagtggatgtgtggattccaaccg

SEQ ID NO: 523 - DNA, 232 bp, Enterocloster clostridioformis
  source 1..232: mol_type = genomic DNA
cagtaaactgcgcaggttcaaatcgccgcatgcaaagcagtatgaagttgtcaaagatcaaggcgtgcttccatttgactgaaaagcctatgcaggagcactctctatcaaaacgatggttttaagggtggagaaatccacccagaagccaccgcaatgactgacatgagttagagcagcctgctgaaaaatgaacaaatctggtcagcgtcatatcaggaggtcagtaaca

SEQ ID NO: 524 - DNA, 221 bp, Enterocloster clostridioformis
  source 1..221: mol_type = genomic DNA
accgccgtatggtttcatcacaaggataatcctcgttcatggtatcctccggcatgatatcaccatccagcacggcagcgataaggtcggagccataatgcttataagggacgagcttatcagggagaagactgtgaagcctccggcagccctcattgtcacaccgtctccgctcaatcatcagccacaccacctgtccgccatccagcttcatgattcgt

SEQ ID NO: 525 - DNA, 182 bp, Enterocloster clostridioformis
  source 1..182: mol_type = genomic DNA
ataagttttttcaggttcacaaaacacctgtaaggggcatcagggtggattacaacgaggaagccatcagcaggcataaaaggaaccatatcggctggttcgtgcttgtaagcaatcacatcaaggataagacgaaagctcttgaggtgtatcgcgacaaggatgctgttgaaaaatgtttc

SEQ ID NO: 526 - DNA, 171 bp, Enterocloster clostridioformis
  source 1..171: mol_type = genomic DNA
cagaagaccctcccgctaagttgtgtcctctgagactcatgataaaaccatgattattgtatcagagtacacggaatctgacaagggggatggcgtaattactatccattgtaacgaaaattgtatatgccccatatgccggtcccctgtcagccaccgtgactggaaacc

SEQ ID NO: 527 - DNA, 159 bp, Enterocloster clostridioformis
  source 1..159: mol_type = genomic DNA
gacggataccaggaaaccgcctgagttatagaccatgcgcaggacagcgggaagccacctgtcacaggatttcctaattgtttccaaaatggccgcgccggccagtccgggattccttaagaggctcatagcctgccgacagtaaccttctgtccggga

SEQ ID NO: 528 - DNA, 154 bp, Enterocloster clostridioformis
  source 1..154: mol_type = genomic DNA
ttttccagacgactggaaacgcatattgacgtgcgcgtattaccttgtcagcgaaggcggggcattatgtcatattgaacagtggcagcggatgtatccgccaccatgccgttctctgcttgcaagccggcgggtgagtgaactccttgtaagg

SEQ ID NO: 529 - DNA, 137 bp, Enterocloster clostridioformis
  source 1..137: mol_type = genomic DNA
tttcttccgggatatggcattcctcacgcagcttggaataatccccgctgaaccattcctttgggatgtacagttcataatccacaagcccatatcctttgtccccggcgtaggcaaggaacaccccggactggcag

SEQ ID NO: 530 - DNA, 132 bp, Enterocloster clostridioformis
  source 1..132: mol_type = genomic DNA
cctgaacctttccacaaagaccatggcgaattggatcatccagtgtgcggaccggtatctgcagccgctttatgaactgatgaaggaagaattcctccggagccggtacgctcatggggatgaaacccgtgt

SEQ ID NO: 531 - DNA, 131 bp, Enterocloster clostridioformis
  source 1..131: mol_type = genomic DNA
ccttaatccgtggagtttaattattatttcatgctgcaatcactttgtttatgcggtctgtcgatacttttaaaaatattaacaatatcacccatttggtgatgttttctgatacaatattccataagaaa

SEQ ID NO: 532 - DNA, 129 bp, Enterocloster clostridioformis
  source 1..129: mol_type = genomic DNA
ccctcacacgtttctttgattaccctatctacatcttcatctattactactcttctatattttgctggacatacgaaatgatacatgagtactgatacattgtgtgacttgcgtattgtttcactcatc

SEQ ID NO: 533 - DNA, 126 bp, Enterocloster clostridioformis
  source 1..126: mol_type = genomic DNA
tttgagactgtcacagccaaaggacaagaacaaagacagtttaccgtttgtttgtattggtctttaggttgaattttccttgtaaatacgttgtttccgggtgttttccttttcagcttttctttc

SEQ ID NO: 534 - DNA, 125 bp, Enterocloster clostridioformis
  source 1..125: mol_type = genomic DNA
agagtcctatgacttcgcggtccgtcattccaaggtttgtccaccaggtattgacttcaatgtcgccttccagaaggaactggccatatttatcaatggtacggtttatgatctcgtacccggca

SEQ ID NO: 535 - DNA, 117 bp, Enterocloster clostridioformis
  source 1..117: mol_type = genomic DNA
tgtgcccttcctgccgatgctttcctgtccgatcatccgcagaatgttataggccaggattgccagttccagtaccagctcattggtctcaaatttgccggatggcagccgctccat

SEQ ID NO: 536 - DNA, 117 bp, Enterocloster clostridioformis
  source 1..117: mol_type = genomic DNA
gagagtatgaaagtttttctgtaaatagctattaagcattaggtcttctatgataaaatctattatcataaggaggcctattattatggcaagaagagaaaaacagcccgtacacaa

SEQ ID NO: 537 - DNA, 115 bp, Enterocloster clostridioformis
  source 1..115: mol_type = genomic DNA
acactgggttactggatccgaaagctccagtcagaagcagctgagacagaaagtgcttctgatccggtgtttgcaaagctcccttcggaacatgaactccatttcagtacagcag

SEQ ID NO: 538 - DNA, 114 bp, Enterocloster clostridioformis
  source 1..114: mol_type = genomic DNA
cctgaatccgtgaaactggttgttttatgatgctaatcccaaatcggattggcttattcttgataaatagttcttcaaagacagtattttaatgtatctggattgattttggtt

SEQ ID NO: 539 - DNA, 100 bp, Enterocloster clostridioformis
  source 1..100: mol_type = genomic DNA
gtaagtaggtaataatcagtatctgcaaatttccatccacatttgataagataagttcaaatgatggaggtgataccaataaatacgaatgacaatgtaa

SEQ ID NO: 540 - DNA, 100 bp, Enterocloster clostridioformis
  source 1..100: mol_type = genomic DNA
tgactttctctttctgtagaatgttcattgacattatacagagcaagtctctgacattcaagcagagcagtatggatgacaaattagcttagcaacaaca
